United States Patent Application Publication US 2005/0208558 A1 - sequence listing, part 24

SEQ ID NO: 23846 - DNA, 5589 bp, DROSOPHILA
atcgacggcgctgcaagtaaaccaatataaagtcagggtttatttgtcataaaataaataagaaaagaattggaccactttagcatacgaatttcccaaaatgtcgagtgcccagcgctcgtttgtgcaaaaagtttccaagcagtcggctgcggatgtacgaaaaaatgtttctggttgccatctatcaaaggcaatggacccatcattgtgtggttcttcgatctccccgacagagccccttgattacgaagaatttctatcccagcatatgaacatcatcaaccgggatcccttgaaacatatattggactttcctcaaggggatgtaactgttaaaatcattccccgaaaaatcagaactgttgatcacgttgttcccaatgagaatttgtctgatttgccccatcacgtacaagaatgtgttaactgctatacgcgcccatggaaggtggttgaatatgcacagcggcacctttccagttcttgctatatccgcgagcgtatcgaccgcggaaccataagtccctctgcgtaccagcaggaattcgagatcgacaaggatttttcgtcatttgaagaggcgttcgcttataaaagcgagagctgcactccaagttctcgacaatccattgcaagtttggcttcagtaagctcttgtacggacactttgaccccgcgtggttcttgggctagctttgatcttcgacgttcggttaatgacccactaatacccaatttgcttgacaatgtacctccggagcatattgatcaatccaatgaagcacgccggcagcaagatcgacaaatggctcttttctcactgtatccggaatctgaagcggaggaaaacattgaacgccgcctgctcgcagagattccagttgaacatatgggtcatcgcattcaggttaactgcctacagcttcggcttgagctggaagtggagccaatttttgcatcgatggctatttatgatgctaaggaacggcaaaaaatttctgaaaatttctattttgacatgaacgcagatagtcttaaacgcatgttgtcaagtcatgtacagtgcgccgacataagtacccagagccactcagccatattcgaaatttcatatccgagtaacgatttatttctcgtgattcgtctggaaaaagttttgcagggtgacataaacaattccgtcgagccgtatctcaaagaagacaaagataaataccgagagaaagtaaaatccaacgctgtggactactgtgaacgactaggcaaataccgaatgccgtttgcatggacaggaatctacctaacaaatgtttttaatggcgataactttgaaagcaaagacgctggcgccgcggaacgggattcctttggaaatgcttgtggcagcagcttgggcacagcgccaagctccaatagcttagatcgaaaatcttccacaagtagctttgatcaactaaggcgaaaagctaacgatatgagcggaacacttacacgacgtggttcgcttgaacggaaggaaaagcaccgatcctggtccccagatgattttgcaaacgttgtagaaaactttcgtcctatcactataacagtaccaagcttctttaaacaagaggcagataaaatgaaagacgaggatttgtacaaaattttaccagagttaaaacgaccgagctcagttatgaagaagtacaaatgcatacctggttctattaaattagaaatatcaccttgcgtcgaggaagccaagaatgcattaacgccagagttagcacctataaaccctcaaagtgcagataatgtgcgcccagttaaggaaatcttagaatttccgcaatcggcgatttacaatccacattatagctatcgcaatctcctatttgtgtcaccaaaggagctaaatttttcttcgcgtgcaggttctgctcgaaacattgccgttcgcgttcaactaatggctggagaaacgccaaaagatgcggtcaatgccatctacggcaagtcgtcttgtcccaaattttctactgaagcatttacagctgtcaattatcataacaaatgcccatcattctacgatgaaataaaaattgcgctgcctgcatcaataaagcagcatcaccatttattgttcaccatttaccatgtttcatgtcaaaagaaaccacaggacttgcagccgtcagtagagactcctatcggctacacatggttgcccttactggaagatggaaaacttaagtttggggaatttaatcttcctgttatggtagaatcaccgccggaaaattactcatttataccaccgaatgttcacctgcctggaattaaatggctggacaatcacagagccgtgttttctattaatgtagaagcagtcaccgcaattcatactttggattctttcctcgatcgattcttcttaatttgcgaatatctagacactcgaaatataccttcccatattggcgagaataatatagaaacagaattaaagaaatgcttgctggatatcgaatatgcaaatcgtgagccattagtgaggcatctaccattagtcttggataagcttatcgaattgttagttgtcacccacaaagttggtggacaagcaatgtctctgggatctacggttttcgaagttctttgtttggtatcatctttgttatcaatacttaacgacgatcaatatgaccaatacggtcggcaaagtttgctatcaacatatgtgcactttcaatgtaaaattccgcacccctttcaaagcaaacagcgactaacatgcagtcgcagcacaacagaagacttgcaattaagcgaatcgtacaccatatatgataatgttttagcaagtggccgaagcttggatcgcaaagagctgtccatagatgtccttcactcgatggctgcacgggatgtccaagtgcggctgcttcacgaagaattagccttgcattgggttgttgcaagtggaaaggcagctgacttagccatgtcaaattcgtggtttttatttgagcttattgtcaaatctatgattgaacatttgcattgttcaaatactttaaatggtccccgcaaacatcgatttccacatcagtttaatgatgatctatccaccctggtgcacttagttacaacaaaagtggtcggctaccacagcaacgaacctaaattagcgcagtcattaaatgcaagtttaggcttttttatatttgacatactaagcatcatggatcggggatttgttttcggcctcatcaaaacgtacacaaaggttctgatttctaaaaatgcttcaataccggatctaatgaactataaaatagactttttgagaattgtgtgtagtcatgagcattttgtagccttaaacttgccgtttggtacttcatacacaatggtaacagcgccatgcagccccacgccaagcacaacgtcgagcaacagccaaacttcttgcggatcactagagagagcccttcacgccgaccttagtcaagaattcctccagcaacattttctagtcggacttgttctgagcgacttagcagcagtaatggaggtgccaaacccccaattacatggaaaagcaataaggtgtattcgcaacctgatgacatctcacgatttggacgcgcggtatagcgaaactgatgcacgtgcaagggtggctgctttatatataccgctactttctatagtgatggattgcattcctcagttgcatcagcacggccttgagcaggatcgtctgcagcaaatcggtcaacttgaagactatcaagggccacatcaaactattacagcatcaaccataaatccggaagtggcatttgcgatatcgggaagtcgtccctactcctacttgaatgaacaagttaaaaacaaattgcccctcagctcggagaatacccgccatttattggtgtgttttctgtgggtgctaaaaaacttggagcgcaacgttttatatcgctggcttatggatttaagtccgcatagagtgcaccaaatgcttcaaggtgttaacgtttgcttgaaaactttcgagtacacaggacaaaaaaacgtggccacccttaaacgaacgaatacacaaagttttaggaaaactggatctactgatgttaaggaaaagctggaagaatgtattagaggcacaaattcagcacgttatgatttaataaatcgtcgaaaagatcgtaattcaacagaaaaattccgatggaggaaagaccagatgccatatcgctctcaatatgcggatgctgtgggaaaaagtgagcatgaacttgaattaagtcatttcatcgaaggctctttggcaactgaagttgcacttgtacttctcgatacccttgaaataattgttcatgctgctgccaacctttatcacaatcttcttggaactgtgctaaaggtgcttcttcattctttgtcccggaatcaatctgttttggccctgcaaaacttgtttgcctcccaacgcgcgttaatctttaaatttccaaacttattatttgatgacgagaccgatatatgtgcggatttgtgtctaattttactgaaacattgtgggtccctattgccaggaatacgatcacaggcagctgcatcactatatttactaatgagacaaaattttgaaattggaaataacttttacactgaacgattcggaccggactctgtgcatatcattaaagattccaataccgttgatattaatagcttggatcccgataaggcttacattcaaattacttatgttgaaccctactttgaaacatatgaaatgcgtcatcgtgagacatactttgagcggaatttcaatataaaacgttttatatatgccacgccttttactaaaaatggaaaggcacatggcgaactaaatgagcagtgtaaacggaaaacgattttgaccacggcgaatcactttccatacgtaaaaactcgcattatggtaattagccgacagcaaatagtcctggaaccgattgaagtggcaattgaagatattcaaaaaaaaacattggaattggcagctgccacgaatcaagagccagcagaccccaaaatattgcaaatggtactgcagggatgtattggaaccactgttaaccaaggaccgatggaaatggcgagtgtgttcctttccaatttatccgacggaacaactgtaccgacaaaacaccaaaacaaacttcggttgtgctttcgcgagttttcaaagcgttgtgctgatgctttgaaaaagaatcgcaatctaatactttcagatcaaaaagattaccaacgagaactggaacgtaacaacgatcggttcattgaacgattgactccctttattactcttacatcagttcagaatcatggcgttgtcaaggccaacgcgtacaacaacaaaagtactcctttgaaatgcgtatcggattattttaagtaaatcttacattttaaattatcgatctctataattgctaatgtaatagcataacttttttatgcatctaatagattaagcaaaatattaaaaagcgaaaaaaataaagtttacacttttttacttttacgaaaatagttaaa

SEQ ID NO: 23847 - protein, 1782 aa, DROSOPHILA
MSSAQRSFVQKVSKQSAADVRKNVSGCHLSKAMDPSLCGSSISPTEPLDYEEFLSQHMNIINRDPLKHILDFPQGDVTVKIIPRKIRTVDHVVPNENLSDLPHHVQECVNCYTRPWKVVEYAQRHLSSSCYIRERIDRGTISPSAYQQEFEIDKDFSSFEEAFAYKSESCTPSSRQSIASLASVSSCTDTLTPRGSWASFDLRRSVNDPLIPNLLDNVPPEHIDQSNEARRQQDRQMALFSLYPESEAEENIERRLLAEIPVEHMGHRIQVNCLQLRLELEVEPIFASMAIYDAKERQKISENFYFDMNADSLKRMLSSHVQCADISTQSHSAIFEISYPSNDLFLVIRLEKVLQGDINNSVEPYLKEDKDKYREKVKSNAVDYCERLGKYRMPFAWTGIYLTNVFNGDNFESKDAGAAERDSFGNACGSSLGTAPSSNSLDRKSSTSSFDQLRRKANDMSGTLTRRGSLERKEKHRSWSPDDFANVVENFRPITITVPSFFKQEADKMKDEDLYKILPELKRPSSVMKKYKCIPGSIKLEISPCVEEAKNALTPELAPINPQSADNVRPVKEILEFPQSAIYNPHYSYRNLLFVSPKELNFSSRAGSARNIAVRVQLMAGETPKDAVNAIYGKSSCPKFSTEAFTAVNYHNKCPSFYDEIKIALPASIKQHHHLLFTIYHVSCQKKPQDLQPSVETPIGYTWLPLLEDGKLKFGEFNLPVMVESPPENYSFIPPNVHLPGIKWLDNHRAVFSINVEAVTAIHTLDSFLDRFFLICEYLDTRNIPSHIGENNIETELKKCLLDIEYANREPLVRHLPLVLDKLIELLVVTHKVGGQAMSLGSTVFEVLCLVSSLLSILNDDQYDQYGRQSLLSTYVHFQCKIPHPFQSKQRLTCSRSTTEDLQLSESYTIYDNVLASGRSLDRKELSIDVLHSMAARDVQVRLLHEELALHWVVASGKAADLAMSNSWFLFELIVKSMIEHLHCSNTLNGPRKHRFPHQFNDDLSTLVHLVTTKVVGYHSNEPKLAQSLNASLGFFIFDILSIMDRGFVFGLIKTYTKVLISKNASIPDLMNYKIDFLRIVCSHEHFVALNLPFGTSYTMVTAPCSPTPSTTSSNSQTSCGSLERALHADLSQEFLQQHFLVGLVLSDLAAVMEVPNPQLHGKAIRCIRNLMTSHDLDARYSETDARARVAALYIPLLSIVMDCIPQLHQHGLEQDRLQQIGQLEDYQGPHQTITASTINPEVAFAISGSRPYSYLNEQVKNKLPLSSENTRHLLVCFLWVLKNLERNVLYRWLMDLSPHRVHQMLQGVNVCLKTFEYTGQKNVATLKRTNTQSFRKTGSTDVKEKLEECIRGTNSARYDLINRRKDRNSTEKFRWRKDQMPYRSQYADAVGKSEHELELSHFIEGSLATEVALVLLDTLEIIVHAAANLYHNLLGTVLKVLLHSLSRNQSVLALQNLFASQRALIFKFPNLLFDDETDICADLCLILLKHCGSLLPGIRSQAAASLYLLMRQNFEIGNNFYTERFGPDSVHIIKDSNTVDINSLDPDKAYIQITYVEPYFETYEMRHRETYFERNFNIKRFIYATPFTKNGKAHGELNEQCKRKTILTTANHFPYVKTRIMVISRQQIVLEPIEVAIEDIQKKTLELAAATNQEPADPKILQMVLQGCIGTTVNQGPMEMASVFLSNLSDGTTVPTKHQNKLRLCFREFSKRCADALKKNRNLILSDQKDYQRELERNNDRFIERLTPFITLTSVQNHGVVKANAYNNKSTPLKCVSDYFK

SEQ ID NO: 23848 - DNA, 5098 bp, DROSOPHILA
atttgaaaacatatatttttggaactggtgatattattatagatattaaaataaataaatggtatacggaatttatttacatttatattaacatttaattgaattatataattttttaaataaatgcatgtaaagacaatgtagctgtcctataaatcattttggaacaatacaatatattgcgctattttagctcaaatatttctaaaaatataagaaattcgagaaggtaagcatatttgagaagtaaattggctcagtcgacttgcattttactcaggcacttgcaacttgatttacctgttggttgtttagataaggcagcatctgcttaattcgaagaagttcaagtggatttccactcaggaaggaccctccgatattgagctacttaccaaatctgtccgtctagcccggattgacaacaaaagccccaactggccattgtggggattgctttaccttgattacttttgcagccaggaactttccgttttgcatttctttcgctttgtctgcctcggaagttgatttagcctgaaatggttgacccactaaccattttacactcggaaaagtttgtaagttataaatgcacttagtcagtgacgtcatttgttatagttaattcaggattaaatactcgcttgctcactcagcgaaagaatgtataaataaaagtcatagtatcatgcattttgtaacgctcaattcattgaataattgtaaacgataggaccgccttgcgacccatttgaaaatgaaacttgctgggttctggcattccgagtgtactctggaattttccgcctaatgattagagacacgccagtgggcgtggccccgagttgcgacctgcatttatatgggcgatgccattatagagacattcggctcgacatgaagcgccaattggcccgataactgagtgcggcagtcagttgtggtcttgtgaacttggccaaaatcaatataaaagccaaacgctgcaaacggcaataaagcaaattcaattgtgactgcggttgtcaaacaattcttgcgtgtcgggtgtgtgcagtatcgagttctggccataactacttctgctaaaagcgaacggtagggtgaaggaccagctgccagtttctgtacggaaaaggacctgccgggagtgggggccgaggtggccaggacgaaggcgaatgggaggtcgaaagttgcccaggcataggcaaacgacgcgttgcaacacgaaaattgaaatggcaattaaaaaaccatccatcgttcctgccgcacacaactgcgataggtactcgcagtcgaacaaacctccattcatactcgttctacaaaaatgtgctgttgctgtaatttcattcgtcctccatttttgtgccagtgtgtgcgtgtgcgtgtgtgtgtgagtcgaggggcgaatgtcgttttgtggctttgtttcggttgttgcgttgacatttgatgaaacaaaagtgacagttgtgcacaagttgaagtctttgttttgcgtatttcggttgtacaatttcaaaagaagccagcgaataggaaattttatattttgataccctggcatccggcgcaaaagtgggaggatgagtacataaaataagacttctcagtgccaattctacttccgaatatataagctttgcctaacaatgtaaactcaaaagtaatttgtataattttggaatatattttcaaaaaaacgaatttgaactatgttacttattacacggcttatcttaaaatatttcaatattttgtctacttcgtgtaaagttatgttctgctctctgcgatctgtgttaaatatactaatattcactctaatgcaaatgcatttttctacatcgtttaacaattttatatggctatcggtgtgcttaagaaagaaaccctttgagttggttttaaataaaaagtgaatcttacttggcttgtgaaaaaggccagttgcctcccacatatatcataagcaatccccgaatccttgaattcttagctaggcaatatatcatcgtcgacctggacgagggactccagggaacggatgggggcatgccacgtgggcatgtgtttgtcagacggaacacgacaattgtggacttgtgacgactcgctgacgtctcgggcacagttccgtttccgttttggcggtcgctttttgttcggccatcagccgctggaattaatttggcgtgcgctgagctggagagaaacaaatgatatttttaagttttcatggctttcaaaaatacaaaatataaaaagtacaatgaaagaaaacattctatggctcttaccctctaaattaacttcaaacgaaaaaatataatttcaaaataagttaataaattaaaatgtgttctcatttcatggaacacataattgcatagtttcatagctttttccatttctccggcctctcatataaatgcaattatttcttcagattttgttgtatttcttggaatctaatttagagaaagggcgccatacagagaacggagccagctggactaaggaattccattgttgtcttttaatggggctttccctccagtgtacccacatagtgccacacccattgtcattgtccagctgtcacgcgtggcacatcgtcgtcaacagcatctgcatcctcatccacatcctcgtccttactctgttcctcatacttgtccttccgacgcttgccctcgtcctgtgccgtgtactccgctatgcatcgccgcttttgtttcacgtttcacgttccacgtttctcgtttgttttctttccagagcttgtttttgttttattcagagctcgcaaataaggccgagccagggcacaatttttgctgtttcacggatggaccaggaaggaccacgcagcagcggaaaggagcgaaacggaaagagccacattaaaatggctttgaatggctttggtcggcgtgtcagtgcgtctgtccttttaatcgccttgtcgctgctcagcggagcgctgatcctgccgccggctgcggcgcagcgtgacgagaacgtgggttaatgaagtgcccggccgcactgctgcgcctccgccctgccacgcccacttaagcaacaatttttaattgcagtatccaccgccgggcatcctgaaaatggccaagcccttccacgacgcgtgtgtggagaagacgggcgtaaccgagggtgagtagcaaatggcaatgggccccgcccgaaagtgagcccataattgcagcaatcgggggaggagggggtccttatgaacccttagccatgtgctaagttcgcattcatccgtcattaaacattgggtatttaaaaacaattgaataagtcacaagaagttgaatttttgcattattttttcgtactaaagtgcatcagcagtgatgagtaaaaccagtattaattatccgtatgcatttgtaggaactgctccgctctatctctttcaccaaaaccgcacagctatctgaataaaggaataatttctaatataatcattacggatttgcagaagccaatgtggtgcttattggctaaataaagctgtccaaaactgtgcagttgtggcagtctaagtttaaatttccattcatttcatctccagctgccatcaaggagttcagcgatggggagattcacgaggacgagaagctcaaatgctacatgaactgcttcttccacgagatcgaagtggtggacgacaatggggacgtgcatctggagaagctcttcgccacggtaccgctctccatgcgcgacaagctgatggagatgtccaagggctgcgtccatccggagggcgatacgctgtgccacaaggcctggtggttccaccagtgctggaaaaaggccgatcccaaggtgcgaccgaaatccttttaagctgagacccaattcccaatttcttcattgcagcactacttcttgccgtgaacacctgggccacctttcagcccagttccagttccatggtccgtggaccacccgttgccgaccccgctctatttatgtggtagtttagtttctgctagttttcaatagctgtcgagtaataaacgtaggcgagttgtgcatgcaagctaagctttcaattatttgccgactgccaaaaggaaaacgctcaatgcgctgaaaagtgtgctgcaaaaaacgggccacacaaaggacgacacacacacacgcaggcacactcgcttttgacataatttacacgcattgtggcggagtgtacgcttgtgtgcctgcgaccgtgtgtaaataaaattatgcgtaaacttcgtcggcttgttgacgccgacaagcgtgttacattgcagcatttacatgcgagctgctgttttgcgctttttgctttcaattcgctgtcaaaagaggccaagagctgggaaaaaacatttaaataaatgtttaagctggtcaggggctttgtgagtcattagttcggttccggagcagcaaacaaatcgaccggtttaatatcttattgggcatcaatcacttcgtatcacacagaaagtcaagagttgtttgcgccgtggcaaaaacttgtataaaaacaaataattacggtgctaattgacatgctacttaaaaaaactttaattgagtatgcggattattgcattgaaaagatatataagccaaaaaaagtgtctgtcagtaggacaattgaacacgttatttgttacaatcaaaatttaaaagaaaatgcagagcttaaacttgtagttacccatatcgattagtcacaatttgtgaaaaagtcattatagtttcattagcttaaagtattcatcggattcagttgccagcttttgtatgattttctgccccaaatgttgtcggtcccttagggtaggggtaaaaatgcaatttaaggaccatcccttgaggttattacatcgaaatattgaaataaaattccatttaaggtatttttctcatatttctgccgcttcaagtttttcttctgcccgcattacatttccatggccattaattctaatttttttttttttcaatttaacatatatttcattcctgtcggtcaaatgttcgccggcacctttgaaccggcagagtt

SEQ ID NO: 23849 - DNA, 846 bp, DROSOPHILA
aaagcaaattcaattgtgactgcggttgtcaaacaattcttgcgtgtcgggtgtgtgcagtatcgagttctggccataactacttctgctaaaagcgaacgagcttgtttttgttttattcagagctcgcaaataaggccgagccagggcacaatttttgctgtttcacggatggaccaggaaggaccacgcagcagcggaaaggagcgaaacggaaagagccacattaaaatggctttgaatggctttggtcggcgtgtcagtgcgtctgtccttttaatcgccttgtcgctgctcagcggagcgctgatcctgccgccggctgcggcgcagcgtgacgagaactatccaccgccgggcatcctgaaaatggccaagcccttccacgacgcgtgtgtggagaagacgggcgtaaccgaggctgccatcaaggagttcagcgatggggagattcacgaggacgagaagctcaaatgctacatgaactgcttcttccacgagatcgaagtggtggacgacaatggggacgtgcatctggagaagctcttcgccacggtaccgctctccatgcgcgacaagctgatggagatgtccaagggctgcgtccatccggagggcgatacgctgtgccacaaggcctggtggttccaccagtgctggaaaaaggccgatcccaagcactacttcttgccgtgaacacctgggccacctttcagcccagttccagttccatggtccgtggaccacccgttgccgaccccgctctatttatgtggtagtttagtttctgctagttttcaatagctgtcgagtaataaacgtaggcgagttgtgcatgcaagctaa

SEQ ID NO: 23850 - protein, 174 aa, DROSOPHILA
MDQEGPRSSGKERNGKSHIKMALNGFGRRVSASVLLIALSLLSGALILPPAAAQRDENYPPPGILKMAKPFHDACVEKTGVTEAAIKEFSDGEIHEDEKLKCYMNCFFHEIEVVDDNGDVHLEKLFATVPLSMRDKLMEMSKGCVHPEGDTLCHKAWWFHQCWKKADPKHYFLP

SEQ ID NO: 23851 - DNA, 2643 bp, DROSOPHILA
gcggatgcgcttgcattgctgattgagagccgcggatagaaattgctttgatttcatggatgattgaagtgctcggctctggaatatgtttgcaattggtgagcaacaggatgaaggagccagtagctcataactcaaaaagcagtagaactatggatctaccaattagtacaaatgataacaaactagttcaataggattgacattatcaacatttagccgagtacctaattctctcaatgaatgctatactacgaagctatataccagtaactttagattcagagtgtctctattccttaattctaaaccacacatatgtatgaaacaaagcaatattcattcacttttaatttacaacctcagctagctgtgattgaaaaaaggtaatatatttccaggcgcaactttgattgatgccacctttcactgctcgacttcgaggcaattgagttacgttcggtatttcaaaaattccccattgtctacgcgaattcgttgatgtcggcgtgtcaaaagaagcgcaaattggaattgaatttgacatacgttttttggcagagcgatatttgacttttatgacatgtttccgcccacacagtaagggccgcctttacactcgtacactcgtaatgcgtgcgtgctgccacgcccacaaaaataaagtattgcgaatgcagggctctgatcgcaatgaaccagttcggcgtgttgggtatgacactcaaaaattgcaggtcccggccacatacaatcatggcttaatttgtgtgtttctagtttttagttctccatttgccagctggctatcaattgccgctctgttcgggctgtcatttattcatttattcatttgctttgcgtgctgtcaaatggattcgactgcaactggcagcctgcaattagtgtgcgttttctaatgacagtcatcacggcgttgaatattgaaatggagccccagtaatctcataaaagggccgtgccagccctccggccattcattgtagtttcaaaatggtcaaatacccactgatactacttttgattggctgtgccgctgcccaggaaccaaggcgcgatggagaggttctttctggccttaacaaaagttttccaatttggtttataattttcgcaatattttccagtggcctccgccagcgattttaaaactgggcaagcacttccatgacatttgtgctcccaaaactggcgttactgatggtaagttggactcaaaaacggaaaaatctttaataccaattttattaacagaggccatcaaggagttcagcgatgggcaaattcatgaggacgaggccctcaagtgctatatgaactgcctcttccacgagttcgaggtggtcgacgacaatggggatgtccacatggagaaggtcttgaacgccattccgggagaaaagctgaggaacattatgatggaggcttccaagggatgcattcatcctgagggcgacaccctgtgccacaaagcctggtggttccaccaatgctggaagaaggctgatcctgtccactactttttggtctaaagctttgagaattaaagatatttgaaaacatatatttttggaactggtgatattattatagatattaaaataaataaatggtatacggaatttatttacatttatattaacatttaattgaattatataattttttaaataaatgcatgtaaagacaatgtagctgtcctataaatcattttggaacaatacaatatattgcgctattttagctcaaatatttctaaaaatataagaaattcgagaaggtaagcatatttgagaagtaaattggctcagtcgacttgcattttactcaggcacttgcaacttgatttacctgttggttgtttagataaggcagcatctgcttaattcgaagaagttcaagtggatttccactcaggaaggaccctccgatattgagctacttaccaaatctgtccgtctagcccggattgacaacaaaagccccaactggccattgtggggattgctttaccttgattacttttgcagccaggaactttccgttttgcatttctttcgctttgtctgcctcggaagttgatttagcctgaaatggttgacccactaaccattttacactcggaaaagtttgtaagttataaatgcacttagtcagtgacgtcatttgttatagttaattcaggattaaatactcgcttgctcactcagcgaaagaatgtataaataaaagtcatagtatcatgcattttgtaacgctcaattcattgaataattgtaaacgataggaccgccttgcgacccatttgaaaatgaaacttgctgggttctggcattccgagtgtactctggaattttccgcctaatgattagagacacgccagtgggcgtggccccgagttgcgacctgcatttatatgggcgatgccattatagagacattcggctcgacatgaagcgccaattggcccgataactgagtgcggcagtcagttgtggtcttgtgaacttggccaaaatcaatataaaagccaaacgctgcaaacggcaataaagcaaattcaattgtgactgcggttgtcaaacaattcttgcgtgtcgggtgtgtgcagtatcgagttct

SEQ ID NO: 23852 - DNA, 530 bp, DROSOPHILA
attgtagtttcaaaatggtcaaatacccactgatactacttttgattggctgtgccgctgcccaggaaccaaggcgcgatggagagtggcctccgccagcgattttaaaactgggcaagcacttccatgacatttgtgctcccaaaactggcgttactgatgaggccatcaaggagttcagcgatgggcaaattcatgaggacgaggccctcaagtgctatatgaactgcctcttccacgagttcgaggtggtcgacgacaatggggatgtccacatggagaaggtcttgaacgccattccgggagaaaagctgaggaacattatgatggaggcttccaagggatgcattcatcctgagggcgacaccctgtgccacaaagcctggtggttccaccaatgctggaagaaggctgatcctgtccactactttttggtctaaagctttgagaattaaagatatttgaaaacatatatttttggaactggtgatattattatagatattaaaataaataaatggtatacggaa

SEQ ID NO: 23853 - protein, 141 aa, DROSOPHILA
MVKYPLILLLIGCAAAQEPRRDGEWPPPAILKLGKHFHDICAPKTGVTDEAIKEFSDGQIHEDEALKCYMNCLFHEFEVVDDNGDVHMEKVLNAIPGEKLRNIMMEASKGCIHPEGDTLCHKAWWFHQCWKKADPVHYFLV

SEQ ID NO: 23854 - DNA, 3553 bp, DROSOPHILA
aaaatttcagattaatcattgtgctatttaccacgctagtgctggggggctccacaatgcctctgctaaagtaccttaagccaggaaaaaaacggcgggcacgcggctctggaaggaatgccgctgaggagggaggtcgacgcaacggcagcggtaggaagcgttcaaaatctatttccctatcgaaaactcgcgaatggggccaggcaatcgactctgaacacttgtctgaactcaccgaggaagaggacgtcacctttactcaagcgcgcgatcgttttgggcgcatggatcgcaagtactttattccgttttttacacgtcggttcaatagtcaggaattgcacgagtgcaagtcacagatggccgacctgactaacaagtggtaccaagccattcgagtgagtccattggattcagatgaatcggacgaagagataggactagcggccagcacaagtcaaattcatttgacacggtcgtagggattaaatggctgttgtggggggagctctgtatccgtttcggactgtgttggataactttagaagccaaagggaacgatcgtatgtaatgcttaagttcctctagttaatatttttagagtttttatttatatagcgcggtgatggttgttatcttgtgtatattttttgtttacaaattttcattttgtaagatccaaatgcaatgattcattcgtatcactgtagctcctttattaatccgcttaaagcagtattacattgcacacgacagatggtcttcaaaatgaaaatttggacgtcacaaaagcacactacgtcagtaattttagttaaaaatatttattcatacgaatatatgctgtatttgtgattttatacatttttgaaaccaaataaatatctaagtgtggtacgtgtaaaaaaatatggtcatgccctgctttttgaaattctaatttataattacatatcaattgataatattacctattaaagtaaaattggctacaaaaggtgtgcgtttttggttacttttacaattcttcgtgcgtggactcttcaccgagcaccgtggagtttgaatcactgcggactgcaaacgaagtacaaaaatcgttagatgtcttgggggaatgttaaaagattatgcttttcaaaacgctcgtgtatatcataaaaggaaagcaatgttgacatgtcttttgacttataaagacttcattattagttcctccaactgttttgtatctatttcgggttggtggccgcctcctgcctccgagttgatccagtactcggaaacagcaatgtaccctgccactgccgccccaacaatgcaaccccaggcaatatgagtagagctctggaagatgacacaggtggccacgcacattccgaagtaggtgagcattcgcgtaaagcttacgtagttgctgcgttgctccgcagaaatatcttaaatgatcggaggcgcaatacatacagtggacaatgcgttgcttaaaagcaaatttattaaatttctgtcttacttaccatgacactttccttccttcaactcatagccatccgcacacttcctgcacatgtcagggccatcaccatcgcatccatcgcaagatcgatcacactccaggcaactaaaggagccctcattgttcacgcagaactgctgtggtcggcaagggtttggacgctgttgctccaagcactcattaatgtcgacacatcctgcctccgagtccatgctccagcccttcttacacttgcggcagctcttgggaccacctcccgtgcagcctccttccccacaggccgcatggcactgtgtacacagcaatttcttttcgtcacggaatgattcgtagtgctccggtccacattcgttgcagtttggacccgcatagccgggatcacatttgcactttccgttaccctttctagttccgtctcctttgcattttcctgaaatttgtcatgtgggtaaaattaacgaagacggcaatcttaagttgacacacttatgtaagttgtggcctgtaatacttggttatcattacttaccatttccattgcactcggtgcaggtcaggcagtctggtccgtaggtgttcagcggacagcagactgttagctgatcgatgcaaagccatgactgcaggtcgggactctctgtttgtttgtggataaaccagtcctcgagaagcgcctcgtgctcgttagccaggttgtggcagtgatccttgtttatcacttctccttccgaacatagcttctcctggatctccactagccgtacctcgctgttcttgtacgaacgcaacttttcctcctcccatgccgtgtccccgcccgcgtgtccgcgttttgtcctttcgagtcctgccctgaaagagctaacaagctgggtacatgccctgcagggcggcggaacaggcttttcgggagaatatgacgccgaagcagcggctatgaatactagcgttgcgagccaacaatacttgattctcatttttatttatttattgtctttttaaccggcaaactatctgagtttacgtgtaattaaagccgacactatcgataaataaaaacatcgatagtatactcgaaagtttcgcgaataccgataggtcgcgttcgataccattgcctcacggagctcactcttagtcaatctaacaaccgttaacgacccatgcgaaattcgaggattatcattttcgaatacttcccttttctggtaatcgacaattaaattttgttgctgtaggatacgatttgtttcactcactttaactgcacctccttgtagcttgaaacatgttgctttaactattttcgtaaaagtaaaaaagtgtaaactttatttttttcgctttttaatattttgcttaatctattagatgcataaaaaagttatgctattacattagcaattatagagatcgataatttaaaatgtaagatttacttaaaataatccgatacgctagacatgaaagaccaaaagtatgataatttgattgcagactaagtcgtgtgcaagaagttaccatttcaaaggagtacttttgttgttgtacgcgttggccctattggatgtatttagaaaagaaataaaaaattatataagttaatgtttactttttgcactggtggtttttaatatagtcatatagtaaagtaatatctatattaggctggattctataaatatctaattaagcatcttatgtctattatttagagcactccgttgaggaacaaaataagaaagacatgagaattttaatacatatgtatacacaatgtaactttccttttcactgtataacaataaaaacttacttgacaacgccatgattctgaactgatgtaagagtaataaagggagtcaatcgttcaatgaaccgatcgttgttacgttccagttctcgttggtaatctttttgatctgaaagtattagattgcgattctttttcaaagcatcagcacaacgctttgaaaactcgcgaaagcacaaccgaagtttgttttggtgttttgtcggtacagttgttcc

SEQ ID NO: 23855 - DNA, 1373 bp, DROSOPHILA
attacacgtaaactcagatagtttgccggttaaaaagacaataaataaataaaaatgagaatcaagtattgttggctcgcaacgctagtattcatagccgctgcttcggcgtcatattctcccgaaaagcctgttccgccgccctgcagggcatgtacccagcttgttagctctttcagggcaggactcgaaaggacaaaacgcggacacgcgggcggggacacggcatgggaggaggaaaagttgcgttcgtacaagaacagcgaggtacggctagtggagatccaggagaagctatgttcggaaggagaagtgataaacaaggatcactgccacaacctggctaacgagcacgaggcgcttctcgaggactggtttatccacaaacaaacagagagtcccgacctgcagtcatggctttgcatcgatcagctaacagtctgctgtccgctgaacacctacggaccagactgcctgacctgcaccgagtgcaatggaaatggaaaatgcaaaggagacggaactagaaagggtaacggaaagtgcaaatgtgatcccggctatgcgggtccaaactgcaacgaatgtggaccggagcactacgaatcattccgtgacgaaaagaaattgctgtgtacacagtgccatgcggcctgtggggaaggaggctgcacgggaggtggtcccaagagctgccgcaagtgtaagaagggctggagcatggactcggaggcaggatgtgtcgacattaatgagtgcttggagcaacagcgtccaaacccttgccgaccacagcagttctgcgtgaacaatgagggctcctttagttgcctggagtgtgatcgatcttgcgatggatgcgatggtgatggccctgacatgtgcaggaagtgtgcggatggctatgagttgaaggaaggaaagtgtcatgatatttctgcggagcaacgcagcaactacgtaagctttacgcgaatgctcacctacttcggaatgtgcgtggccacctgtgtcatcttccagagctctactcatattgcctggggttgcattgttggggcggcagtggcagggtacattgctgtttccgagtactggatcaactcggaggcaggaggcggccaccaacccgaaatagatacaaaacagttggaggaactaataatgaagtctttataagtcaaaagacatgtcaacattgctttccttttatgatatacacgagcgttttgaaaagcataatcttttaacattcccccaagacatctaacgatttttgtacttcgtttgcagtccgcagtgattcaaactccacggtgctcggtgaagagtccacgcacgaagaattgtaaaagtaaccaaaaacgcacacc

SEQ ID NO: 23856 - protein, 374 aa, DROSOPHILA
MRIKYCWLATLVFIAAASASYSPEKPVPPPCRACTQLVSSFRAGLERTKRGHAGGDTAWEEEKLRSYKNSEVRLVEIQEKLCSEGEVINKDHCHNLANEHEALLEDWFIHKQTESPDLQSWLCIDQLTVCCPLNTYGPDCLTCTECNGNGKCKGDGTRKGNGKCKCDPGYAGPNCNECGPEHYESFRDEKKLLCTQCHAACGEGGCTGGGPKSCRKCKKGWSMDSEAGCVDINECLEQQRPNPCRPQQFCVNNEGSFSCLECDRSCDGCDGDGPDMCRKCADGYELKEGKCHDISAEQRSNYVSFTRMLTYFGMCVATCVIFQSSTHIAWGCIVGAAVAGYIAVSEYWINSEAGGGHQPEIDTKQLEELIMKSL

SEQ ID NO: 23857 - DNA, 3133 bp, DROSOPHILA
aacgacgagtccgagtaaaatctccgaccgcgattacttgatggcaataaaacacataaaaggtcatgtaaatgatatttgtacacaacttcgtccaaggccataaattatattttattacacttctgcaaactaaacgtataaattagctaggggctagcggttagcgacttttttccggtaaccaatataccttatttttttttttacaaataccaacgcaaaatccaaaagaaacagagaccgccggcaattgcgatagcaagtacataaatatacctatatgccgataagatataacatgcatgatgaacaaaccaaacggccgattatcgaggctagaaatttggcaaatttacaattcggcgaaattgtcaatagttctggagctcgtttccacgctaccttcttcatgattggtaccggagagggatcggcccaccacttgacgagaaatcatcactcgcgtttatctaggatttgtaattgccggaaaagaatcagaccctggaaaaactttgtactttggccgcagtggccgaagtgtgaatgatgtcactgtcgtttgattgaacaaagccgaaacgcaatcgcacagtgagtcaaagtgcgcactcacaagatgaaataatgagctttagaaatacattaaatgttttaaccgttgtcagtgataatcattgatatctgtatcctatttctgcattattcggttatatatttaggtaataaatatgcgaccgagggtcacaaagaattacgatccccattgcaaatgaataatctcgaatatataaattgattaatcagcttgagttttcagaaagaattattatcaggaaagacaaaaagacgaagtttactagcgataagattgtcgaaatcgggtttggaatggattacgactgagcccactgtgcggcgtcatcgacgcttggtttcgctgtgccatgtcgcttcgtgccctgtagaagtcgttctcattcagtcacgggcagcacttaaccacagtcggatctacagacgcacaccaccgccaccaacaccaccacatcgacctatccatccatcgccagcatgaacaagtacgggatggtcggcgtctgcctactggctgctctgggcgctctgctcctggaggtcactgcctctccttcgtccgccgcctcgtctaaggtggatcctagccaacttggcggactttcagctcagttcttgccacccgagtaccgcaacacgaacgttagcatcggtaagattttgggacagtgacataaccgtcccctggctatattcccctcctttcttcggagtttgcaatcacatctttattatatcaaatgacccattatctctttatcccttatagaggatataaaaagaatatatcgtgaaaaatgcaagaaggtaaatggagcggacaacgcaaccttctacgaagaaatcgagcgggcggcagccaagatgagcacctgcatcagcggggtggtcaatctgacggctctgcaggaggagatggatgtggcgaggccgaacggcgacttggacaccgtgtttagcaaatactgtctcaaggcaccggaggcagaggcctgcgtcaaggagttcaacgacaaggcgcagcattgcttgacccccgaggagaagcgccaccaggagacggttacccgaattggagcgtccgttttgggattcgcctgttcgcgtggcggcgatcagattgccctcttcattgccgagcagggacccgagtgcctggaggccaacaaggaagccattagcaattgcctcaatcaatcctttcatcagtacattcccaaggatggccaagttccggacctgatgagccgcccagagctccttttctcacccacccactgcgtggacctgcagcgcttcgaggcctgtgtcatccatcatttggagcagtgcacgcagatcaccaccgctaatatcgttcagtccgtcttccgtttcgtgaagaacgagaccgactgccaggcttggatgcaggcacgtgcgaacgagaagcccattctgatggccgcctccagcaacaacacagcccctggactcgcctactccctggccggcactcttttgggcgccacaatactcctgatactcccctgaatgaaaagcatagtgaggtaatcttttttttttttcgataacaaacgcctgtgtattgcggacattttttttgtttgtgtgtgtatagtgggcaccgagtatcggtgccgtagtatttaatgtctcctaaggaattgccaataataaacgtgattacgatgaacgcaccccgcccaattggaatcaccgctgggccttggtcagccggcatatcggttgtctggccggaactgcagtattatatttggatgtggagctgggcagcaaatcgatgaatgtttttttcatttatttaaaaacactgataagatagtgagcgtgtattttcaaacacctagctggagtgactcaatgcccgtagttccccaggaatttgatctatacaatgggtcggtattctagataagccctgatcctctggtccctagtcccttacaaccgcagcggaaacacgaatcagttatagatcatggcatactcttaggcgaaactgtaaataagtggcatgctggattgaatgcttcatcagttttacgagctgataagttgtcgggccggcagtgcgaaactacaaaaatataaacggcggacttatcgtgcgtaatgcgtaatgactgggtttactcagcgaaattgggtaattgtacggccactgtatctgaagtatttaccgcgggctctgccttggaataggcactatcgcactcgtggtatctggaatgccatcggtgctttaattgcttttgcactggttatgtccatttcggacgtcagctattcccaaattttgtaataatccacaacatttcataagcgatatgaaaaccgttattaacatcgaatagatgttaataataataaagaataaagtatttctaggacagagttcatctgctgcaatgcaattatttcttccactagattaattagcgtacaacatgtcttcgatgattcgtgggtttttcgcaggaaccaagtttaccgataaacgcccactttc

SEQ ID NO: 23858 - DNA, 1016 bp, DROSOPHILA
cttaaccacagtcggatctacagacgcacaccaccgccaccaacaccaccacatcgacctatccatccatcgccagcatgaacaagtacgggatggtcggcgtctgcctactggctgctctgggcgctctgctcctggaggtcactgcctctccttcgtccgccgcctcgtctaaggtggatcctagccaacttggcggactttcagctcagttcttgccacccgagtaccgcaacacgaacgttagcatcgaggatataaaaagaatatatcgtgaaaaatgcaagaaggtaaatggagcggacaacgcaaccttctacgaagaaatcgagcgggcggcagccaagatgagcacctgcatcagcggggtggtcaatctgacggctctgcaggaggagatggatgtggcgaggccgaacggcgacttggacaccgtgtttagcaaatactgtctcaaggcaccggaggcagaggcctgcgtcaaggagttcaacgacaaggcgcagcattgcttgacccccgaggagaagcgccaccaggagacggttacccgaattggagcgtccgttttgggattcgcctgttcgcgtggcggcgatcagattgccctcttcattgccgagcagggacccgagtgcctggaggccaacaaggaagccattagcaattgcctcaatcaatcctttcatcagtacattcccaaggatggccaagttccggacctgatgagccgcccagagctccttttctcacccacccactgcgtggacctgcagcgcttcgaggcctgtgtcatccatcatttggagcagtgcacgcagatcaccaccgctaatatcgttcagtccgtcttccgtttcgtgaagaacgagaccgactgccaggcttggatgcaggcacgtgcgaacgagaagcccattctgatggccgcctccagcaacaacacagcccctggactcgcctactccctggccggcactcttttgggcgccacaatactcctgatactcccctga

SEQ ID NO: 23859 - protein, 312 aa, DROSOPHILA
MNKYGMVGVCLLAALGALLLEVTASPSSAASSKVDPSQLGGLSAQFLPPEYRNTNVSIEDIKRIYREKCKKVNGADNATFYEEIERAAAKMSTCISGVVNLTALQEEMDVARPNGDLDTVFSKYCLKAPEAEACVKEFNDKAQHCLTPEEKRHQETVTRIGASVLGFACSRGGDQIALFIAEQGPECLEANKEAISNCLNQSFHQYIPKDGQVPDLMSRPELLFSPTHCVDLQRFEACVIHHLEQCTQITTANIVQSVFRFVKNETDCQAWMQARANEKPILMAASSNNTAPGLAYSLAGTLLGATILLILP

SEQ ID NO: 23860 - DNA, 2663 bp, DROSOPHILA
cggtaggtagattggtaggtggtggagtcagacagatgaacagtacagaacagcacagcacagcacagaggagcggagcaacaatgctcacccagagatgagataagaacagccgctggaggaggacaaagcagcttgacgaattacttggcagctgctcctagtgaaatccctgggagaatcaaggagcagcgggcggggcgggggcgagctgtgcgggaaaggacgaggcgcaagaaatttaatttgaccaacattttgatgtatcaagttcagttgaagccgaagatttatgacttgctgacagagcaagcggagcagcatcaccaggattgggacgtcatgtcggcagagaacagtgcggagcaagtgcatgcaagaaattttattccatgccaaccagcctaatcattttataaatcatcttggtttaccagacgtacatatatattattgtacatataaagatctggaagagcttatctatgagtttctccatgatcatgctcaagctttaaagtccaaaagttggagccgcaaagctttggccgaaacaaaaatgaaagtaagctgactactatcgagcacatttcccatttccacttgcctcacgtaatgagcccactgaaaatgaggaaaacaaggccttgacatctgagcctgtttgacttgtggtgataattgcaattggcgcggtgtctgtgacttcaactgtgacgcagacagtgactgtgattacacaaagaggaaacctatgccattaccgatggggtattctgccacgcaagaatgctgtataaatcataatatataaattataaattgaaaagataacatcgaatatattaaatattgcctttaaaaactttaacagagtttacaacttgctttttgtatcacttcttaaaataacaaggaatacttgtacacaagtgttcggagttaaccaagtagtgactgctgctttaaaagtcagttgaataattcagtttaaggctttctgacccgaatttactcccgtaaaactggaagtgtacacctaggaggacatctggagatggctcgactaatggccttgatcatggcggtgttgcttcactcggtactgggcatctcgtactactactactttcgcgaatctcccggctccgctgctcctctcttgggcgcctggctcttttccgcctgcgtggtgacccttcttcacggggtgaggatgttttcaagtgccctgcccgccgatcagcggttcaggaatgggaatcgaaaccttcgcggcaatgagtcgtcctgggcatcgctcttactggagacaggcgtctgctgtttggtgctggatctgacccttagcaaactgtggcatcgcatagagtccctctgccagtgcgccattgtgggcatactccaggccttggccgtcgaggagcaaaccttcctggtctgcgagtactggactttgggcctgactaccggcctgatcggcgcatgtcttctgtggctttccctatgggccaccgcgttgccccagaagctccgctgcgggatgctcgactggcgtcgcacccttcatcgccgctgctccgcgctgatcttcggaagtctcgagcccggcactccaatgcagacccaatcccagggaagcgcacagagctttgccaattgagacggaggggtgaccattccacttccacagccatatcacactacctcagtcaatagctaaatttatggttcaaattatactaaaagcgttttaataggcacagtgggacacaacgggctgcatcataaattgaattatgaataaccataatagtaaatttcgattcaaagcgtagtttcttttagcttctttaagaaaaaaataaactcaaaaatcgaacatatattaaatcgcaagaccactttctgaccgaatccatgaagccaatttgaagcggacaactaccggccaaactgccaaccactgggggctgtcatccccccgaaaaagacttgtaaactcgttagccgtagccgtacccatatgcaatgcggaagaggaccgatccgagatccaaaagcgacacgcccccaaacaaccgattcggtttcggtttcggattcggaagacggaacccagcggctcaaagtaaagcaaagcaagtcgatcgaaagcgaaaacgaaaccattactctgatgcgcgatcgatggctgtaaacttgaacttgaagcgtagccaaaagcgatggacaccacgacggcaaacagcaactggcaactagcaaatagcaactggcaactagcaacttgcaacttgcaactagcgacatgcaagagcctggcacacgcaacaatgccgctgaaatgcttccaaggcagtgccagccaaatgctgttgcttgctggcgcgctgtcgtgtttcgcactggttaaaactgcagccgcagcctgttgccaattgcgggaaattggtcgggtcgtcgagcgatataaaagcctggctggcaatgcagccgtgttaatcaaagcgcgtcgctcgccaggaaaagtgcaagtgttttccacgctcccaggcagcattcaaactcaaatcgcagagaaaattcagcgaggtgaaatacgcatactttttttttctgtgcttataataaaatcgaaaggtgttccaaaatatctgacc

SEQ ID NO: 23861 - DNA, 663 bp, DROSOPHILA
ctgacccgaatttactcccgtaaaactggaagtgtacacctaggaggacatctggagatggctcgactaatggccttgatcatggcggtgttgcttcactcggtactgggcatctcgtactactactactttcgcgaatctcccggctccgctgctcctctcttgggcgcctggctcttttccgcctgcgtggtgacccttcttcacggggtgaggatgttttcaagtgccctgcccgccgatcagcggttcaggaatgggaatcgaaaccttcgcggcaatgagtcgtcctgggcatcgctcttactggagacaggcgtctgctgtttggtgctggatctgacccttagcaaactgtggcatcgcatagagtccctctgccagtgcgccattgtgggcatactccaggccttggccgtcgaggagcaaaccttcctggtctgcgagtactggactttgggcctgactaccggcctgatcggcgcatgtcttctgtggctttccctatgggccaccgcgttgccccagaagctccgctgcgggatgctcgactggcgtcgcacccttcatcgccgctgctccgcgctgatcttcggaagtctcgagcccggcactccaatgcagacccaatcccagggaagcgcacagagctttgccaattga

SEQ ID NO: 23862 - protein, 201 aa, DROSOPHILA
MARLMALIMAVLLHSVLGISYYYYFRESPGSAAPLLGAWLFSACVVTLLHGVRMFSSALPADQRFRNGNRNLRGNESSWASLLLETGVCCLVLDLTLSKLWHRIESLCQCAIVGILQALAVEEQTFLVCEYWTLGLTTGLIGACLLWLSLWATALPQKLRCGMLDWRRTLHRRCSALIFGSLEPGTPMQTQSQGSAQSFAN

SEQ ID NO: 23863 - DNA, 4540 bp, DROSOPHILA
gaagcttaatttaacttttattaatattcgtacatattgttagtctatccacatatttggatgtagtcttttccttcgcagcgctggaaagactcgttttctggagtcgccactcgtgtggttacataaagttattacgccccatccgatgggggagaaggcgccgctcagccactggcaggataatctgtagacgtctaatttacattttattgttgtgcttggctttgatgttgcagcagctgctgtgctgctgctgctgctgctgctgctgctgctgctggtgatgcaacaacgaaagtgaaacaataactaacacaccgcagcacacaaactgggcaaaaatccaagtccgactaatttgcacgcgttgcgtgacgatcgtttgccccgacttgccgttgtttgtagctcgtaatttgcaatgcgggaatgggaatctcatctctggcgcaaaatcgcccaccaacccgtccactcggttcgattctttgtgcggcaagtgaaaggcaaggcgacttcgggacttgatgcaattaaattaaattattacagaaaataattggtaaagataaatcaatacgaagacagatctaactagttgctgctctgctccttctgtatgagcggtggaggttacataaaagcagttcgctcttcgggtcccacagctcatgctagcatttgacaaaaatccgcagctattcgctgttgcggctgacttgtggcaaggcgagtgtgccaaaaaaaaaactcttcctgcttaacgactaggctaaataacaactgctacataagcaaccagcagtaaagagacgacaacgactattaaaatgacttgacacactgtcctagtttcgggtaacataacacacacactcacttactcactcactcactggataatcgagtcacaaagtgcaattaaaacttaactaaccaagcgaagtacgaaattattgctgcacatggaaaactgggagaggcgcatgctgcaattatggcatgcaaagtcagtaaactattttgctacttggagggctaattcgatttgaaccgtaaatctgaaattaaagagtaatgatcagtaatgacaagaacctagcctaaactggattaaatgaaacattatcaggctaataacccataattcgcatgtatcagtaacagttagcgaccgtaacccataatcgtcacccagataatcatcatttgatcgatgaaaaccgaaccattagtgttatctaccaccatttgcgaatcaaatgactgaaggcacgaactgcggacaagcgctaaaatgaaaagactcaagacacgaactcaaagacatcgagattcaattacaacaccaattcgcctgacgaaatgtcaaatgtgaaacctcttctcagcgtgtgttgtgcatcgaatggcttaacgatcgatattgagagcgatagatggaccacagcttttgtctccaactccccctttgtcaccctctattgtctttgcctcttaccttgagcccgaaccaagattggccaaaacgaaaccaacaattttcacaatttgatttgagttgattccgacaacgaacctaatgtctttccagctttggaacatttttaaatcgttacaaattcttgaaaagctaacttcgatagacttcctgtttgtttcaactcgcaagctggtagctaagctttaaataatatcaaaaaagcaattcctttagttaaatgtataagtcctataaaattgataaacattttaccttgtgtttgtctatatttcacagggcactcttagtgctatagtgtgcttggccagcagcttgagccagtcagaggcgagtggctcaaagggcaatggatttcccaaaaaggttaccaccctgaagaagcgaccaacaaaaacgccgaccacagttccgatttccatcagcagagcaaccactttgaagcccagtaagccacgcgtgaagatcggcacatcggcaaccaccaagagccccacgaaagcaccggccttaaccgagacatttggcaatctgccggcggatgacctggaattcattaaggagctggacaagcagttcaaactgcacggaaacaagatcaagatcaaggtggagagggataattccacgagtagcggcggcaagaacagcaagaggaccatcgagggggatttggggtgagaccatggatgacagcattttgactgaccagatattaacccatctaacttctatatccaaacagatacggctactcgcatcctggctatgattacacgccgcccaagttcatgttctatccatactcacagcatgatattccctcgggctttgcccttccacagccacatccggaggagcaggaggaggaggcacaccagccggcaatgcaacatcatcacaatcacgagcaagtgaccagcgtgaccattgagccctcgtactcctacgagcttaagccccagaccagctatgaaacccaaccgcagcacacagctcccgagcagccgcagattgatctgccccaggatgaagcggaaagtcccagtggtgcaggtggttccagtggccacgggggatatcaggagcccgtcattgtcttgcgtattccaggacccgccaagtacgccgcccatttgcagacccttctccagcaatatctggagatcagagcggcccagtacctcagcttgctccaggaggccgatcagcagcaacaacaacagcagcatcagcatgtggatccttcgcagcaatatggaccaccagaaccggccacctaccatcaggaagtcagctacgcccaccaactggcacccacgccggcacccgtccagtacgcacccatcgatgatgtctaccagagctacaagggtcgccaccagcaacagctgcagctgcagcagcaacaatatgagccgcaacaatactacgcgcccatggactaccagcagcccacacagttctactacgctcagccccaatcccatttgcagcagcagcctcagctctatctgatagcaatggcccagccggaaacggaaccggagccgcaaccacagcagcaccatcatcagcagcaccatcatcatcttcagcagcagcagcagcagcagcaaccaatatacgttccagaatctgatccaccgacgggtccttcaggtggtcctgaacaggaaccggaggcggaccacagccttcccataacggaaaacaacccacgacccacccacaccaaggtcatttttaatccgtacccctaccagcagcagcagcatcaaccgcaacagcagaccaccaacatcgaggagcaccagcaccagcctgagggcgaacgccccttcaactaccacgcccatgcgatcaagatgcgccagggcaaaagggcggccaagccggaacccgcggatggggacgtgggtcccagttcgggcgacaagggactccaacagatcagggagtatgtgagggagaaactgggcgctgaaatgggttcggctgtcgaatacaagacgacacagctgctcgagggctgaggtctggataaatgttcagatgttcgaaggcatggaaactcatttgaccgaacgcactatctctgcctggatgaactaaaccaatttttaaacttggcaatcttcaaacgattttatcaaaggttttttcggatgccttagaattctagaattaaattttaaatcgcttacgcacgttttctatgtatatatccaggcaagccatctttaaaacaaattcaaacatccgtacattatgaatatggggatcaagtccagcaagacagtaaaattccagtgagtgccatgcccacgttcactcgtattcttaacacacaatttgtggttgcttcttgtgcctgatatccgctcattagtatttattccaagctagaggagcagaacgatcccggggtgatcctccagctccaaatctcatccaacacctacccgcaatccctgagctacacagccaaggcatacttttggccggaaaagagggcgcctaaagataggcatagttttcttttcttagcgaagaggtgctgccgggacacattcgcttttcattattttgtacgacgtttttttttatgttgtttatattgttaaccaagaaaatgtgctgctgatcatgtgtgcaatatttagtcttaatgtgcttcttgatttacctatattatgtacttgtatttttgtatgattaaaccgaaaagaaattaatttgaaaaccaaataactctttccattttattcgaatatttggccaattcacggaagtcacgcagcaaagccataaaaatagcatcaaatccggcgtaactgaagtactaaaagctgaacgattttgacacgagtgttacaacaaatttttgttaaattaaatacaccgaattgttagcaggcacgcaattggaaaatgcggggaaaatcccggaggaaatttgcgaggatgatggccctcgccattccaaagagttctcttttccctatcaagtcaagtagttagcatggcaagagt

SEQ ID NO: 23864 - DNA, 1701 bp, DROSOPHILA
atggcatgcaaaggcactcttagtgctatagtgtgcttggccagcagcttgagccagtcagaggcgagtggctcaaagggcaatggatttcccaaaaaggttaccaccctgaagaagcgaccaacaaaaacgccgaccacagttccgatttccatcagcagagcaaccactttgaagcccagtaagccacgcgtgaagatcggcacatcggcaaccaccaagagccccacgaaagcaccggccttaaccgagacatttggcaatctgccggcggatgacctggaattcattaaggagctggacaagcagttcaaactgcacggaaacaagatcaagatcaaggtggagagggataattccacgagtagcggcggcaagaacagcaagaggaccatcgagggggatttgggatacggctactcgcatcctggctatgattacacgccgcccaagttcatgttctatccatactcacagcatgatattccctcgggctttgcccttccacagccacatccggaggagcaggaggaggaggcacaccagccggcaatgcaacatcatcacaatcacgagcaagtgaccagcgtgaccattgagccctcgtactcctacgagcttaagccccagaccagctatgaaacccaaccgcagcacacagctcccgagcagccgcagattgatctgccccaggatgaagcggaaagtcccagtggtgcaggtggttccagtggccacgggggatatcaggagcccgtcattgtcttgcgtattccaggacccgccaagtacgccgcccatttgcagacccttctccagcaatatctggagatcagagcggcccagtacctcagcttgctccaggaggccgatcagcagcaacaacaacagcagcatcagcatgtggatccttcgcagcaatatggaccaccagaaccggccacctaccatcaggaagtcagctacgcccaccaactggcacccacgccggcacccgtccagtacgcacccatcgatgatgtctaccagagctacaagggtcgccaccagcaacagctgcagctgcagcagcaacaatatgagccgcaacaatactacgcgcccatggactaccagcagcccacacagttctactacgctcagccccaatcccatttgcagcagcagcctcagctctatctgatagcaatggcccagccggaaacggaaccggagccgcaaccacagcagcaccatcatcagcagcaccatcatcatcttcagcagcagcagcagcagcagcaaccaatatacgttccagaatctgatccaccgacgggtccttcaggtggtcctgaacaggaaccggaggcggaccacagccttcccataacggaaaacaacccacgacccacccacaccaaggtcatttttaatccgtacccctaccagcagcagcagcatcaaccgcaacagcagaccaccaacatcgaggagcaccagcaccagcctgagggcgaacgccccttcaactaccacgcccatgcgatcaagatgcgccagggcaaaagggcggccaagccggaacccgcggatggggacgtgggtcccagttcgggcgacaagggactccaacagatcagggagtatgtgagggagaaactgggcgctgaaatgggttcggctgtcgaatacaagacgacacagctgctcgagggctga

SEQ ID NO: 23865 - protein, 566 aa, DROSOPHILA
MACKGTLSAIVCLASSLSQSEASGSKGNGFPKKVTTLKKRPTKTPTTVPISISRATTLKPSKPRVKIGTSATTKSPTKAPALTETFGNLPADDLEFIKELDKQFKLHGNKIKIKVERDNSTSSGGKNSKRTIEGDLGYGYSHPGYDYTPPKFMFYPYSQHDIPSGFALPQPHPEEQEEEAHQPAMQHHHNHEQVTSVTIEPSYSYELKPQTSYETQPQHTAPEQPQIDLPQDEAESPSGAGGSSGHGGYQEPVIVLRIPGPAKYAAHLQTLLQQYLEIRAAQYLSLLQEADQQQQQQQHQHVDPSQQYGPPEPATYHQEVSYAHQLAPTPAPVQYAPIDDVYQSYKGRHQQQLQLQQQQYEPQQYYAPMDYQQPTQFYYAQPQSHLQQQPQLYLIAMAQPETEPEPQPQQHHHQQHHHHLQQQQQQQQPIYVPESDPPTGPSGGPEQEPEADHSLPITENNPRPTHTKVIFNPYPYQQQQHQPQQQTTNIEEHQHQPEGERPFNYHAHAIKMRQGKRAAKPEPADGDVGPSSGDKGLQQIREYVREKLGAEMGSAVEYKTTQLLEG

SEQ ID NO: 23866 - DNA, 3365 bp, DROSOPHILA
cgctcatcggaggtcaaggacttggaagccagtttggctctgaggccaccgcccaaatagtaaaccccatccctcgattaatcaatcgaataagccgcaaaactccaccaccaccctcatagcttattttatgccagaatttcgagcatgcttcattgtatatgctattgtcttttttttgtagaatctaagtgtaagtacgattatttattgtatggccaccaactgctgaagtggtagccaactaaaacagacgataacaaattacgccaataaacaaattaatgaaataacttaaaataaaaactatcgcttatccattgacatttttaaatagctcaagacttcattccattatcatgatagccccatgaactagattttctatatctatccaaaaattcgaactgcttggaaaagtgcgaatgccgcctctgttgatcagttttttttttttagtttcgatttttattcgtctcatttcttcgctctatgtgtgggtgtgagtgtttgagtgtgtgtgtgtgtgatgtaattaataattttagcgcacaattataaggcagccgcccacatccacccaatgaacgaactgattgaaacatccagagattcagcctcggattgggtaagtcacagtaaaagtgcctcctcttttgcaatttaactctttctcttggtggaagtacatccaccgcatttgcattctggttttatataggaacacaagttgtacgggtaagaatctgttgtaaatggcagaaaagagtgtcaaatgtgttgttacgtgagatttggacgattaatcgccagcccagcggccacattgtctctatttttttgtggctcaaattcggcacccgctcacgcacagattttattcaagatcatatagtggctcagtgccggccgatgatggtgggtataaaacgtattttcactggccatagctagtcattgctcactcagcattcaagcccccaaatcagccgcatagacgatgctcaaagccgcaaaggtgagcccggcgaatttcattcgaaggtcctgtattaataggttttcttgccagatccccttgttcttcgcccttttgggtgctgtgtgtatccaggccgtcgtggttggtccccagccattgcataataacaacaggaacggctaccgctacaatggccccgcccacaagtatctcccatcggaggagtcgcactcgcacggcagccccttggattcgagtcaccagcatgatcagcagggccccagtaatgcctacaactcacatcattacccagcacaggagcaacatggccagggagcgccggagcacgaccatcagcagaaggaggttgactcctggcaaacggctctttcccagcagcaacacgagagcttcggaaaccagcaaaatcatcagaacgcctacaatgaaggacctgtgtaccagcactatcagggatttaaccaccaacaacattatggattaagccaacagcaacagcatgaaagctacgggcaggaacactatcaacagagccccaaccagctgcaacaccatcagtcccaacacgcaaacgaatatgcctacgaaccagctcatttccagcagcaacagcagcatcacgaaattcagggtcacaagcagcatcagcagaggaaagagcactggaacttcgttcaagagcagcaaccccaaaatcacgaaccctggcaatcttcgcatggcttccaacagcaccagcagcagcattccaatcgctttgagtcacagcttccgctgcgggaagacctttggcaacccattcgtgagctggacctagagaagcttccttcggctgaggcgcacgccagtagccacaagacagttgcagctcctggacgagatgtaaagctcgtgcccagttacacgctctccagcgactttgagcacgaccgcttcatcggactggatagtacggacactcgtctgctgacccaatctctgccagatgcctaccggaaacagctgttctcctcgccaccagaaccatcgtctttagcccagggacataaccagcaacacaagcccggatccgcagcctatggtggttcccacggaccatcccttggcgaatccacatccgatttcctgcaaatgcagtcccactcgtatcagctgccttcaacgtttactactcacacggaatggacccaggacaaggagcagcatcagcacaatccccagcagcaggccaccggcaatcgtcagtactcggctagtgccttcgcagtgtccccttcgtatctgcacgcctccgaagcctcccagccgcccaagaacagcttgccacatcctagccgtgacttccagccaccttactactaaggcccttgaacagacttaataactgaattaactggtagttcgatgctccacatcaaccataagatcgtaccaacttcaacattcgcttttccccggaaaagcatttggtctgaaaagcaaaactatcacagcaagaagtgtgcagataaatacttttcccttttttttttatatatatatatttaataaagagtgcattggtgaaccaacgcttttgtagtttacatgataataactaaggtcattaacgaatgaaacgtgtatatgtggcgctcaagtgatatcatcccaaacgcgaaacaaagacgaccttcatagctggctaaaagcgagcgtggcggctaatttgattacgattttagcagataattacgagaatttttgtaattttctcatacttatgctgctgtttgtttatgccaatgttgccgtggcaaattagagacgattcggatttggattcgggtttggatttctcggtgttctcgagctgcttccgccgtccaagtgaaggtaaaacaaacagaaacagaaaccgcacctcaaaaacacccacacgcctgcgccttttgcagaaatgaaatgatgcagaagcaccgcaactttcattgcagcaggaagccagcagctatcggtaaatattgcattcatcagtgctctgcttttggcacactatttgttatgttcatgactcggtttccatcaagtcgagtcatcgaaattgaaatgttggcgtcgtgcgaaggcgatcgatgaacagaaactgcccattgctgagggcaaactggtgtgtgcgattgtggcacggcgtcactttcattttcagtctgcaaattgttgtacggaagtcgaaagaaacgtattggaaacccgaaggcagacctttatgcagaatgctgtaaggcattcagatagattactaacgcaatattacaatcatttaaaatccaagccaccaataaacttcactattaaatcttaggccacacgtcaagtgtcg

SEQ ID NO: 23867 - DNA, 1365 bp, DROSOPHILA
atgctcaaagccgcaaaggtgagcccggcgaatttcattcgaaggtcctgtattaataggttttcttgccagatccccttgttcttcgcccttttgggtgctgtgtgtatccaggccgtcgtggttggtccccagccattgcataataacaacaggaacggctaccgctacaatggccccgcccacaagtatctcccatcggaggagtcgcactcgcacggcagccccttggattcgagtcaccagcatgatcagcagggccccagtaatgcctacaactcacatcattacccagcacaggagcaacatggccagggagcgccggagcacgaccatcagcagaaggaggttgactcctggcaaacggctctttcccagcagcaacacgagagcttcggaaaccagcaaaatcatcagaacgcctacaatgaaggacctgtgtaccagcactatcagggatttaaccaccaacaacattatggattaagccaacagcaacagcatgaaagctacgggcaggaacactatcaacagagccccaaccagctgcaacaccatcagtcccaacacgcaaacgaatatgcctacgaaccagctcatttccagcagcaacagcagcatcacgaaattcagggtcacaagcagcatcagcagaggaaagagcactggaacttcgttcaagagcagcaaccccaaaatcacgaaccctggcaatcttcgcatggcttccaacagcaccagcagcagcattccaatcgctttgagtcacagcttccgctgcgggaagacctttggcaacccattcgtgagctggacctagagaagcttccttcggctgaggcgcacgccagtagccacaagacagttgcagctcctggacgagatgtaaagctcgtgcccagttacacgctctccagcgactttgagcacgaccgcttcatcggactggatagtacggacactcgtctgctgacccaatctctgccagatgcctaccggaaacagctgttctcctcgccaccagaaccatcgtctttagcccagggacataaccagcaacacaagcccggatccgcagcctatggtggttcccacggaccatcccttggcgaatccacatccgatttcctgcaaatgcagtcccactcgtatcagctgccttcaacgtttactactcacacggaatggacccaggacaaggagcagcatcagcacaatccccagcagcaggccaccggcaatcgtcagtactcggctagtgccttcgcagtgtccccttcgtatctgcacgcctccgaagcctcccagccgcccaagaacagcttgccacatcctagccgtgacttccagccaccttactactaa

SEQ ID NO: 23868 - protein, 454 aa, DROSOPHILA
MLKAAKVSPANFIRRSCINRFSCQIPLFFALLGAVCIQAVVVGPQPLHNNNRNGYRYNGPAHKYLPSEESHSHGSPLDSSHQHDQQGPSNAYNSHHYPAQEQHGQGAPEHDHQQKEVDSWQTALSQQQHESFGNQQNHQNAYNEGPVYQHYQGFNHQQHYGLSQQQQHESYGQEHYQQSPNQLQHHQSQHANEYAYEPAHFQQQQQHHEIQGHKQHQQRKEHWNFVQEQQPQNHEPWQSSHGFQQHQQQHSNRFESQLPLREDLWQPIRELDLEKLPSAEAHASSHKTVAAPGRDVKLVPSYTLSSDFEHDRFIGLDSTDTRLLTQSLPDAYRKQLFSSPPEPSSLAQGHNQQHKPGSAAYGGSHGPSLGESTSDFLQMQSHSYQLPSTFTTHTEWTQDKEQHQHNPQQQATGNRQYSASAFAVSPSYLHASEASQPPKNSLPHPSRDFQPPYY

SEQ ID NO: 23869 - DNA, 3518 bp, DROSOPHILA
tgcctgcttcatgaaacgcggggcgcgggggaaaccgaagccgacgcgagaaccgttataatccacaagccttgagcaagttgcaaatgcgtagttatctatatttcagatgaaccaaagcgatcgctagagagccgttatattccgcaagtcgcaacaaaattatgaattcgtaaatatcactatttcagccacaacttgtacaaacgtgttccttgtttagtttaagtaaatgcttttatccctggcacacatttcccggagcccatacaatatatgtaagttgcacacgctgatcgcaaatcaaactaaccaaagcgacagcttcgcgcgagagagagagcaaggatgtcgttacagtttgagaacattgagaacagtgaatgtgcaaccgtaacagttttatgacttggaaatctaaatcgttttttaattcgaataatgctgtaatatagttttaaatattaatgttttaaattctttatttttcgaatctaaaagacaattaaatgtatagcgttatcaagaaaatctattttgtatacatttgttcaagtcgtatgtatttttaaggagctaggtcacaccattgaatatttatgcacacgtgaatttaacccactgtgcgcaaacgaaactaagagtgagggaatgaagaaaggctgcagcgcagtcggagtcggcgtcacacacgaaataccgttgtttttcgcgtgcgtgagcgtgagagcgacaaaaagagaatgccaagagagcagcatggcaagaggcaaaggcaaaaaccgagtttcttgcagtttgaagtggcttctttaaaatgtataaaagggtcggcactcacagagttcgtcaacataacgccaacggcagcgattagagtcgcgtctcgtctcgttctatactccggatccaacgtgaggaacaaggataaccgataacacgatcgaaggataaccgttaaattcacttttttttccgtgatttttgctgtgacttgagcatgaaactaccgttagcttgcgctgtgctaagctgctgcttctttttgttggcagccgcctcatcttctccagctgccgatgcttcttcttcaaagcccgcttcatcttcggctgagacctcatcctccgctaagccaaaaagagatgctggcctaagtttcggaggaatatccagctatcacggcccttctcacaaatatctgccgcccgcctatgagagtcaccttaacctcggcagtttccatggaagctcggctggttattccgattaccccagtcacttcaagggcgagagcagttacggacaccacttcgcacacggacactccggaagccacggctacgccagttccagtggccatggaaggccccatcattacagcggtagtggagttcctaaaatcgaaacctacatcgttcaaacaagtggcggctcgagttccggtcacaactaccatggtcagggacatggacatggaatcggtcacgggatcagtcatggaatcagtcacggcctgagtcacgggcatggatctggattggcctttaagtacgcaccatctaccagtggagcctatctgaatctcgttgggaatgaacacaagaccagcacatatgtggtggccactcccgagtactccggacacagccacggagcgaggggcagcacccacggaattggctacggatcggcaccagcccacagacccagctacggtggccacctgcaaagtcacggctatggcaacaactttggccatggccccagccatcacatcgcccatgaaccagtcagtcacggacctatccaaagtttggatcacggtctggagcatgccttggagcacggtctgagccacgccctgggattgggtcactcttcgggaggacagttcccacagcacgcgctgccccagccggcggaggagcattctgggtactcctacgatgctcccgccacgccttttggaaagggagtgccgttgagcagttacggcgtaccactcatacccggctacgatcaccaggagtcactgccggagccagtgcaagtgcaggtgctggagcaggagcacaagggcgatcgggagcaggagagggaaacaccggtttatgctctgggccacaagggcctgggtcacttcagctacacggccagcaagccacaggctctccacaccgacgttctcagctctgcccaccactccgtccagtccggagcacccagccacgacctagacgtctccaaggcgccttttaggcccagtgcctttctaggggccaagcacgagtccggatcgaattccatttccggctacgactacgccacgcccagctccacattcctgcaggctccttcttcgccaggctatgactaccaggctccggcgcaactatacggaccacccggccactccggggactcggccacgcctattttcgaaccggaggcgacctacctgcctcctgccagcagctacggcccaacggccgcgtcctcccatggttaccactaaattattaaactagttttaagctctagcgtccaatgtatttttttatccctatctatttggtactgcaagccaagatggaacaataaaaatcaagaaatcaagagtcacagtgttgaaacaatttgaaaaggaaggaagaaagagtatttgcaagtgagatagttatgtggaaagaaagttctaagcagtacaaactgatgggttttacaataaaatgaagccacttaataggccaaatgaaaatgatttctttttaaaagcgaaatggaactttctcaacttctcttcgtgtgcggaggctcctccctaccaactggatagattccaggctattggaatgccgcacacgtcgcagattttggcagtttctctccgatttgtggttacaaattggttcgatttcggatttcgcttaaaaattgtgattcgcatttgatgcgtgaaactatatcaaactaaagagtggacggctgtcgtgggaggcgtggagcagcgtagggagtggagcttccaaaacgacgctggcatggcaatgagtcgaatgggcttgggctgcccaggctaactgaattagacctgctgaattagaatacaagttaaaaggaggcgtcttgagttcacaacgtgttcacaacgtgttcacaaatgcgatcaagtggatgccatccgctggttccgcttgcctatcccccagttgcaccattcaccgccgcgtgatggatggtcaacgcactggccgccgcctctcactctgcttccatgttaatcataacttcaacttcatcccattttccattccaatctctgttgcgcaatctttgcggttcgaccagttcgggcatttgatccttaagtcgctgacctacatcaaagtacacaagacacagcgaaagtgaaaggatgacagcttgatgggctctgatcgcctcgtctcaaatcggatcggattagtgatcatgatcatgatcataatctcctcatctggaaggctcttggataa

SEQ ID NO: 23870 - DNA, 1518 bp, DROSOPHILA
atgaaactaccgttagcttgcgctgtgctaagctgctgcttctttttgttggcagccgcctcatcttctccagctgccgatgcttcttcttcaaagcccgcttcatcttcggctgagacctcatcctccgctaagccaaaaagagatgctggcctaagtttcggaggaatatccagctatcacggcccttctcacaaatatctgccgcccgcctatgagagtcaccttaacctcggcagtttccatggaagctcggctggttattccgattaccccagtcacttcaagggcgagagcagttacggacaccacttcgcacacggacactccggaagccacggctacgccagttccagtggccatggaaggccccatcattacagcggtagtggagttcctaaaatcgaaacctacatcgttcaaacaagtggcggctcgagttccggtcacaactaccatggtcagggacatggacatggaatcggtcacgggatcagtcatggaatcagtcacggcctgagtcacgggcatggatctggattggcctttaagtacgcaccatctaccagtggagcctatctgaatctcgttgggaatgaacacaagaccagcacatatgtggtggccactcccgagtactccggacacagccacggagcgaggggcagcacccacggaattggctacggatcggcaccagcccacagacccagctacggtggccacctgcaaagtcacggctatggcaacaactttggccatggccccagccatcacatcgcccatgaaccagtcagtcacggacctatccaaagtttggatcacggtctggagcatgccttggagcacggtctgagccacgccctgggattgggtcactcttcgggaggacagttcccacagcacgcgctgccccagccggcggaggagcattctgggtactcctacgatgctcccgccacgccttttggaaagggagtgccgttgagcagttacggcgtaccactcatacccggctacgatcaccaggagtcactgccggagccagtgcaagtgcaggtgctggagcaggagcacaagggcgatcgggagcaggagagggaaacaccggtttatgctctgggccacaagggcctgggtcacttcagctacacggccagcaagccacaggctctccacaccgacgttctcagctctgcccaccactccgtccagtccggagcacccagccacgacctagacgtctccaaggcgccttttaggcccagtgcctttctaggggccaagcacgagtccggatcgaattccatttccggctacgactacgccacgcccagctccacattcctgcaggctccttcttcgccaggctatgactaccaggctccggcgcaactatacggaccacccggccactccggggactcggccacgcctattttcgaaccggaggcgacctacctgcctcctgccagcagctacggcccaacggccgcgtcctcccatggttaccactaa

SEQ ID NO: 23871 - protein, 505 aa, DROSOPHILA
MKLPLACAVLSCCFFLLAAASSSPAADASSSKPASSSAETSSSAKPKRDAGLSFGGISSYHGPSHKYLPPAYESHLNLGSFHGSSAGYSDYPSHFKGESSYGHHFAHGHSGSHGYASSSGHGRPHHYSGSGVPKIETYIVQTSGGSSSGHNYHGQGHGHGIGHGISHGISHGLSHGHGSGLAFKYAPSTSGAYLNLVGNEHKTSTYVVATPEYSGHSHGARGSTHGIGYGSAPAHRPSYGGHLQSHGYGNNFGHGPSHHIAHEPVSHGPIQSLDHGLEHALEHGLSHALGLGHSSGGQFPQHALPQPAEEHSGYSYDAPATPFGKGVPLSSYGVPLIPGYDHQESLPEPVQVQVLEQEHKGDREQERETPVYALGHKGLGHFSYTASKPQALHTDVLSSAHHSVQSGAPSHDLDVSKAPFRPSAFLGAKHESGSNSISGYDYATPSSTFLQAPSSPGYDYQAPAQLYGPPGHSGDSATPIFEPEATYLPPASSYGPTAASSHGYH

SEQ ID NO: 23872 - DNA, 3767 bp, DROSOPHILA
atttaccgcgggctctgccttggaataggcactatcgcactcgtggtatctggaatgccatcggtgctttaattgcttttgcactggttatgtccatttcggacgtcagctattcccaaattttgtaataatccacaacatttcataagcgatatgaaaaccgttattaacatcgaatagatgttaataataataaagaataaagtatttctaggacagagttcatctgctgcaatgcaattatttcttccactagattaattagcgtacaacatgtcttcgatgattcgtgggtttttcgcaggaaccaagtttaccgataaacgcccactttcccgctataatgaactgtgttccgagttaatgaggttaccttgctcggcatgaaacaaactataccaaagtcgggaaagggacgcagatgacgacttcggtggctccccaacccctcccccccccctcacacacacacacacacacaaagattgctttttcatttgctcactagccgggaacaatcaatcactgcgaattccgcacctatcacatcagcaaaatcggtagagaaaatacgctgaactatgatggatgggggttttccacttccagatgataagtctcgatcgcagcttggggtaaacatttatttttagaacagtcttaaattaacatagtgagtacatttatcgcacgatataaatataataaatagcaaaaaaaaaaaaaaaaacacaaaaggttgtacaattacttcgacgtcgaactatttagctacaggaagtatatccacagacaacagcattttggggcactttgatgtccaattctattaaagcatgaattctattatcagcaatgtagataagcatacagccaccaaccgtttaacccttgtccaactattctgacacacaaacgcctacaaactagttagttgacctgtttaatctttggagcactacacgaaccaacaatacgagacaaaccttagctgtaatgatcatgatactggcttcggaggcagtggaacaagtggctgttgctcacggtccagatcgtcaccttcctggtccagcgattcctccagctgctgttgctgctcctcgggatcgctgacttgggccagcacatcgtccagatgaagccacacatactccacagcggcccgcagttcgccggcaaacttccagacgctgcgatcatccgtcagattggttaggttatatttgtcatcgggttcccggtagtgttgcatttgggcaatggacgtgttcaaggtccgagggttacatccgccgggcagccacttgagggtaaagtggttgtgcagcgtcaaggatagacgggcgttgtggaagcacttggtagcccgtcctggcatagagtagttcttgatccgctgtgtgtgctggaggacgtacaactccccggcgatagcctgctcctcgtgattgctgaactcggtgggcactttggtgaagtacgaattgatgaagcacaaggcagggaagcgaccagcacacttgccgcccttttcgacctctagggcgtgagccttctgcaccaactgatgccagttgcggttgtcacccagaggcattattacctcatccacatccacgttgaccagatagtcgtgccggtacagattcctgtagaagcaatcgttgtagggtatcagttcgtttagtcttttctctagtttcctgtgctgcagcaacatgtgctggtagtgtctcagtctgggcattccattggccagggtcaaaggtctcagctccaagtatccagtgcgctgatagtagtcgaggaccctctgcaccgctggatgaacatcgtacatataggcgtagatccgtgaggctcccaaaattcgctgcagctcaaaccactcgataaggcgctctgataaatccacatagggaaaatcgaatcccttgaggcaaactccaaagttctgaagagcttcattttgactttggatagtggcattttgggacttgggattttgagagggcgggatcaccacgggcagtgactgcttccgattcatattgaccctcagcgaatttcccgccttttcgcaatgccgcgcaactagggaaactgtttttggaaaggagttcaccgtaggcggcggcaattcactgggaaccggacagctcaacaggtgcgggtagttaagattcggcttattgccccacgcctcgacccacacactcaggaactccgccacgggtacaaaaatgggctgccgatatccctcaaaccacatttgacaatgggttggtgggaactcgttgtcgatctgattggcagtggccaaaatccttaccgttggcaatttaagccctttccgcttgtccaagtaggcggcgtatagccgaaaggtcacgttcgcgttgacgaaggtctgccagtagatgttgtgcagctgcaggtccaggggatcgggatatacagcacatgttttgtttatcttgtagcccatgggtttggcccagtggtaccagaagccatagtccacctctggcagttcctgctccaattgccgcacaagttcctcttttatgggctcctccaggtgccgaatcggtgggggagttacttttgcagccagtccggcctccacactaacaccatattggcccaagggagtgggtttgagatgatccgtgcgctggagagcacttaggaggacgaagatcgccaagacggccaccgtcaccagaattgtgagccgaatgaagccacctcttgttgacattatgctcgactacgtactgagcactgaagatagtttccccaaagcaggaatcgcaatctaatcaaagcgagagtggctgcgataatagccgccttcatgttgaattatctatggctgcgagctggtgggctttatcaattagccaaatttagtaggacctatccggtcgcataataattgtatttacgaaacgattggattgctttcatcgatctgtaagctggaatgttaatcgctttgccatttggatttgccgtgtaaaacccaacgatctttgcggtcaaagtctcgcgcttttacgcagagtaaaaatacttgtgaaagcttaatttctgtgtaaattgtgtccgccaaactatgcaacgataattcctggtttccatcccttgagcatcgtaaatgcttttgttttgctccgttctgtttcctcccgctcgctataatttttgtttaccctacttttattgaaactttttgctcctgctttagctgttatttttacaagtaatttaaaaattattttatgaggggggtccgcagggcttttcgccgggtgcgaagtttgctttattgacattgtcaccccggttgagctcagcttgtcacattgaagcaacgagcacctggacaaggacaaggatgaagtcgagggagatgactacggactctggactacaaatacctcggtaacgacaggataataaaattgtgaaacaactttttaatgagaaacacttttagcacattgcagtggccagtggacggattcccggtagttggtaaaatgttgcttccgagccccaatgacggttaccataatgatgatggagtagaaaacgctgatagcagtcgacagttcagtctgtcggtccaggacgctgggctcacctgttgacgcaatatcaaacaccaagtatccactttttgcgatcgattctcgcgcggcggaataaaatctttttcgtcgtctggtgagtcggtctggctttaacaatgaaca

SEQ ID NO: 23873 - DNA, 1767 bp, DROSOPHILA
atgtcaacaagaggtggcttcattcggctcacaattctggtgacggtggccgtcttggcgatcttcgtcctcctaagtgctctccagcgcacggatcatctcaaacccactcccttgggccaatatggtgttagtgtggaggccggactggctgcaaaagtaactcccccaccgattcggcacctggaggagcccataaaagaggaacttgtgcggcaattggagcaggaactgccagaggtggactatggcttctggtaccactgggccaaacccatgggctacaagataaacaaaacatgtgctgtatatcccgatcccctggacctgcagctgcacaacatctactggcagaccttcgtcaacgcgaacgtgacctttcggctatacgccgcctacttggacaagcggaaagggcttaaattgccaacggtaaggattttggccactgccaatcagatcgacaacgagttcccaccaacccattgtcaaatgtggtttgagggatatcggcagcccatttttgtacccgtggcggagttcctgagtgtgtgggtcgaggcgtggggcaataagccgaatcttaactacccgcacctgttgagctgtccggttcccagtgaattgccgccgcctacggtgaactcctttccaaaaacagtttccctagttgcgcggcattgcgaaaaggcgggaaattcgctgagggtcaatatgaatcggaagcagtcactgcccgtggtgatcccgccctctcaaaatcccaagtcccaaaatgccactatccaaagtcaaaatgaagctcttcagaactttggagtttgcctcaagggattcgattttccctatgtggatttatcagagcgccttatcgagtggtttgagctgcagcgaattttgggagcctcacggatctacgcctatatgtacgatgttcatccagcggtgcagagggtcctcgactactatcagcgcactggatacttggagctgagacctttgaccctggccaatggaatgcccagactgagacactaccagcacatgttgctgcagcacaggaaactagagaaaagactaaacgaactgataccctacaacgattgcttctacaggaatctgtaccggcacgactatctggtcaacgtggatgtggatgaggtaataatgcctctgggtgacaaccgcaactggcatcagttggtgcagaaggctcacgccctagaggtcgaaaagggcggcaagtgtgctggtcgcttccctgccttgtgcttcatcaattcgtacttcaccaaagtgcccaccgagttcagcaatcacgaggagcaggctatcgccggggagttgtacgtcctccagcacacacagcggatcaagaactactctatgccaggacgggctaccaagtgcttccacaacgcccgtctatccttgacgctgcacaaccactttaccctcaagtggctgcccggcggatgtaaccctcggaccttgaacacgtccattgcccaaatgcaacactaccgggaacccgatgacaaatataacctaaccaatctgacggatgatcgcagcgtctggaagtttgccggcgaactgcgggccgctgtggagtatgtgtggcttcatctggacgatgtgctggcccaagtcagcgatcccgaggagcagcaacagcagctggaggaatcgctggaccaggaaggtgacgatctggaccgtgagcaacagccacttgttccactgcctccgaagccagtatcatga

SEQ ID NO: 23874 - protein, 588 aa, DROSOPHILA
MSTRGGFIRLTILVTVAVLAIFVLLSALQRTDHLKPTPLGQYGVSVEAGLAAKVTPPPIRHLEEPIKEELVRQLEQELPEVDYGFWYHWAKPMGYKINKTCAVYPDPLDLQLHNIYWQTFVNANVTFRLYAAYLDKRKGLKLPTVRILATANQIDNEFPPTHCQMWFEGYRQPIFVPVAEFLSVWVEAWGNKPNLNYPHLLSCPVPSELPPPTVNSFPKTVSLVARHCEKAGNSLRVNMNRKQSLPVVIPPSQNPKSQNATIQSQNEALQNFGVCLKGFDFPYVDLSERLIEWFELQRILGASRIYAYMYDVHPAVQRVLDYYQRTGYLELRPLTLANGMPRLRHYQHMLLQHRKLEKRLNELIPYNDCFYRNLYRHDYLVNVDVDEVIMPLGDNRNWHQLVQKAHALEVEKGGKCAGRFPALCFINSYFTKVPTEFSNHEEQAIAGELYVLQHTQRIKNYSMPGRATKCFHNARLSLTLHNHFTLKWLPGGCNPRTLNTSIAQMQHYREPDDKYNLTNLTDDRSVWKFAGELRAAVEYVWLHLDDVLAQVSDPEEQQQQLEESLDQEGDDLDREQQPLVPLPPKPVS

SEQ ID NO: 23875 - DNA, 3551 bp, DROSOPHILA
tacaaatgaatcgcagctgagggccggtcgagcatcgggaaataaaaccattaaatatttgcggttaaacgcaccaaaaacaaaccgcaaaagtaaatcatatccagagcaggcattggacatggccaagcatccgaggcaaagaatttctcttgcctcacccgaccgtcgtccggcatttgtaggcaaaaatattagattagaaattagaaaggcatggacatgccccggattggattgagattgggcaggcagcagaccagagcgccattaaattggggatgggatgcagggcaggaaactgactgccaacggcctgccaaaaattccaaatggtccatggccaagaagcataaatcattgaaactgacatttcaccatttcactggatttgtatgtatatgccaaaggtttggccaattcttggggaagaaagtgttttttggtggtcgaggaatttgcatagatatccgtcgtttttcccaaggaactactgggacaatcgccctggagtcgaaaatatggatccctgtgtgtcctttataggttccccttttcccttgaactagttcccccccagagagcggagcatatcagagctccgaaacgaaatatcgtcatctctatttcatcttaatctatgctaaaagccagctccctccacttgaagggaatattgattccgtttcatattcggagggatttggcaggatgtgcctaataccgtaaatgggggtcaacttaacctcatagcaagaaatgtcagcaaaatcacgatatctgagccaaggtatttttattgtcttaaacagcctgaaatatatattattaggagcaattattaactttagggaaacggtaagtgagcgcatggtttttgtgacatcctggctttttgggctgtctaataatttcacaagttggcagtgccgagtcctaaaattccggtttaccttcttttcgacctgaaatttgttcccgtccaatttatcagtccaatatgtcgacgataaagtttctgcgatcctccacacacaacgcacttcggtccagcctcggatggtgccgccttgctgcctcaagaccacgctatgattacgaccttgtggtgctcggcgggggctcggcgggattggcgtgtgccaaggaggctgctggctgtggagcccgcgtgctctgcttcgactacgtcaagcccactccagtgggcaccaagtggggcatcggcggcacctgcgtgaatgtgggctgcatccccaagaagctaatgcaccaggcctcgctgctgggcgaggctgttcacgaggcggtggcctacggctggaatgtagacgacacgaacatacggcccgattggcgcaagttggtgcgctccgtccagaaccacatcaagtccgtcaactgggtgacccgcgtggacctgcgcgacaaaaaggtggagtacgtaaattcgatggccacctttcgcgacagccacaccatcgagtatgtggcgatgccaggtgccgagcaccgtcaagtgacctcagagtacgtggtggtagccgtcggcgggaggccacgctacccggacattcccggagccgttgaactgggcatcaccagcgacgatatattcagctacgagcgagagccgggtcgtacccttgtggtgggcgccggatacgtgggtctcgagtgcgcctgtttccttaagggtctcggctacgagcccactgtcatggtgcgctccattgtgctgcgcggcttcgatcgccagatgtccgagctgctggccgccatgatgactgagcgcggcattcccttcctgggcaccacaatccccaaggccgtggagaggcaggcggacggacggctgctagttcggtaccgcaacacaaccacccaaatggacggcagcgacgttttcgacaccgtgctgtgggccattgggcgcaaaggtctcatcgaggacctcaacctggacgccgccggagtgaagactcatgacgacaagattgtggtagacgccgcggaggccaccagcgtgcctcatatatttgcagttggggacatcatatatggtcgaccagagctaacgccggtggccatcctgtcgggccgcctgcttgccaggcgtctgttcgccggctccacgcagctgatggactatgccgacgtggcaaccacagtttttactccgctagaatacagttgcgtcggcatgtcggaggaaacggccatcgaactgcgtggtgctgacaacatcgaggtcttccacggctactacaagcccacagagttctttattccccagaagagcgtgcgtcactgctacctcaaggccgtagccgaagtgtccggggaccagaagatccttggcctgcactacatcggcccagtcgccggcgaggtcatccagggcttcgccgcagccctcaagaccggcttgaccgtaaagacgcttctgaacacggtgggaatccaccccaccaccgccgaagagttcacccggctgtcaatcaccaagcgatctggtcgggatcctacaccagcctcctgttgcagttagttccgtgccttggagataggtatcttgtggtgagaaacaaagcatatttctttcacttcaagtatgtttcagtccgtatctactgtcgattttagtacgtgaaaggctacacaccattttcattctaattaaaaaaaattggtcacttaatgttggttgattggtgcagagaaaaatttaatatttggcaaataatttgaaaacactttcatattctcactcgttgaaaagcatatagcaggaacccatttcgatcgacttgccaaacaaattttaaaatttgtacttcccaatcccactagcttacagtcaaactcgatttaaaataatgattacgtggaactatttttgtagacacatcgaaaggtatcggttccattcaaacttgcgtgttgtttgcacaaaactctcaaatcggaaaataatggtttataaaacataatgatgctattttctgcaaaccaaaccattatttttatttatttcgtaatatacggcaggtataaatatagtttcccgatccggagagctttgacttgtttaatagaaataagacttttgggaatttaagcagacaaataacgttgcgtagaaatggacagacggaccgacggacatgattatatcgactagtttgatcaagaataaatatactttgtatggcccgaaatgtgggcttcactgcgtggcagtggcaggttatgattggaatctgcaagggtaaaaattgatacttttgcccaatttttttttatttatataaagtttatacagtccgaacgcatctactcgtaaacatgtcccaaccggatctgaattgcacttctttgacgaatagctcgttgggatgtgtggctcacgttcttttgatttgacactttattataaatgacagagccacacttagtaagtcggggaagcactgaaaacccacagagtgattgctatttttgacatatgaagttttaatttatgaagttggtggtgaaaaacactttgt

SEQ ID NO: 23876 - DNA, 1551 bp, DROSOPHILA
atgtcgacgataaagtttctgcgatcctccacacacaacgcacttcggtccagcctcggatggtgccgccttgctgcctcaagaccacgctatgattacgaccttgtggtgctcggcgggggctcggcgggattggcgtgtgccaaggaggctgctggctgtggagcccgcgtgctctgcttcgactacgtcaagcccactccagtgggcaccaagtggggcatcggcggcacctgcgtgaatgtgggctgcatccccaagaagctaatgcaccaggcctcgctgctgggcgaggctgttcacgaggcggtggcctacggctggaatgtagacgacacgaacatacggcccgattggcgcaagttggtgcgctccgtccagaaccacatcaagtccgtcaactgggtgacccgcgtggacctgcgcgacaaaaaggtggagtacgtaaattcgatggccacctttcgcgacagccacaccatcgagtatgtggcgatgccaggtgccgagcaccgtcaagtgacctcagagtacgtggtggtagccgtcggcgggaggccacgctacccggacattcccggagccgttgaactgggcatcaccagcgacgatatattcagctacgagcgagagccgggtcgtacccttgtggtgggcgccggatacgtgggtctcgagtgcgcctgtttccttaagggtctcggctacgagcccactgtcatggtgcgctccattgtgctgcgcggcttcgatcgccagatgtccgagctgctggccgccatgatgactgagcgcggcattcccttcctgggcaccacaatccccaaggccgtggagaggcaggcggacggacggctgctagttcggtaccgcaacacaaccacccaaatggacggcagcgacgttttcgacaccgtgctgtgggccattgggcgcaaaggtctcatcgaggacctcaacctggacgccgccggagtgaagactcatgacgacaagattgtggtagacgccgcggaggccaccagcgtgcctcatatatttgcagttggggacatcatatatggtcgaccagagctaacgccggtggccatcctgtcgggccgcctgcttgccaggcgtctgttcgccggctccacgcagctgatggactatgccgacgtggcaaccacagtttttactccgctagaatacagttgcgtcggcatgtcggaggaaacggccatcgaactgcgtggtgctgacaacatcgaggtcttccacggctactacaagcccacagagttctttattccccagaagagcgtgcgtcactgctacctcaaggccgtagccgaagtgtccggggaccagaagatccttggcctgcactacatcggcccagtcgccggcgaggtcatccagggcttcgccgcagccctcaagaccggcttgaccgtaaagacgcttctgaacacggtgggaatccaccccaccaccgccgaagagttcacccggctgtcaatcaccaagcgatctggtcgggatcctacaccagcctcctgttgcagttag

SEQ ID NO: 23877 - protein, 516 aa, DROSOPHILA
MSTIKFLRSSTHNALRSSLGWCRLAASRPRYDYDLVVLGGGSAGLACAKEAAGCGARVLCFDYVKPTPVGTKWGIGGTCVNVGCIPKKLMHQASLLGEAVHEAVAYGWNVDDTNIRPDWRKLVRSVQNHIKSVNWVTRVDLRDKKVEYVNSMATFRDSHTIEYVAMPGAEHRQVTSEYVVVAVGGRPRYPDIPGAVELGITSDDIFSYEREPGRTLVVGAGYVGLECACFLKGLGYEPTVMVRSIVLRGFDRQMSELLAAMMTERGIPFLGTTIPKAVERQADGRLLVRYRNTTTQMDGSDVFDTVLWAIGRKGLIEDLNLDAAGVKTHDDKIVVDAAEATSVPHIFAVGDIIYGRPELTPVAILSGRLLARRLFAGSTQLMDYADVATTVFTPLEYSCVGMSEETAIELRGADNIEVFHGYYKPTEFFIPQKSVRHCYLKAVAEVSGDQKILGLHYIGPVAGEVIQGFAAALKTGLTVKTLLNTVGIHPTTAEEFTRLSITKRSGRDPTPASCCS

SEQ ID NO: 23878 - DNA, 2872 bp, DROSOPHILA
gctaccaggccaacatgtactttgccgaaaacattcgtctaactaaggagctggagacactacgtcagcagttatcagccgaaaaacagagtgcagatgcggcgcaagattccctggcggcgatgcaaaaggatcaagaagatttgctcgaactgctggccgatcaggaggcaaagctaacgcgatacgaagaagcgggctcgactaatacccttccgacttccaatgtagctccaagcgtgccggcagctggcggaggaagccccatcccaagtggcaccgccagcaggtagaaatcgtaacgcggatgagttgctagccacgtacatgttacaactggaaattgctcgactgccctaaaaacgttaaaatatcttatatacacacattctacttgttttacatttatttaacttacgtatagaatatatgtctagatcagaatttaaacgaatccattattgttttggcgggaactgcagcaaatcgcaagagatagctacatatatcggctcacgatttcctgtttccatctctttccgattccgatttgcccatataatggcttatgttggaattcgaagatagtgtttgttctgcgtttatttgtttaacaatattaatatacctatgattgggtaaatcgtaatgttgtaaaaaaaaaaccatttaaacagtttttcgaccttcctttctcagaaaataataaatggccttactttaattgaactatttgtcggaactgttgcatttacctgggggaaaaatagattgaaataattaattaaaaatcaaaaatatttttcagcgtttccgctggcacccgatacattagaatagatatcctaaagcttaattagctcaatcgctcaatatacataattgaacacaacacaccacattctataccatttatcgcgtttatttaacaaaaatggttattgtgatcaacattcagtttctgcttaaacgaagaatgtgggttcagagtctgcggtatttacttcttgccgctgaagacagagcttttcggcttgcgaatggtgacataacggccgcggttggccttggactccttcttgcgcttgaccaacagtttgacgtattcggcgatagcctccttggttgcattctggcgcttcttctggtgcctgcgctgcagcttaacagggatgacctcatcatcttcctcgcacaaatagtagatcttgctgatgttgctggaacgcacgggtcccaggcgacatggggagggattcttcttgagaacgaccaaagtcagcgcggatacgttggcttccacggtgtatttacgcacagtcttgcacttgcgcactttattgcagcgtggatggaagcacgagtgtatcttcttcaggagacgcaaacggcctgttggaaaagatgattgtttttttaagtagtttcttgagaggagtccatggatggatgtgtttgcaaatacttaaggaaatttattataccaattggatgctcaactttggagcgtactccaatcacatatagttaattattagcttttagcaactggaaatattcgctttgtattgctcagaatggaagaactcaccacgaatatgcacataagaatacacagacgatttcatatttaaggtatgttctctagatatattatcacaagactgatccaggttgcttggctaatgacagaagaagacaagcaacctcatgacagaagatacccaggttgcttggcttattacagatgcttaaaagggtttccatacggaacatagaaatctacacatgggaccattattgttttggcggggactgcagcaaatcgcaagagatagctacatatatccgctcacgatttcctgtttccatctctttccgattccgatttggccatataatggcttatgttggaattccaagatagtgtttgttttccatggtttccttaccaaaaaatgccgctggctagctcataaccaaaatcacatgcaatatgaaaacatttacacccgatactttagtatatatatcctaaagcttacactcgctcaatcgatcaatataattgaacacaacacaccacattctataccatttatcgcgtttatttaacataaatggttacaaagttttatttctcctctcgtggatcatttggttgtgatcaacgttcagtttctgcttaaacgaagaatgtgggttccgtgtcgcggtgtttacttcttgtcgctggagacagagctcttggactcgcgaatggaggcagaacggcggcgcttggcctcctcgcgcttggccttggactccttcttgcgctgcaccaacagcttggcgtagtcggcggaagcctccttggaagcgatctggcgcttcttcttcagcgcaatgcgacggtgcttgcgctgcagcacaacgggggtgatcaggcgctgaattttgggggccttggaggtggccttcttgttgtccttggcgggcaaagggcgacgcacaacgaagcgacgcacatcatcttccttgctcaagttgtagagcttgcggatcttgctagcacgcttgggtcccaggcgacgtgggatggtggtgtcggtgagaccgggaatgtccttctcacccttcttcaagacgaccagagccagcacagacatgttggcgtccacgatgcatccacgcacagacttgcgcttacgctcgccagtgcggcgtggacggtagcaggagtgtcccttcttcaggagcagacgcacacggcctgttggaaaagatgattgctttttgtagtagtttcttgagagcagtccatggatatgagcagtgattggaaagttattatctggttagccattagccattcgggtgtaaggaaatg

SEQ ID NO: 23879 - DNA, 408 bp, DROSOPHILA
atggaaacaggaaatcgccgtttgcgtctcctgaagaagatacactcgtgcttccatccacgctgcaataaagtgcgcaagtgcaagactgtgcgtaaatacaccgtggaagccaacgtatccgcgctgactttggtcgttctcaagaagaatccctccccatgtcgcctgggacccgtgcgttccagcaacatcagcaagatctactatttgtgcgaggaagatgatgaggtcatccctgttaagctgcagcgcaggcaccagaagaagcgccagaatgcaaccaaggaggctatcgccgaatacgtcaaactgttggtcaagcgcaagaaggagtccaaggccaaccgcggccgttatgtcaccattcgcaagccgaaaagctctgtcttcagcggcaagaagtaa

SEQ ID NO: 23880 - protein, 135 aa, DROSOPHILA
METGNRRLRLLKKIHSCFHPRCNKVRKCKTVRKYTVEANVSALTLVVLKKNPSPCRLGPVRSSNISKIYYLCEEDDEVIPVKLQRRHQKKRQNATKEAIAEYVKLLVKRKKESKANRGRYVTIRKPKSSVFSGKK

SEQ ID NO: 23881 - DNA, 6825 bp, DROSOPHILA
agattgtacggctccaaatgtaattcaaacaaaataaaatgtgtccgagatacaattccttttaacgtatgtatgttcgttttcatgtttacatgtcattattgtacatatgtatacagttctaatgttattataactgtatactgaaactgtacttgcgcgacttaaaacctacatgtgtatgtcatttatgtacatacatatacagtttgtatgttatcttaactgtatcctgaatctgacggtaaccaaaacgcatgcttaaaaatgatatgaagatcgtaaccttttgcaatcaaaattttaaacaccaatttttgcgactttgattggtacatatgtacatatgtacgtatataaatatgtagctcgcaagctcacattcacacaaacatatgcatataaatatatttaaagaaacaaacaatttcaatcatttaccttttaacgaatgcagcattccgcgctgttggtacagcttatagggcgtcatactaaatgcaatcatgggaattaatttaaacaacggaatctttaccagcctctcttgcctgcgatcgcgtacaaatcttcgacatgcagatcaattgcgttggttaaatagcgcacaggagtgacctgttgtttttgcaagaccgctgagaataacacttgggacactaataaaactacttctactattaatttcactacactaagtccggcagctgggaactccgtcagatttgtgaatttacattgcttagctctgcgcaaaaaccaatacgcaaaccgttaaagaattaatcacaatggctgcgcgaataactgttgattgtgacatatcgatatatcgattgcattccctggatcttggcgtctggataagactgttaaattcaaattttgaattactaaaatctttacacatttctataaattaccgaatttcagaaaaataaatattaatattgttgcaaatatcccatatagtaggcgaaacaatacaataactaaaaataaactgtcatgaaatttattgcaatattcatatgaaaaatgatttcttttaaagaaaattgggtttcttgtacacaaatatttgtaattttttatgggcgctgtctcattatgtttttgtgaaaaaccagggttatgatgactttatttggttgtaaagacattgcaaattctgttgtttgtacgattaaagtcttcattctgcgcataccggtaaaattatacttttcatatttatctttaatatatttttgtaaaggaaaatacattatcttatggttggttacagaaaatacaaagacagagtgtaatgtacatacaatcgagttgtttaaaactttaggtttaacatatacaacgcatacaacaaatagaaatgttaaaagagacaaaaataagtttacaatggggacatgagaatgttgcataatttctaggcaacggatttaattgttttatacaatttccatagacaccaacataattaagttgcatgataattgaaggaggtactaactactgctttaatttttactgaactgaccgacactatactatgtatatgcataactaaagctcatcaattcttttggagctctctattaggtatatatgcgggtattaagacgactaaaactagttccgtgtgagaagactacacacatcagaatggtttaaattatatagcgaagagcacagcataagttagagaagaaagcccataagagttggcaagcctatgccgccttctcctctgactttaggctttaaaaacgacactaaaaattacgttggtgcttgggtatctgttaattttgacgctgatgaatataaggatagcttcgaccttttagcatatggtgactgcggttgcaacgcttcagcgtctagtcagttgtcaatctccagaggcttggcctcctcccacgagaagcccgcgcgaccgaagtgtccataagtgcttgttcgctggtatatcggctggcgcaggtttaggtcccttaaaacaaaaatatagacaattgttatgaaatattttttagcatctagagtttgacacttacttgacaatcttgccgggcctgaggtcaaagtttcgacggatgatatccagaagttctttttgtgacttgtgagaagttccgtagtcgaacacagttatggagagaggctcagcaagacctatggcgtaggacacttggacaaggcagcgcttgcagagaccggccttaaccagtgatttggccacccagcgtgctgcatatgcagctgatctgtcaaccttggtgaagtccttgccagagaatgcaccgccgccgtgggcgccccagcctccgtaagtatctacaatgatttttcttcctgtaagcccagcgtcacccattggtccaccgattacaaaaagcccacaaggattgatgtggacaatggtgttggcatcaatgtatttggcgggaatgactactttaacaactttctccattacttccgagcgcagggtttctaacgatatcttttcagaatgctgcatggacactacaatagtgtggacacgcttgggaactgctgatccctgattgaagaggtactcgcaggttacttgtgttttggaatcggggcgagcccaccagaacacatctgagcgacgcagctcagcaatcttttcgtttagtttgtgagccaaaacgacggttaggggcatacattcctcggtttcgtcggtggcatatccaaacatgataccctgcaaaaagtttatttcgcttcattaataatctctatcactaattaattaatcattaattattcacttaaaagtaaccaaaaccaaaaagaatcagtagcgttagataaataaaacacatttgggttaggaaagggtaaatcaagcatgggtgatagattcgggtatgaattaattgttgctacttaggagtcaaaaagttgtttacaaaattatgttagtgatgtatatatatgcagtagtgtgccttagttttgtgtctgctattctaattatggtatcgactgaaaagtcaaaagttaaatgatatggatttggcagcttcaattaacaaaaaagacgatcatatggttggtaggtcggttggagcaatattgcagcgctattatgatatagtggcaaacagatgaatttaaaattaaatagcaataaagtcgtcatacactacttcaattagttacgaaaatatataaaggaaacgataaacagaaattatagaagtggcgacaacaccccttccaaagagcttataaacgccctaccaccatgaatattttagtcgcaactaaattgctatcaataaaaattaaaaagatgcgttgctcttcggaaagggccttcgatcccggcctgccgagactgctacttctttactgcttctaaatcacacctgatctccggcaccgatctcttcctcggcacggttgacatgcactcccgcagcgatctcaggcgattgttggtccaatgccaacagcacattgcacgttttgaaatcgaaaccttttgtgaatttcgaagcgcgattgcgaagtgcacaatatcgtttaaagtttggtattggattgtatcgagattggtttaatatgaaacgaaaagaaagataaaagagagaagcgcagcaatggtgcacatacacaggaaaatgtctgtaagtaatgttcataatatgattttaaacaccctattattttagattataattatatatataaaaacggtttacaaaaaaatgtattttctacaatcttcataagcactctcttggtgttttttctatataccaaagtctgggaaaactttaagccttcttccataggtcagacaagccgcatgcaagacttctcttgcttccataaaacggtaactagcggaattttaatgattacataaatctttcaatggatttggttgaatgcaatttatgtggttagagaacgcccgcagtgtaatccaaatgtgtgatatgttatgtatttcagtcgttatatatttgcttgaggtgaaattgttaagttgtcttcgaccaaatggttcgtagctgtgggaaacaagtcaatttgattttttttggggcttaagaaaaaatagttatagtaatagtattcctattgctcatcagcttttaatgacaaaggcgaaactcttgttggcctgtgagcaagccaagttaatgtgggaaagatacgaattaagggaaacacttaacaaatgaaacgaaacgaacgaacgcacacactccgcatcacttagtgctaggcggtagtagaagaacggaaagctttgctgtacctggtcaccagcgccgacgtcttcttcttcgcggttgatatgaacgccgttggcaatgttgggcgactgttgctcgatggctacaagcaggttaagtgtcttccaatcgaaacctttttgatttttatttgattttattgttatttaatattgagttgacagtattgttcgtaggaccgacgtagggaacgaattgtaatacccgcccacaaattgtttatgtacctaatagacacttacccttggaggagtcatcataaccaatgtgctgcactgtctcacgaacaaccttctggtagtcgaccacagccttagacgtgatctcgccgcacagcagaatcatgcccgtcttggcgacggtttctgtattaaatattatggaatgtgttaaaagaaatttcggcaactttttcaggtaatccaaaaacagatttgccggtggtttgaccttgtttttttatgttggcgctatcgaataagtcaacttcaaaaagaatggcactcacggtgattcttgattaattctatgaatgagattatttattgttggtcagcgcaccttcattggccgaatttaatataaatctgattttgggtcagagcagtcatgtactccaggtttcataacacttaccacacgccaccttcgcgtttggatcctgcttcagatgggcatccaagatagcgtcgctgatttggtcgcacattttgtctaaaaaaaataaggtaagcaagaggtaagccagaggtgggcgaagaaggaggggaaagcatttttgtcggggagtggaaggaggaacgggccaaaatgttattcagtgcgacggatcaaaatttgctgggccatgcggtttcatttaatctgtctgctattgacagcgaaattcaattcccagaacaagagcataaggcgaccgtagtgttgtccaaacacaaaatgatgacatttgaagccgaatcgtccatgaaatcctgggagtcggattcatctgataccagtcgggttgctcgcgcttgcctcaaaacttggcgcgtaattggagtccgtcaacattcggctacttttcgtagtaaaggcgttattgaactcgaacatgcgtcagcaatagcaacataaattaccaaaactgttgactcatagaaatggcgcatggtatcgatttcggctgggataatgattgcgaggaaactagttaggtcaagggtttaaagtagctactctgaaatgggtttcagggtttccaatttccggctagtctaattatctattctaacaagtccgtcactcatttattacaaaaagacaggcgatattaatgtcaaccatttggggtgtattcttctgaatggcactcggcgcttatcatcacgattgtatagggctagattgtctagggctagcttgccaagccgacttaattagcattataaaataaaatagtatagaatagtaaaagtaatcaatgcgtagtataaaaggtcgctcggcttatcaacagctgttgtcaaacacactactatactggtcgccactgctgatataaacaaactctgggaggggcgaaaagatcgagctcgagcaaaacacgtggttggcaatttcggtgaaaaaaataagctttgacagcggtctagaaaaatgtaaggtatgtttgtgttggccgttgttttgatcgccatctgcgatcaaatgaacaagtgcgtggacaacgtagaacaacgtagagaatacttgaatttcgcatctcccatgagccacaagcacatggtgcgcatgacgtagtctctctgtacacacatacatacatatgtgagagccgcaaacgataaagaaccagtctattaattgcgtctgcccatccaagcacaaggtttagcccgctgttgtgcggggatttcaagagaagccagctgttctccgtggtcccagctttccggcttggtcaccgggcgatgcaacagaggcacgttttactagctcttcttcccgttctcagcctctgttcaagtcgtgcaaattgggtagaaatcaacaaaggtatggacataatttcgtcgccattttgttagagttcaggcggtaagcagaagtgagtagacggtggaggtgtggaactgggtatacagggaaagggacttcagacagaagggcctcagacgctagagaatcagtttggtcaggttatgagaactgacaggcaacatctctcaccacgcccgaaggggcatttgagattgtttctttttttacactgacactatcggtatgatgcaataggaggcgccgcagatgcaatgaagcactcacctggatgaccctcgccaacggactcggaagtgaacaggaatgtagctccgtcttccatgtcatatgagttgccattgctgccgttgcatccgttggcgctatgtccgtttgtcttttgcggcatgttgatgggtagtttgtaatatgtaactcgaagtttgaaggggcaatgggggagcagtgctataacccgagttccggt

SEQ ID NO: 23882 - DNA, 2179 bp, DROSOPHILA
tttgacaacagctgttgataagccgagcgaccttttatactacgcattgattacttttactattctatactattttattttataatgctaattaagtcggcttggcaagctagccctagacaatctagccctatacaatcgtgatgataagcgccgagtgccattcagaagaatacaccccaaatgacaaaatgtgcgaccaaatcagcgacgctatcttggatgcccatctgaagcaggatccaaacgcgaaggtggcgtgtgaaaccgtcgccaagacgggcatgattctgctgtgcggcgagatcacgtctaaggctgtggtcgactaccagaaggttgttcgtgagacagtgcagcacattggttatgatgactcctccaagggtttcgattggaagacacttaacctgcttgtagccatcgagcaacagtcgcccaacattgccaacggcgttcatatcaaccgcgaagaagaagacgtcggcgctggtgaccagggtatcatgtttggatatgccaccgacgaaaccgaggaatgtatgcccctaaccgtcgttttggctcacaaactaaacgaaaagattgctgagctgcgtcgctcagatgtgttctggtgggctcgccccgattccaaaacacaagtaacctgcgagtacctcttcaatcagggatcagcagttcccaagcgtgtccacactattgtagtgtccatgcagcattctgaaaagatatcgttagaaaccctgcgctcggaagtaatggagaaagttgttaaagtagtcattcccgccaaatacattgatgccaacaccattgtccacatcaatccttgtgggctttttgtaatcggtggaccaatgggtgacgctgggcttacaggaagaaaaatcattgtagatacttacggaggctggggcgcccacggcggcggtgcattctctggcaaggacttcaccaaggttgacagatcagctgcatatgcagcacgctgggtggccaaatcactggttaaggccggtctctgcaagcgctgccttgtccaagtgtcctacgccataggtcttgctgagcctctctccataactgtgttcgactacggaacttctcacaagtcacaaaaagaacttctggatatcatccgtcgaaactttgacctcaggcccggcaagattgtcaaggacctaaacctgcgccagccgatataccagcgaacaagcacttatggacacttcggtcgcgcgggcttctcgtgggaggaggccaagcctctggagattgacaactgactagacgctgaagcgttgcaaccgcagtcaccatatgctaaaaggtcgaagctatccttatattcatcagcgtcaaaattaacagatacccaagcaccaacgtaatttttagtgtcgtttttaaagcctaaagtcagaggagaaggcggcataggcttgccaactcttatgggctttcttctctaacttatgctgtgctcttcgctatataatttaaaccattctgatgtgtgtagtcttctcacacggaactagttttagtcgtcttaatacccgcatatatacctaatagagagctccaaaagaattgatgagctttagttatgcatatacatagtatagtgtcggtcagttcagtaaaaattaaagcagtagttagtacctccttcaattatcatgcaacttaattatgttggtgtctatggaaattgtataaaacaattaaatccgttgcctagaaattatgcaacattctcatgtccccattgtaaacttatttttgtctcttttaacatttctatttgttgtatgcgttgtatatgttaaacctaaagttttaaacaactcgattgtatgtacattacactctgtctttgtattttctgtaaccaaccataagataatgtattttcctttacaaaaatatattaaagataaatatgaaaagtataattttaccggtatgcgcagaatgaagactttaatcgtacaaacaacagaatttgcaatgtctttacaaccaaataaagtcatcataaccctggtttttcacaaaaacataatgagacagcgcccataaaaaattacaaatatttgtgtacaagaaacccaattttctttaaaagaaatcatttttcatatgaatattgcaataaatttcatgacagttt

SEQ ID NO: 23883 - protein, 381 aa, DROSOPHILA
MISAECHSEEYTPNDKMCDQISDAILDAHLKQDPNAKVACETVAKTGMILLCGEITSKAVVDYQKVVRETVQHIGYDDSSKGFDWKTLNLLVAIEQQSPNIANGVHINREEEDVGAGDQGIMFGYATDETEECMPLTVVLAHKLNEKIAELRRSDVFWWARPDSKTQVTCEYLFNQGSAVPKRVHTIVVSMQHSEKISLETLRSEVMEKVVKVVIPAKYIDANTIVHINPCGLFVIGGPMGDAGLTGRKIIVDTYGGWGAHGGGAFSGKDFTKVDRSAAYAARWVAKSLVKAGLCKRCLVQVSYAIGLAEPLSITVFDYGTSHKSQKELLDIIRRNFDLRPGKIVKDLNLRQPIYQRTSTYGHFGRAGFSWEEAKPLEIDN

SEQ ID NO: 23884 - DNA, 2809 bp, DROSOPHILA
tgacatgcgacggcgcagaaaaatgctcaaaaataagagtaaaaaaaaaagccgagaaggaaagcgcaaaaaaagtgagaaaatcaaaaagctattgaaagaaatcaaaagcagtgcacgggaattgagtgagattctcttgcgcggagcgtgagagagcgagcgagagagttgcgctgcatgagtgtgttgtgtgtttgtggcgcctctgtcgctgccaacgccgctgtcggcgctctctgcggcagagggttgtcggcgcttcgttaacgttcgatttgttcagtcatcaacagcattcgtgactggcaacgtcgtttcgttcgtccgtcgccgaaagaaatcgagaatttcagaagatttttggattctactgccccacaaggcagtgcagcttcttcttcttagccgcggcgcgggtgtgtgtgcgtgtgtgcccctctctctcactgtgtgtgtacgtcgtgtgtgtgtgtgtgcagaagaatccccccacccacttcatacaaaaaattcataaaaaaataattgcaaaagaatgaatctcgcttgccaagaagaagaaacgtattgatcatatttataaacaaaacagcacacagccaaacaaatcaaaaaggactaaacgaacgtataatataactgtttattatttttttcaagtgcatttttgttcgctaaaatatgtgcgcgtgtatgagtgtcaagtgtaaacaacaacagcaacatcaaaagcaacaacagcgacagcaaacatgtgcaaaataagccacagccaaaaagcaacaacataatgataatggcttgaaaaaatcacacacacaacaacaacaggcaacaaccaaaacaacaacatcataccctcaccattcaacaaacgactacaacaaaatcccccacacaacaacaagaagaaacccccttccaaaaaaatcaaaaaaaattctttttcggaactaaagtgaacaaaatataaaacataacataaccataataataataataataacacacagaaattggcttatttatgcatttttttgagcacgtaacaagaaacatactacttaaggtgtaaatgtgatgactaaaaacgaaaaccgaattaaataacaactaactaacaagtaaaatcgaaacgacaacagaacagaataatgccaggccttattagccccaaattggtagaatccaaaaactgaaaaccccaaaaaaacctaagcaaaaactgactgagaattattgaattaacccaagaaagcccacgaatgcagccaacattgccacaagccgctgggacagccgatatggatctgacggctgttcaatcaatcaacgattggtttttcaaaaaggagcaaatttatttattggcacagttttggcaacagcttggaaaagccgtctcacgcggagtgcgtgcaatcagctcctggtagagacgagccatcttgtcctggtcgtcgtgccgcagccgctgctgctgctcccgttctctttgctcgcgttccctttccctttgctgagcggcagcctgctcgggattaagatgctggtgctgcttcagctgattctccaccttgaagaacggcgacgtgcagctttgaggtggcgatttgctgtcctcgttgctgtgtgaatcctcgccgccgtgactgcgacgctcctgctcccgatgctgggccacactgctctgtttcatcagcgaggaggcttcgctgaggatatgtgcaatccgatcctcggacatggaatcatcgccgccagcgccgccggcaccacgacccgcatactgcggcagtccagaatctgcaaagacgaaggagatggatgatatttcagattagtaggaggtagatgatcgtaaagcccattaaatgctgtaaaaatttatgccaagacggatcatttatatggggtatgctcgctcgattggcaggacatggacatggaagtggaagaggacatgaacctgggacctgggatctagaacccaaaccagaccgaaaccaattaagccataaagcgttcaaaaagccaaagcgaatttgcggccataaagcggcgctgcagttgaaagggtcccgccaagtgtccaccaaatgccacgcctcttgccaaaccgcctagccaatgcactgacagaaatttcgaatgccccaaggggcatggggcggctcaattataaacagcgagcaagcatacaaaacacaaacgtttctcatgaatggtgtacaaaaaaatattcgtgtaaattcgtgttattttatttttgtatatccccaaacctgagttttgccatccaactctggacctcaatagttgttcgatgcaaagcgttgcgctaatttggcacgcgcctggcctcaaacccagggaaatgctcatcgaagcgagcgtccaggagttgaataaacgaaacgaaatgaataaatgaatgaattcaattgcaattgagagcggtcggaggaaatacaaaaaaaaaaatgtgcaaatgggaggggcttgaaaaaattgtaaaactgaaaattgttttgctgaaattcaattgaaaacgaaatggagaagcgttttgctttttgactttttgcttctcgtgacagagaatcgagtggtaaattgcaaaataatcacacaagtggttcgagccacccacatgcacactctgatactttgatatggcgaccgggcagggacatgcccaaacccatacttggcgtggcgaccgagcagggaccattgaatttcctgtgtgatgtcctgcggcatgtttttgtggctgccacagcaaaaacatcaatcagccgca

SEQ ID NO: 23885 - DNA, 6796 bp, DROSOPHILA
taataataacacacagaaattggcttatttatgcatttttttgagcacgtaacaagaaacatactacttaaggtgtaaatgtgatgactaaaaacgaaaaccgaattaaataacaactaactaacaagtaaaatcgaaacgacaacagaacagaataatgccaggccttattagccccaaattggtagaatccaaaaactgaaaaccccaaaaaaacctaagcaaaaactgactgagaattattgaattaacccaagaaagcccacgaatgcagccaacattgccacaagccgctgggacagccgatatggatctgacggctgttcaatcaatcaacgattggtttttcaaaaaggagcaaatttatttattggcacagttttggcaacagcgcgcaacccttgccgaaaaggaagtgaacacactcaaagagcagctatccaccggcaatcccgacagcaacctcaacagcgaaaacagcgatacagcagcagcggcagcaacagcagcagcagttgcagcagttgttgcaggagcaacagcaacaaacgacatcgaggacgagcagcagcaacagttgcagcagacggccagcggcggcattttggaaagcgacagcgacaagctgctgaacagctccattgttgcagcggccataacgctgcagcagcagaacggcagcaatctgctggccaacacaaatacgccgtcgccctcgccgccgttgctcagcgccgagcagcagcagcagttgcagagcagtttgcaacagagcggcggtgttggcggcgcctgcctcaatcccaagcttttcttcaatcacgcccaacagatgatgatgatggaggcggcagccgcggcagcagcggcggcattgcaacagcagcagcaacagcaatcaccactccattcgccggcgaatgaagttgcgattcccacagaacagccagcggcaacagtggcaacaggagccgctgctgcagcagccgcagcagcaacaccgattgcaactggcaacgtcaaaagcggcagcaccaccagcaacgccaatcacaccaacagcaacaatagtcaccaggacgaggaggagctggacgatgaggaggaggacgaggaggaggatgaggacgaggatgatgaggaggagaatgcctcgatgcaatcgaatgctgatgatatggagctggatgcgcagcaagaaaccagaactgagccaagtgcaacaacacaacagcagcatcagcagcaggatacagaggatcttgaggagaacaaggatgcgggggaggctagtttaaatgttagcaataatcacaatacaaccgatagcaataatagttgtagtcgaaagaacaacaatggcggcaatgaaagtgagcaacatgtggccagttcggcggaggacgatgattgcgccaacaacaatacaaataccagcaataacaacaataccagcaacaccgccaccagcaacacgaacaacaacaataataataacagcagcagcggcaacagcgagaagcgcaagaagaagaacaataacaacaacaacggccagcctgctgttctattagctgccaaagataaagagattaaagcccttttggacgaactgcagcgcttgagggcgcaggagcagacgcacctggtgcaaatccaacgattggaggaacatcttgaggtcaagcgtcagcacatcatccgattggaggcacgtctggataagcagcaaattaatgaggcactggccgaggcgaccgctttgtccgctgccgcgtcaaccaacaacaacaataatagccagagcagcgacaacaataagaagctgaataccgctgcagaaagaccgatggatgcgtcatccaatgccgatctaccggagtccacaaaagctccagttccggcggaggatgacgaagaagatgaggatcaggccatgctggtggattccgaggaagcggaggacaagccagaggactcacatcacgatgacgacgaagatgaggacgaggatcgggaggcggtcaatgccaccacaaccgatagcaacgagctcaaaatcaaaaaggaacagcacagtccgctggatctgaatgtgctcagtccgaattcggccattgccgctgcagctgcggccgccgctgccgccgcctgcgccaatgaccccaacaaattccaggctctgctcatcgagcggaccaaagccttggccgcagaggcgctcaagaatggcgccagcgatgccctcagcgaagatgcccaccatcagcagcagcagcaccaccaacagcagcaccaacaccagcaacaacaccaccagcaacagcacctccaccagcaacatcaccatcacctgcaacagcaaccaaacagcggcagcaacagcaatccagcgagcaacgaccaccatcatggacaccatttgcatggccatggtttgctgcatccttcgtcggcgcaccatctgcaccaccaaacgaccgaatccaattcgaattcgagtacacccacagcggcgggaaataacaatggtagcaataacagctccagcaacacaaatgccaatagtaccgctcaattggccgccagtttggccagtacactcaatggcaccaagtccctgatgcaggaggatagcaatggcttggccgccgtcgccatggcggctcatgcccaacatgcggctgccttgggacctggatttttgcccggccttccagcgtttcagtttgccgccgcccaagtggccgccggtggcgatggacggggtcattatcgtttcgccgactcggaactgcaattgccaccgggtgcttcgatggccggtcgtcttggagagtcgctcatacccaagggtgatcccatggaggccaaactccaagagatgttgcgctacaacatggacaagtacgccaatcaggcgctggataccctgcacatttcgcgacgtgtccgcgaactgctatcggtgcacaacattggccagcgactatttgccaaatacatactgggcctgtcgcagggcaccgtttccgagctgctgagcaaacccaagccgtgggacaagttgacggagaagggacgagatagctaccgcaaaatgcacgcctgggcctgtgacgataatgccgtcatgctgctcaaatcgctgatacccaagaaagattctggactgccgcagtatgcgggtcgtggtgccggcggcgctggcggcgatgattccatgtccgaggatcggattgcacatatcctcagcgaagcctcctcgctgatgaaacagagcagtgtggcccagcatcgggagcaggagcgtcgcagtcacggcggcgaggattcacacagcaacgaggacagcaaatcgccacctcaaagctgcacgtcgccgttcttcaaggtggagaatcagctgaagcagcaccagcatcttaatcccgagcaggctgccgctcagcaaagggaaagggaacgcgagcaaagagaacgggagcagcagcagcggctgcggcacgacgaccaggacaagatggctcgtctctaccaggagctgattgcacgcactccgcgtgagacggcttttccaagctttctcttctcaccctcgctatttggaggagccgccggaatgccaggagcagccagcaatgcctttcccgccatggccgatgaaaatatgcgtcacgtctttgaacgtgagattgccaagctgcagcagcaccaacagcaacaacaagctgcccaggctcaggcacagttccccaacttctcgagcctgatggctttgcagcagcaggtcctcaacggagcccaggatctctcgctagctgccgctgcagccaaggacatcaagttgaacggtcagcgatcctcgttggagcacagtgccggcagcagcagttgttcaaaagatggcgaacgagatgatgcgtatccaagttccctacatggtcgcaagtccgagggaggtggcacacccgcaccacctgccccaccatctggcccaggaaccggagcaggagccccacccacagcagcaccaccaaccggcggtgccagcagcaattcggcagcacccagtccgctaagcaattcaatacttccaccggcattgagcagccaaggtgaggagttcgccgcgacagcaagtcctttgcagcgaatggcctcgatcaccaattcgctgattacccaaccaccggtgacgccgcaccacagtacgccacagcgacccaccaaggcggttctgccaccgatcacccagcaacagttcgatatgttcaacaaccttaacaccgaggatatagtcagacgtgtgaaggaggccctgtcgcagtactccatctcccagcgattgttcggcgagtccgtgctgggtttgtctcagggatcggtctccgatttattggctagacccaagccatggcacatgctcactcaaaagggccgtgaacccttcattcgcatgaagatgttcctggaggatgagaacgcggtgcacaaactggtggccagtcaatacaagattgcccccgagaagctaatgcgaacgggcagttacagtggaagtccgcagatgccacagggattggcaagcaaaatgcaggctgcctccctgcccatgcagaagatgatgagcgaacttaagctgcaggagccagcacaggcgcagcacttgatgcagcaaatgcaggcggcggcaatgtcggcagcaatgcaacagcagcaagtggcacaagcgcagcagcaggctcagcaggcgcaacaggcacaacagcatttgcagcagcaggcgcagcagcacttgcaacagcagcaacatcttgcccagcagcaacacccccatcagcagcaccatcaagcggccgccgcggctgccgcattgcaccaccaaagcatgcttctgacctcgcccggactgccaccccagcatgccatcagtctgccaccttcagcgggtggagcccaaccaggtggtcctggtggcaatcagggcagctcaaatccctcaaacagcgaaaagaaacccatgctgatgccggttcatggcactaatgccatgagaagtctgcaccagcacatgtcgcccaccgtttacgaaatggccgctttaacccaagatctggacacccacgatatcactaccaagatcaaggaggcgttgttggccaacaatattggtcagaaaatatttggcgaagccgttttgggactttcgcagggatccgtatctgagctgctgagcaaaccgaagccctggcacatgctctccatcaagggcagggaacccttcatccggatgcaattgtggctcagtgatgccaacaatgttgaacgattgcagttgctgaaaaatgagcgacgggaggccagcaaacgaaggaggagcacaggcccaaaccaacaggacaatagtagcgatacctccagcaatgataccaatgacttctataccagcagtccgggtccaggatccgtcggttcgggtgtcggtggtgctccgccgagcaaaaaacagcgtgtcctcttctccgaggagcaaaaggaggcacttcggctggcattcgccttggatccgtatccaaatgtggggaccatcgagtttctggccaatgagctgggcttggcaacgcggacgatcaccaactggttccacaatcatcgcatgcgattgaagcaacaggtgccacacggacctgccggtcaagataatccgataccgagtcgcgagagtaccagtgccacgcccttcgatcccgtccaattccgcattctgctgcagcagcgtctactggagctccacaaggagcgaatgggcatgagcggtgcccccattccctatccgccgtactttgctgccgctgccattttgggtcgcagtctggcggggattcccggtgcggcagcggccgctggagcagctgcagcagccgccgcagttggcgcctctggtggtgatgagttgcaggctctgaatcaggccttcaaggagcagatgagcggtttggatctgtcgatgcccaccttaaagcgggaacgcagcgatgactatcaggacgatctggaactggagggtggtggtcacaatctaagtgacaacgaatcgctggagggtcaagagccggaggacaagaccaccgattacgagaaggtgctgcacaaatccgctttggccgctgccgccgcttacatgtccaatgcagtgcggagttcacgacgaaagccagctgccccacagtgggtcaatcccgccggagcggtgaccaatccaagtgctgtagttgcagccgttgctgctgccgcagctgccgcggcggacaatgaacgcatcatcaacggggtgtgcgtgatgcaggcctccgagtacggccgcgatgatactgatagcaacaagccaacggacggcggcaacgattccgatcatgagcacgcccagctggagatcgatcagcgtttcatggaaccggaggtgcacatcaaacaggaggaggacgacgatgaggagcaatcgggatcggttaatctggacaacgaggacaatgcgactagcgagcaaaaactgaaggtgatcaacgaggagaagctgcgaatggtgcgagttcgccggctgagcagcactggtggtggttcctctgaggaaatgccagctcccctcgcaccaccgcctcctccgccagcagcttcttcttctatcgttagtggagaaagcaccaccagcagcagtagtagcagcaacaccagcagcagcacaccggcggtaaccactgcagcagcaactgcggcagccggttggaactactaa

SEQ ID NO: 23886 - protein, 2175 aa, DROSOPHILA
MQPTLPQAAGTADMDLTAVQSINDWFFKKEQIYLLAQFWQQRATLAEKEVNTLKEQLSTGNPDSNLNSENSDTAAAAATAAAVAAVVAGATATNDIEDEQQQQLQQTASGGILESDSDKLLNSSIVAAAITLQQQNGSNLLANTNTPSPSPPLLSAEQQQQLQSSLQQSGGVGGACLNPKLFFNHAQQMMMMEAAAAAAAAALQQQQQQQSPLHSPANEVAIPTEQPAATVATGAAAAAAAAATPIATGNVKSGSTTSNANHTNSNNSHQDEEELDDEEEDEEEDEDEDDEEENASMQSNADDMELDAQQETRTEPSATTQQQHQQQDTEDLEENKDAGEASLNVSNNHNTTDSNNSCSRKNNNGGNESEQHVASSAEDDDCANNNTNTSNNNNTSNTATSNTNNNNNNNSSSGNSEKRKKKNNNNNNGQPAVLLAAKDKEIKALLDELQRLRAQEQTHLVQIQRLEEHLEVKRQHIIRLEARLDKQQINEALAEATALSAAASTNNNNNSQSSDNNKKLNTAAERPMDASSNADLPESTKAPVPAEDDEEDEDQAMLVDSEEAEDKPEDSHHDDDEDEDEDREAVNATTTDSNELKIKKEQHSPLDLNVLSPNSAIAAAAAAAAAAACANDPNKFQALLIERTKALAAEALKNGASDALSEDAHHQQQQHHQQQHQHQQQHHQQQHLHQQHHHHLQQQPNSGSNSNPASNDHHHGHHLHGHGLLHPSSAHHLHHQTTESNSNSSTPTAAGNNNGSNNSSSNTNANSTAQLAASLASTLNGTKSLMQEDSNGLAAVAMAAHAQHAAALGPGFLPGLPAFQFAAAQVAAGGDGRGHYRFADSELQLPPGASMAGRLGESLIPKGDPMEAKLQEMLRYNMDKYANQALDTLHISRRVRELLSVHNIGQRLFAKYILGLSQGTVSELLSKPKPWDKLTEKGRDSYRKMHAWACDDNAVMLLKSLIPKKDSGLPQYAGRGAGGAGGDDSMSEDRIAHILSEASSLMKQSSVAQHREQERRSHGGEDSHSNEDSKSPPQSCTSPFFKVENQLKQHQHLNPEQAAAQQREREREQREREQQQRLRHDDQDKMARLYQELIARTPRETAFPSFLFSPSLFGGAAGMPGAASNAFPAMADENMRHVFEREIAKLQQHQQQQQAAQAQAQFPNFSSLMALQQQVLNGAQDLSLAAAAAKDIKLNGQRSSLEHSAGSSSCSKDGERDDAYPSSLHGRKSEGGGTPAPPAPPSGPGTGAGAPPTAAPPTGGASSNSAAPSPLSNSILPPALSSQGEEFAATASPLQRMASITNSLITQPPVTPHHSTPQRPTKAVLPPITQQQFDMFNNLNTEDIVRRVKEALSQYSISQRLFGESVLGLSQGSVSDLLARPKPWHMLTQKGREPFIRMKMFLEDENAVHKLVASQYKIAPEKLMRTGSYSGSPQMPQGLASKMQAASLPMQKMMSELKLQEPAQAQHLMQQMQAAAMSAAMQQQQVAQAQQQAQQAQQAQQHLQQQAQQHLQQQQHLAQQQHPHQQHHQAAAAAAALHHQSMLLTSPGLPPQHAISLPPSAGGAQPGGPGGNQGSSNPSNSEKKPMLMPVHGTNAMRSLHQHMSPTVYEMAALTQDLDTHDITTKIKEALLANNIGQKIFGEAVLGLSQGSVSELLSKPKPWHMLSIKGREPFIRMQLWLSDANNVERLQLLKNERREASKRRRSTGPNQQDNSSDTSSNDTNDFYTSSPGPGSVGSGVGGAPPSKKQRVLFSEEQKEALRLAFALDPYPNVGTIEFLANELGLATRTITNWFHNHRMRLKQQVPHGPAGQDNPIPSRESTSATPFDPVQFRILLQQRLLELHKERMGMSGAPIPYPPYFAAAAILGRSLAGIPGAAAAAGAAAAAAAVGASGGDELQALNQAFKEQMSGLDLSMPTLKRERSDDYQDDLELEGGGHNLSDNESLEGQEPEDKTTDYEKVLHKSALAAAAAYMSNAVRSSRRKPAAPQWVNPAGAVTNPSAVVAAVAAAAAAAADNERIINGVCVMQASEYGRDDTDSNKPTDGGNDSDHEHAQLEIDQRFMEPEVHIKQEEDDDEEQSGSVNLDNEDNATSEQKLKVINEEKLRMVRVRRLSSTGGGSSEEMPAPLAPPPPPPAASSSIVSGESTTSSSSSSNTSSSTPAVTTAAATAAAGWNY

SEQ ID NO: 23887 - DNA, 5575 bp, DROSOPHILA
gggtgcccaactacaacggttggtggccatagaaaatcgttaaggtgtttaatcaatggctctggctcgttggcacaatggaatgaaattaagtgccataaatcaatggcgaaatataggtgagctcgcttttatggtgcgcacttgggccaaatcacctgggccttgacctttttcgtggagtcaccagaatatttggtaaatagtaaatcctcgcaagagtggctaaaaaaagctcaggaagaaattagaaggtaggaaaatggtcacagcaaggcacagaaaatacattaagcacattaaagcccgtcaaatggaaaagtggccaagaacagcaacaaaaggaattcagtgccaggagaacgcacctgcctccactccaacatcattggctccccttacgtggtcacccaaagcagtcacaataaaatgccaactgccaataaatgccaataaatcaaacaattgagcacggccaagttgtgtgacgccgtgcgccaaataagtccaacggccaatgtccaatgtccaaatgtcccatgtccgctgaccgatgtgaaagcgaacaaaaagctagcaaccaacttctgaatgcccgccccaatggttagcagtggagcagacaaagaacatccaatacaccgattggaactcaggaatcgagacaaaccatgttgcatgttcttggaatcgggttaaattagtaaagaaggtgcatagttagaaacatttcgcagtctctctccaacactctccaatttcacactttaaaacaaacaacttcttgaccaaatagttatgtatttatttcgtcgctctataggagcaacattcaaatttttatgtacaacgtgtacgtgtacggatggtttgactagagatttggaacccaactaactatcgatcgatggctgatcacacctgcttgacatttcaagttcttgtgaaaaaataccgaaaatactgaaaatgtttcgattcgcaattgtctgatgagaacctatacagtgtatattctcttcacagttgatcccagtttatccttggagtccttgtgcaactgatactccagcacgtatatgttgtccatgcgtagaaccttgcgtaaaatgcgtccaatttcaaggactgtagtctgatttcccccgtcagcgttccaaatagagatcttgttcgactttccgcgaatattgaccacaacgccacaaagatcgtccgagtgcttacaggcctctccaatcagacagagcatggcgtccatccagaaactgtccagagccatcttggcgctcttggtcaagttgatgacccagcgtcctccattgacattggcctcatcctcccacatgggtcgaatgcccttcttgaacagggagtagtcactgcccagcataagctcggatgggggcttgatgtgagtgatcaggctccaaaacttctccacggtatcgaagcttgtaaccttgtgcagcatttcttcccaacttttatttcgatcgttctctagataccacagagtccagcagttgttgagtggatgttgaggatcctcgacctccaaaagttcggcgttctccgccgcgatggtcagatcatcatcacatttattgttcagtgacagaaattctagtgaattgtcaaaagcgaccaccgcatcttcttttttggccggtggacatgtgttctgtttaatcctgggctcgagcctcaagctcaaaagcttctgctcggataaccgcattaggaccttctgccctaaaagattttcttgtgtgattatctttccctgcatattcttttcgattagcttcttgtcctgcagatccttgtcgagcacattcttcctatattgtgcactagtcgactgctcctgttcagggctattttctttctgctggaccatctgttttccttggcctttacccttctcattgtcatcatttcccgtcgactttccatctttgcccggattgttgcttcgactgctcttgctcgtctgactgggagtgcgtggcgcattcttttgattcttcttgcccttccggttccccttgccacgtttttggggctctgatggcgacgttttgtttggatcattcatcggttcttgggtcttttctggttgagtatcttcagtggattgaggagctgcagcaggctgggtaacatcagttggtgactccactttttggggaccttgtgtgggatattcattgttgttcgcacagcttttaaacattgttctcggattggcaaagtccctcatcctgtaaaagctgttgggaagcatggcggctttgttcgaggtcagcaacggctgtagagttatacggaaatggcgaggttagcgctatgtttaaacaaacaaatctaacaaaaaaaagggttaatataatggcgatttttgggatctttcattttcgtagcttcctatacaattatatatatgatgaatccacaaagccaagccaaacgctctttctgaacttccgactaatgaggcaaacaagccaacatgccccttttctctaagacgtgagctggaaatttcttctttggaagcacgaaaggaaaaactgaccaagaccaagggacgtgtgcagaagttggcaactttagcaacaaatatttacacaccccccgaactgaatgatttgagtgggtgcaaaaccccaaacacacgggtgtaaggtaacacagcacgcatttcttattagctgggtcaagttgtgcttgccccttggaaataaccgagtaaaagcgtttttcacacgccaaaatctccgatagaaaagattacgatgccttggtatttacgcatcttttaaaatcattaaaaattctctacatttacgatatgcagcggacgaaggaatctttatgtaatggcatcacaaaagtaaaccaccaggagaacaaactttgatttgactctggctgccataagttaaaatggggtcaaaaggactcgaatttatgagtgagaaaaaatcaatcagaaattggaatcagaaacagaatccaaggcgtggcaaatgtttgagcggacttggactttgagcgagtgttgtgctttcacgcttttggcaagcagtttatggccattttatttgacccgattttgttttaatggaatatctgtgccttaaccatggacttcatatgtacatttgtatcacttggcatgggctaagaactgtacagatatgggaatctcctttcacttctgccatacaaattagggaaacaacaaaggcaacacattgcaggaggttttccttcttaaaagccgtttagggatctcatacccgacatttccaaatgttcctcttttaacttaaatgacatcaaaatgaaaagcagggccaaaacagaaacagaaactacaagacgtgcgggtgcacttagcgaaagtattacagagatcaactaaattttatcgcgacagtagtttagattatagcatgtaatgaactgcttttgaatctttatgtcactgtactttggcgatctagattcatttcaatgaataatttacttatgggagtagtcgaaagccacaatagaaggcaccttggatttctctcagttcccgcaaagcagtttcgcccttctcagttcctatcgatgcaattttttatttggcccgatgcgatgtaaatattgcattagacggggccaaagtgttgggcaaatttattggcagcacataaatcgaggactcgccctcaacgggtcggttgtcgtctgttgaaaaagtaaatgttctaaaggtaaatatgcacacagcgaggaagtggcactcattcagttgaacgttggaagtgggaaggaagttgaaggaaggtggactactctacattggcatctgtgctcgccttctgtgacctatgacctgtgagccatcgtcgctggctgaaatgccgaaatgttgaaatgttcaaatgccggctgctgactgctagctgcctcgaaaaactgatgaaaatgcaaaaatgttgttcccagtccttgcctttcccctcggctgctatgccaattttaattaacaaaaaacatgagcagctccctgttgcgttgtgtgtgttttgtttagctctgttttgttttgttttgtttagtttagttcagctctgttctgttttgttttgtttggctagtttgaactttgttcctcgtattcttgtatgccggttgcactagacgggtgatggggttaagcaggggtagctccatccccactaccgtcaatccgctcaattgctctagcccaactttttgcatactttcggggattcccagtaatcggcggcagccaatgaaatctaagctgaccgacagacaagacatactacatacgacaaggaacacactaccttatttgtaaacgaagatgacgaaggaggagaaacccaacgaacagttctaatgccataattaatcactacgaattgggtctacacaacttacctaacgcactgcgaatatccgaataccgcttaggtcaatcaaaatatatcaacaaataaatcgcaatggttttgtaaataaaatttgactaaaacccggttgttctcacaacgaagtgtcgtccaaaactgatttatatttctagacttactttgctctgaaaaatgacttttggtaacaaaagtccggtcccacttcggtactattctgcattttttcccatcactgggatcggattcgcgagtatatggcctaatccgaactccactaagcgctcctggattacagctaaagcatttaattaaaaaattgcattgcttttgtttttgcgcgctgccataatttgcatgccaacaacactatggcctgcctgtttgctcatatcattaattcgcaatttggccaaataataatgaatattttcatcttgtgtcgctttttgccctgttcagttcagttcagttagctctgagcgtgtttttgttcacatttgtatatttgttcatgtccgttcagacattcgcattcaaatgttttgcgttttgtgttcttgtgcaatgcaattaattagaagtggataaatggtgcatgagtgtgcgcaaattaaattaaattctatgtgcatttttgcattttgccagcgaatgaatcgctctgaaaaagtcatttggagttgaaatgcaaacacggcattctgaaatcatcaagcattatgagaatgcataaactgaaattgaaccataaacgcatgccccccgcaagcggattgcgggtattatcattatgaaatgctaaatcgtgtaaaatatttaaagagtcgttagcagttgcattacgcaaaaaagcaacacatcaaatacaaacatcccaatgcatcaaaaaggcaatcagagggcggttgtggcgtcggtgagtccacctccaacccgaccaacagttcgtggccgactgaagcaaacgacaaggatttcccaggacctgctcgatcgagcaacagagggacaggcaacttaacagacaaccgtggaaacttaacagctgttgtaggcaactcatagacggaatcatgaagaatattgtgccaaaatacagcattttcttttat

SEQ ID NO: 23888 - DNA, 930 bp, DROSOPHILA
gaacaaccgggttttagtcaaattttatttacaaaaccattgcgatttatttgttgatatattttgattgacctaagcggtattcggatattcgcagtgcgttagccgttgctgacctcgaacaaagccgccatgcttcccaacagcttttacaggatgagggactttgccaatccgagaacaatgtttaaaagctgtgcgaacaacaatgaatatcccacacaaggtccccaaaaagtggagtcaccaactgatgttacccagcctgctgcagctcctcaatccactgaagatactcaaccagaaaagacccaagaaccgatgaatgatccaaacaaaacgaccatcgcggcggagaacgccgaacttttggaggtcgaggatcctcaacatccactcaacaactgctggactctgtggtatctagagaacgatcgaaataaaagttgggaagaaatgctgcacaaggttacaagcttcgataccgtggagaagttttggagcctgatcactcacatcaagcccccatccgagcttatgctgggcagtgactactccctgttcaagaagggcattcgacccatgtgggaggatgaggccaatgtcaatggaggacgctgggtcatcaacttgaccaagagcgccaagatggctctggacagtttctggatggacgccatgctctgtctgattggagaggcctgtaagcactcggacgatctttgtggcgttgtggtcaatattcgcggaaagtcgaacaagatctctatttggaacgctgacgggggaaatcagactacagtccttgaaattggacgcattttacgcaaggttctacgcatggacaacatatacgtgctggagtatcagttgcacaaggactccaaggataaactgggatcaactgtgaagagaatatacactgtatag

SEQ ID NO: 23889 - protein, 265 aa, DROSOPHILA
MLPNSFYRMRDFANPRTMFKSCANNNEYPTQGPQKVESPTDVTQPAAAPQSTEDTQPEKTQEPMNDPNKTTIAAENAELLEVEDPQHPLNNCWTLWYLENDRNKSWEEMLHKVTSFDTVEKFWSLITHIKPPSELMLGSDYSLFKKGIRPMWEDEANVNGGRWVINLTKSAKMALDSFWMDAMLCLIGEACKHSDDLCGVVVNIRGKSNKISIWNADGGNQTTVLEIGRILRKVLRMDNIYVLEYQLHKDSKDKLGSTVKRIYTV

SEQ ID NO: 23890 - DNA, 3548 bp, DROSOPHILA
caaaattcccacaatcagaatgcccataatgccgaatagaagcgggccgcacatgcggaaataggctatttttcgatggctgcggcgactgccagcgacatttgtctgaaaagaacgcaatattattgggttgctaaatatttcactctttgcatggtgggaggcacatataagcatgtacatacatgtatgtgcgtataaattcccaatgaatgtgtatcttcagatactcgttagctgggaaagttcaattgggcaggttcagatacatagatacaaatacagctaaccttgtacttgatcgagtatgtgagtagcgatgtaagcagcagagtagcgtagaaataccttacccatgcgtaatcctcagggtcgtcggtcgagacggagagcagcttgtcctgggagttggtgcctccggggactctccggttggctctcttgcccgaggacgactgggaggctatcagggcgtccagctcccgacgcttcttcattttctttccggcccgcaggggcacttcaatgcgatggtggcagtccatggggtcgtcttctagaaactctggtctccagtggaattcttgcaatcggtcgcagggctgggctattacattttctcagcgtagcccagttgcttttgtaatgctggagcaaccataacatgtacttatactgataaaaaagatacttctgcgcatgatttcagattacggtgattaagactaatcgctggttatcgataagcgatgaaagttattttggaaattaaattggctgcctatgctaaatataccttttaaatgagctgcttttgaagtacatttaacttggatcctccgataatgatcaattaaattgacccaaaaagtgggggcgttcgataggtttggtaatttccggattcgtaataacggtctcactgcccccaaaagacttgcattgatttttacgccgtgctcgctttatcgatctagtttaattaagttcatagccgtcaaaaatgttctgtgcgcttctgctcgtctgctcagagtttccgtttagtgttttctaacgttggcctccatatgtcccataatatgttcgttgacgccgacgtactgttgcaataggtactcctccgctgatttcgaaatggccaagaacagctttaagactttaatcagccagaaacacaaaacgtttccggcggacctaaatatgtacggaatgaagtgtaaatcgcagctgctggaggatcaggagaacgtgaccctgatcatcaatcggcggaactcaatccgccagaagccgaagagttgggcttggaccctgctgcgttgcaggtggcaaaagaagctagttctcttattaatatttatttgtgtgtgcgttctgattgttttcgccaacacgcatctcttggttcgcggcaacatcctctcggccttcctctcgagccggcttaacaagcattcgcacgcggagaagcaggaggcgaggtatcccgacatcccggccacgaccccgtcagttcccccggtgctgaggcccacgcactatctgctcaactactcctccacccagctggagctgagctcgcacttgaacggtctgtcctcagactacaacatattcgtcatctacacgcgggagaactaccacttgaaccttaagttcgacctgttcgcccacagcttgctgaagcacaccagtgcccagctgcatctgcacgtgatcacggacagcgagagccagccctcggtgctggagatcctgcagcgacagatcaggcggttccggcggacggtcatatacaccatatacgacgtgaaggtctgctccagcatcatacaagacatagccgccaagttgtccccgtacttcagctcaaccccgaactcgtactacagcgactccctctttttcctgtccctcggccttcacaggatcgccgacaggagcctaaacagagccattctgctagattgtgatatagtcttccgatccgatgtccgactgctgttcaatgagttcgacaactttctgccgcaccagctgtacggactggcaccggaactgacccccgtctaccgccacatcctctaccgctatcgcgtgcgctatccgaagaccagtttcgggaatccctactatccgatcaacaacgaagggggcaaccaacatagccgtgtccaccacggctatccaggcctgaactccggcgtggtcctgctgctcctaaaccgcatccgtaactcaaagtcctacctggagaagctgacccactcggaggtgcacaccctggtcgccaagtactccttcaagggccacctcggcgaccaggacttcttcaccctgctgggatacgagtacccgaacttaatctacagactggactgcatttggaaccgccagctgtgcacctggtggaaggatcacggatactcacagatattcgacgcttatttccggtgcgagggcaatattaaaatgtaccatggcaactgtaatacgcgaattccagaataaataaaattgttataggaatattaaattaattaaatgcagggtatttttatttggtataactattgtaatggaacgttatgtaatatacggtgaatttaatcttagtttatagaccattataaatggtgatatataaaaatgaaatttaaagataaaagacagcccacacctatcaccatttaaaatatcaaaacgatgtaagaatgttatcgataggcgagaagcaacagagtgggaatatgccgcacagggtgtttcgtgtgaatgatttcgcctcttgtttcttatctttaaccttcatttctggctccgtttggctatgaattaggagcagtcccgaataatcagtcgagcatacgtagttaacgatggcgccgaatgcagcagtaccagtggagcgatatgagcctgagaacatcgggatcaacgccattctcctggggccgccgggttccggcaaaggaacgcaggtgggtcaaaattacataatgatgtgttttttgtgacacggacgccatgtagtctataaataaatacaacgtgttcaagtgcgcggtttttgtttgcaaataatcggtgaagctcgttaattctcttggaagagaattaaaactggtgaagttatataagacgatgtgtacatggaaatgtatatgtatgtatctacgtgccaagtatgtacatatgcgtcaagcagtgtctttctcttgaccctgaatcaaatcaaagccttggcgagatgtggcgaattaagtggaacacctttaggcaatcgattgggtattatgcagaccatctattaaaaggctaccagaacattcctggcctcaagaaatgcatcttatctagccgattggttaccttgcttaccttccgatatggtgctaaattgattaattgattagctctaactgaaacttatcaatgtttttaattatgcccatttcaggctcccctgctgaaggagaagttctgcgtgtgccacctgtcgaccggcgacatgctgcgggcggagatttcatccggttcgaagc

SEQ ID NO: 23891 - DNA, 1548 bp, DROSOPHILA
aaaatgttctgtgcgcttctgctcgtctgctcagagtttccgtttagtgttttctaacgttggcctccatatgtcccataatatgttcgttgacgccgacgtactgttgcaataggtactcctccgctgatttcgaaatggccaagaacagctttaagactttaatcagccagaaacacaaaacgtttccggcggacctaaatatgtacggaatgaagtgtaaatcgcagctgctggaggatcaggagaacgtgaccctgatcatcaatcggcggaactcaatccgccagaagccgaagagttgggcttggaccctgctgcgttgcaggtggcaaaagaagctagttctcttattaatatttatttgtgtgtgcgttctgattgttttcgccaacacgcatctcttggttcgcggcaacatcctctcggccttcctctcgagccggcttaacaagcattcgcacgcggagaagcaggaggcgaggtatcccgacatcccggccacgaccccgtcagttcccccggtgctgaggcccacgcactatctgctcaactactcctccacccagctggagctgagctcgcacttgaacggtctgtcctcagactacaacatattcgtcatctacacgcgggagaactaccacttgaaccttaagttcgacctgttcgcccacagcttgctgaagcacaccagtgcccagctgcatctgcacgtgatcacggacagcgagagccagccctcggtgctggagatcctgcagcgacagatcaggcggttccggcggacggtcatatacaccatatacgacgtgaaggtctgctccagcatcatacaagacatagccgccaagttgtccccgtacttcagctcaaccccgaactcgtactacagcgactccctctttttcctgtccctcggccttcacaggatcgccgacaggagcctaaacagagccattctgctagattgtgatatagtcttccgatccgatgtccgactgctgttcaatgagttcgacaactttctgccgcaccagctgtacggactggcaccggaactgacccccgtctaccgccacatcctctaccgctatcgcgtgcgctatccgaagaccagtttcgggaatccctactatccgatcaacaacgaagggggcaaccaacatagccgtgtccaccacggctatccaggcctgaactccggcgtggtcctgctgctcctaaaccgcatccgtaactcaaagtcctacctggagaagctgacccactcggaggtgcacaccctggtcgccaagtactccttcaagggccacctcggcgaccaggacttcttcaccctgctgggatacgagtacccgaacttaatctacagactggactgcatttggaaccgccagctgtgcacctggtggaaggatcacggatactcacagatattcgacgcttatttccggtgcgagggcaatattaaaatgtaccatggcaactgtaatacgcgaattccagaataaataaaattgttataggaatattaaattaattaaa

SEQ ID NO: 23892 - protein, 458 aa, DROSOPHILA
MAKNSFKTLISQKHKTFPADLNMYGMKCKSQLLEDQENVTLIINRRNSIRQKPKSWAWTLLRCRWQKKLVLLLIFICVCVLIVFANTHLLVRGNILSAFLSSRLNKHSHAEKQEARYPDIPATTPSVPPVLRPTHYLLNYSSTQLELSSHLNGLSSDYNIFVIYTRENYHLNLKFDLFAHSLLKHTSAQLHLHVITDSESQPSVLEILQRQIRRFRRTVIYTIYDVKVCSSIIQDIAAKLSPYFSSTPNSYYSDSLFFLSLGLHRIADRSLNRAILLDCDIVFRSDVRLLFNEFDNFLPHQLYGLAPELTPVYRHILYRYRVRYPKTSFGNPYYPINNEGGNQHSRVHHGYPGLNSGVVLLLLNRIRNSKSYLEKLTHSEVHTLVAKYSFKGHLGDQDFFTLLGYEYPNLIYRLDCIWNRQLCTWWKDHGYSQIFDAYFRCEGNIKMYHGNCNTRIPE

SEQ ID NO: 23893 - DNA, 3771 bp, DROSOPHILA
gcatgatgtactatccccacgaggtcgaggaagtaatcgcccagatgccagacgttgcagaggtttgtgtttttgggatctttcgggagacggagggcgatgccgccgctgcatctgtggtcctgcgatccggtagcaaactggatcccaagcacgtggagcagtatgtgcggaaaaacgtatccgtgcagtttaaacatctccatggcggcgttcagttcgttccacagctggcgaaaagcgccaacggaaaggtcaatcggcaggccgtaaaggcggcctacttgagagatgctacccagtcctaagttcaatttataatccgaatcaacaattagtaagcaaaacccatgatgaagcaaccttggacttccttagcacattagaatgtttcaccattgttattattgttataaaaattaaaatataacgaaatgatgagttcaataaaagttaatcttccacatttccgagtaggtttgattttatgcaatatcgttcagtcagtagaaaactactagtaaagcagtgtaataacgtgatataatttaagtagaagtaagcaaaaaataaaaggcacccattacgaccggaaggttgtaattacttcacatggttaatagttattacaatataagagataatcaaacaaatacgtgcttgaagcagagcggcgtttctcaaacttctaatcgatataccaatattagctgcaattgcattgtatgcacattatacaagcagtgcacatcattcttaataacaaaaatctactgtgtcaccgctctaacaaacgttgggggtctatcgccaattactactgttttgttatggagattgccgtacttgcttgactactttgatctcaagtgctgctgtaatcgcgtgtcggtgtaatcagtacaaacctacccatacgccccgaaagttatctaaaccgaatagaacgctcgacgctataaaaagagaacagacactgctgtacggactcagtccagaatttacacctaatacagacggcacacggattggaactactcagaatgccgtacagaccagcaagctattacgatgctgatcgcaagatctggagcggagaccaattggaatactacttcgacccacatctgtccatcggagagattatattcaacgagatgcggaggcatccacagctcatcgctcaggttaatgccaaagaaaactgttaaggactgcacatggataacagaaactcacctttcagatctcagctacggagaacacgatattgaccagggcggaacttcaggccaatgcaatgcacattgccagctatatgcgatctttgggcctccttcaaatggatatagtgggcattatagcgaggaataccacccacatttcagcagtggcctatgcctgcttcttcaacggcattgcctttcactcgctcaacatctcatatgaacaaagtacaatcgaaaagctctttagcatcaccaggccaaatatcattttttgtgatggggatgagttcgagaaggtccgatctgccacggcacaactggatgtaaagataatcaccatgcgtaatcatccatcgggttctataaggatcgatcaagtcctgtcaactcccattgagaaaaacttccagccagtacggttggaacagggcaacgatcagactttggccattctctgctcctcaggcacaacgggcattccaaaggctgtgacaataaccaacagcagacagatccttaattccagtcagtaagtaaggtccttgaaatatttgttccataaataatctatcttctcctagttccttaaccaccaatgacgttcaatacagccacagtactctcgactggattacgggtctgcttaccactgtaacatccggggtattcagcaccaagcgtattatagcagataatatcttcgatccggagttcttcatgcgactcgtagaagagcaccagatcacttggataattcaagcgcccgcgcacatggccatgatggtcaactctccctcgttcaccacctccgacttgtcgagcttaaggtactacctttttggaggatcacgggcttcggtagagacacagcatcggatcaggagtcgcctaagcaaggactgcctacactttgcctacggctttacagaactgggcagcatggccgccttgaacttacacttcgatgagaagccgaattcggtgggtcgtttggtggcgggacttaagcttaaagtgatctgtgaaaagggtgaatcccttgggcccgatgaggtgggtgagctgtgcctttggaatggtcaatattgggccgggtactatggcaatccagaggaaacacacaaaatgagagaccaccataactggttccacacaggggacctcggatacgtggatgacgatggctttatatacattgtggagcgcaagaaggacatgcttaagttccagaacatcatgtactatcccaacgaaatcgagagtgtcatctcaaagatgccagacgtggttgaagtctgtgtattcggggtgtggaatgagatcaacggtgatgaggccaccgcggccgtggtcaagaagcggggtagtgctctcacggcccaggacattgtggactatgtggagacccatatcgatgccaagtacaagcagttgaacggaggtgccatcatcgtggaggatctggtgcgcagtcccaatggcaaaaccaaccgcatggcaaacaaagcatttttcttggaggccaaaagttcagcaaaataaaagaatcccgaggttacaatattccaaatttttgtttaatactagttaataatagtccaaaacttaaatatagctagaaaggccaaacatttattgctaaatgtatacatagatatatattttttatttttatagattgcaactaatgagctaataatttaatttaaagggtttcaataagaattcgagattgtttagattagattgtgtaattaattgacttgacattcatacatttattttatgtgcttatctaagacatagataaatgataagtgggccatgagaagcgcatttgcccggtcaaggtcttttcttttatctgactataactcactcaactcgctttagacatttcaaaatgagtttgaatttgtcttatctatctggaaacgccttttagcgagcttttttagcttcggcgattggaagcgataagattggaaggcacggacggcaattgcccggaacttgtcggtcggtcgccagttgctggaaacccgttattcgatccggtcccggattcacgcccggacagaaaatagtttgttgatacccgggctaggcttatcagtcaccgcaatgaatcgctcgaccacgcaattcgataaatacaccaaaatttggagtggaccaaggccggccagtttcttcgatgcggactgttcgattggtaaaattctttttgcctttatgcgaaatcatccgaacagcatatgtcaggtggataaattccttaatcaatacattgtattatatattaagttatgccccgtagatttccgatacggaaggtacagccttaaccaatggcgaagctatcacctttgccattcgcattgcacagcaactgaaggctatgggtctgaaacaggatgatgtggtgggcatcgtggggaccaacactacctaccttatgccagtggtattgggatgtctgctgaatggaacacccttccatgcggttagtccctggcaagacgaggataccataaagcat

SEQ ID NO: 23894 - DNA, 1660 bp, DROSOPHILA
tttacacctaatacagacggcacacggattggaactactcagaatgccgtacagaccagcaagctattacgatgctgatcgcaagatctggagcggagaccaattggaatactacttcgacccacatctgtccatcggagagattatattcaacgagatgcggaggcatccacagctcatcgctcagatctcagctacggagaacacgatattgaccagggcggaacttcaggccaatgcaatgcacattgccagctatatgcgatctttgggcctccttcaaatggatatagtgggcattatagcgaggaataccacccacatttcagcagtggcctatgcctgcttcttcaacggcattgcctttcactcgctcaacatctcatatgaacaaagtacaatcgaaaagctctttagcatcaccaggccaaatatcattttttgtgatggggatgagttcgagaaggtccgatctgccacggcacaactggatgtaaagataatcaccatgcgtaatcatccatcgggttctataaggatcgatcaagtcctgtcaactcccattgagaaaaacttccagccagtacggttggaacagggcaacgatcagactttggccattctctgctcctcaggcacaacgggcattccaaaggctgtgacaataaccaacagcagacagatccttaattccagtcattccttaaccaccaatgacgttcaatacagccacagtactctcgactggattacgggtctgcttaccactgtaacatccggggtattcagcaccaagcgtattatagcagataatatcttcgatccggagttcttcatgcgactcgtagaagagcaccagatcacttggataattcaagcgcccgcgcacatggccatgatggtcaactctccctcgttcaccacctccgacttgtcgagcttaaggtactacctttttggaggatcacgggcttcggtagagacacagcatcggatcaggagtcgcctaagcaaggactgcctacactttgcctacggctttacagaactgggcagcatggccgccttgaacttacacttcgatgagaagccgaattcggtgggtcgtttggtggcgggacttaagcttaaagtgatctgtgaaaagggtgaatcccttgggcccgatgaggtgggtgagctgtgcctttggaatggtcaatattgggccgggtactatggcaatccagaggaaacacacaaaatgagagaccaccataactggttccacacaggggacctcggatacgtggatgacgatggctttatatacattgtggagcgcaagaaggacatgcttaagttccagaacatcatgtactatcccaacgaaatcgagagtgtcatctcaaagatgccagacgtggttgaagtctgtgtattcggggtgtggaatgagatcaacggtgatgaggccaccgcggccgtggtcaagaagcggggtagtgctctcacggcccaggacattgtggactatgtggagacccatatcgatgccaagtacaagcagttgaacggaggtgccatcatcgtggaggatctggtgcgcagtcccaatggcaaaaccaaccgcatggcaaacaaagcatttttcttggaggccaaaagttcagcaaaataa

SEQ ID NO: 23895 - protein, 538 aa, DROSOPHILA
MPYRPASYYDADRKIWSGDQLEYYFDPHLSIGEIIFNEMRRHPQLIAQISATENTILTRAELQANAMHIASYMRSLGLLQMDIVGIIARNTTHISAVAYACFFNGIAFHSLNISYEQSTIEKLFSITRPNIIFCDGDEFEKVRSATAQLDVKIITMRNHPSGSIRIDQVLSTPIEKNFQPVRLEQGNDQTLAILCSSGTTGIPKAVTITNSRQILNSSHSLTTNDVQYSHSTLDWITGLLTTVTSGVFSTKRIIADNIFDPEFFMRLVEEHQITWIIQAPAHMAMMVNSPSFTTSDLSSLRYYLFGGSRASVETQHRIRSRLSKDCLHFAYGFTELGSMAALNLHFDEKPNSVGRLVAGLKLKVICEKGESLGPDEVGELCLWNGQYWAGYYGNPEETHKMRDHHNWFHTGDLGYVDDDGFIYIVERKKDMLKFQNIMYYPNEIESVISKMPDVVEVCVFGVWNEINGDEATAAVVKKRGSALTAQDIVDYVETHIDAKYKQLNGGAIIVEDLVRSPNGKTNRMANKAFFLEAKSSAK

SEQ ID NO: 23896 - DNA, 2955 bp, DROSOPHILA
gacgccgccaagaagtccagcgacgtcttctccaccatcgactctatattccaacgcaagcgtcctgcccagatccagttatgatttgttcctgcgcaatgatcaactactgataactgcctcctgacaatttatttcgagacacacacaacgtttaagcctaaagttatagttgcatccggaaatcctgaacaaacgaaattacctttgcaggtcgactactttccttgtacagatttctaaagtgtatgtgtttgttactttttacatttcactatttgtaactacaatacaatttaataaaaaaatcgaaggaaacaagtacattttacgagacatgactgctttaaactgggctgcgttcgaatgagggatggacgacgccaagttcaaacttccacacaattgttttccggaaagcttctggaatatgatgcggctgactcagtttcgaatcgaggtttttagcgtttgatggatagctactaattgttccgagaactatttattattgcaatcaactttaaagcgactattaaagggtcatgttgcacgggtctcaagtgtaacaaatgagaaattgctaatggaaatcgctaatgagatcgttaaatctggtaaacaaataacatatcgccaagttagcccgtccatcgtggctgcgaatctctcgcagagcgactttcgatcgccgtttagtactcagacgtcacctgcctaatgttaatgtcaatttaagtgtgtataactatcgcacatatattatataaatttataacgacgattgactaatcactgggttgacttttcagcaatagcgattttcgcttcaaagtctaaagtgtgtgcaatcccgtatggatacgagccgagctcgaacacaggctcacagcgcgcggtttgtgttgtgtattacacttgaagttcaatcccaggtaaaaagtgggcccaggtataaaagcccacttcatagaaacatttctcagttagttccagcagctgaattgcttcacatctattcgctccgagtcgccccacaagtcgagccccattgtaagaccaccgcaccgtttatagtttttggagccgatcggctcggctggtcgactggtggctggtagtagtccacacactcatggacgcagccagacgggcaaccagtttcattgtgtataaacagtgacatcttttcagacagcgaatgtgtttcagatacgcatacaaagtggcctgcctggctgtgcattaatttgcatacaaatcccataagtccacagatacattttgcgaatgcagtcgcgctcgatggctagtaaaaatatttttccattgcccagtaaaatcccctgcgcacaaaactggttgcccgaccaacagacccactaagccacaaaagtgctgattaatcgtacaaacatacttaccccaattcgcccgcagaaaactccaagatgaagatgatacttgcgcttgtcgtccttggactggtgctggtcgccgccgaggataagtacaccaccaagtacgacaacatcgacgtcgacgagatcctgaagtcggaccgcctcttcggaaactacttcaagtgcctggtggacaacggaaagtgcaccccggagggccgggagctcaagaagtccctgccggacgccctgaagacggagtgcagcaagtgcagcgagaagcagcgccagaacaccgacaaggtcattcgctacatcatcgaaaacaagcccgaggagtggaagcagctgcaggccaagtacgatcccgatgagatctacatcaagcgctaccgcgccaccgccgaggcctcgggaatcaaggtgtaaggcggatcccggttccggaaactcttggttatatgcactgttaattaggtctacgcttatatctgatcatcaaaattatttctacgatcgtgctcggaataaagagatttgtttttttaccatacacctgccgagtattatatcgttatcgaagggggatttgccaggcttcagagagtatataaattaactatgacaaatgtagcacttaagtctagcctcctgctactagaacgatgattaatctaagcacaattaaggtcttagaaaaaacattcacaagattacgactagaccctaataagcggcttatatatggcgggcgatttgcattaacattgacaataaaggcagctacggttagttggcaaaaacatcgcgtgcttgtcttggttctgagctattacttatattattcttaaaaggggcaatgaatcgaatccgatggccgcaagtaactcagccgtgaaaaccttccttcaaagaacaaacaaacaatgtacagcgaattattaatgtcacggcaattcacattgcgaatcaaaagatattaaatattaaatcagtattttaattacttataaatgtacaaagcttagtataaggttgtgggcagcgtttacgttaatgtttcaccctgggcgacgcacgcctccagatagtctatgcgccgctccaggatcgttagtttttcgttcagcaccgccagacgggagcgacaggacatatctgaaaggatatgatagcacacgatgatacagtttataatgccaacagtgtacataaaccctattaaggatatgggatattttagcaacccaactacctcgcactctttggcttatcatttatcacagtatttagcgtatcttaaattatgcatagagcaaccgaaaaagcttatccaattcatttaggtgactaattcggatagagataaagccgaattttcgttttgagccctccgatgatgttacatacatacatttccatatgtatgtagatacatatattgctatacatatatgccaccacgcacaaaccactgtttgtttctatagacttaagacttgagtaaataaagtcattgtcactgatgaatatttgttagtaatattactta

SEQ ID NO: 23897 - DNA, 568 bp, DROSOPHILA
tgaattgcttcacatctattcgctccgagtcgccccacaagtcgagccccattaaaactccaagatgaagatgatacttgcgcttgtcgtccttggactggtgctggtcgccgccgaggataagtacaccaccaagtacgacaacatcgacgtcgacgagatcctgaagtcggaccgcctcttcggaaactacttcaagtgcctggtggacaacggaaagtgcaccccggagggccgggagctcaagaagtccctgccggacgccctgaagacggagtgcagcaagtgcagcgagaagcagcgccagaacaccgacaaggtcattcgctacatcatcgaaaacaagcccgaggagtggaagcagctgcaggccaagtacgatcccgatgagatctacatcaagcgctaccgcgccaccgccgaggcctcgggaatcaaggtgtaaggcggatcccggttccggaaactcttggttatatgcactgttaattaggtctacgcttatatctgatcatcaaaattatttctacgatcgtgctcggaataaagagatttgtttttttaccat

SEQ ID NO: 23898 - protein, 124 aa, DROSOPHILA
MILALVVLGLVLVAAEDKYTTKYDNIDVDEILKSDRLFGNYFKCLVDNGKCTPEGRELKKSLPDALKTECSKCSEKQRQNTDKVIRYIIENKPEEWKQLQAKYDPDEIYIKRYRATAEASGIKV

SEQ ID NO: 23899 - DNA, 3807 bp, DROSOPHILA
tttatggcaaatcattctgcgttagcgaacttcgttccgatctgcttttatctgactgagaatcatttttatcttgaattacgcggtgactgcgagctgcgttgaattgcatcttcgggatgagcgtattattactgggttgctcttgttaaagcttttttttttaaattgtgatatgacattttttaccactttctttatgaatttggggttacggtatcagctttgttgaaagtttacctttggtaaaccctaaaggcataaaaatgatggcaaactttttatagtaaaccgaagggatgtacagcacattaaaaatttaatttatacacattttccccttttggcatatttgatttaaaaagaaaattgttttgaagatctatgttacgaaagccaatgagatgtcataaaaatgtcgaatgtataacatgtcatgtagatacatataaacgcatataacatggcatgtagatacatttagaagtagatagataacatgtaatgtttaacatgttatgttaacatttatacatagttctgaaaacatgcaagtaggtggcgcatcaccaaattcccgccaatatattttaacatactctaaaaataaaaaaggtatttgattaaaatgaataagcatttttaatttctttcaaaattagtaagctaaaactaaaaaactatttgttttgcagcgcatgtatacgccagagttttaaacagaaacgaatcttagcacttagaattttttgatcttaaaagaccttttacttaatagcaaataactgctgtcgagacctaggtttgataatcatctgattcgccaaacggttttcatcgctgatatcgtgtcaagagaacagcttggcaatcaataggtaaaattaaatatccggacactttaactgctaaattgccggctaatttttccaatttcgttgacctttaaatagacccggcaggcgagtatgcagcagtcataaaacgcgcgtgcatcacgatgttggacctcaatggcaatcccgcgaccagctatgatcccgttcagaaggtctggagtggctgcagccggcacagtctctacaacgaggagctgaccgtgggccagataatcttccggcagctgcagcggcaaccccaaaggatatttcaaatctcgcacacggataatacccggctaacgcggtttcagatgctccaaaatgccgccaagataggttgctatctccgggatcagggtttcaagaaggagacggatttggtgggactcatggcacgcaactctacgcatgtgggtgccttggcctacggttgcttgttcaacggaactccgtttcatgccgttaacccaaatctggaacacaatacaatctctagtctctacaagatcaccaggccacgcatcctgtgctgtgacacggcggactacgaaaagattaaggacataggagcctcgctgggagctctgatcatcaccgttaacgggaaactaccgggtgtaataagtgtggcggatattctgcagaatccccttcccgatgactatgagcccgcccagtttcagcgaggcgtcgatcgcaccatggccatcctctgctcctcgggcaccaccggaactcccaaggcggttaccctctcaaacagccgcaagctattcgaaatgcacaggtggatttacaatttcttaaaatgtttatgcaaatcttgtattggtgtcaccattccttatatgttcatttgtcattgggtatcactaccaaggttaaatctaactgaactactgaactcctcatctttactagtcctgataatcgcatataaataactgctctgctttacattccagctatctgggatccgatgatgttcaatatgctcccagcacattggattggctaacaggactcattaccctggtcacagctgcagtatttggcacagttcgcctgatttccagtgaaatgttcagtacggcacatttcctggacatttgtgagcagcacgaagtctcctggaccatcatggccaattcccatgtggccatgttggccaattgcccaaaaaccagcgctcaaaaactgagaagcctcaagcatctactctttgccggaggtcattgtttggtggcaaccttaaagaagatgcagtccttcctgcacggatcgggtatcctaagaaatgcctatggtttgaccgaggtgggaacactggtatcctataactacgacacccaatccaagcccacatctgtgggccgcctaatggcaaacattcgagtgaaaattgtagactcctcgggacagttgcaaggtcctaaaggattgggtgagatcctctgtcacaatgggcaaccctggagcggttatgtgggaaatcccctggccaccgccgagatgagagattcagcggggtggtaccatactggagatgttggatacttcgatgaggatcactacctgcacatcgtggagcgcaaaaaggacatgctgaaatacctgggcatgatgtactatccccacgaggtcgaggaagtaatcgcccagatgccagacgttgcagaggtttgtgtttttgggatctttcgggagacggagggcgatgccgccgctgcatctgtggtcctgcgatccggtagcaaactggatcccaagcacgtggagcagtatgtgcggaaaaacgtatccgtgcagtttaaacatctccatggcggcgttcagttcgttccacagctggcgaaaagcgccaacggaaaggtcaatcggcaggccgtaaaggcggcctacttgagagatgctacccagtcctaagttcaatttataatccgaatcaacaattagtaagcaaaacccatgatgaagcaaccttggacttccttagcacattagaatgtttcaccattgttattattgttataaaaattaaaatataacgaaatgatgagttcaataaaagttaatcttccacatttccgagtaggtttgattttatgcaatatcgttcagtcagtagaaaactactagtaaagcagtgtaataacgtgatataatttaagtagaagtaagcaaaaaataaaaggcacccattacgaccggaaggttgtaattacttcacatggttaatagttattacaatataagagataatcaaacaaatacgtgcttgaagcagagcggcgtttctcaaacttctaatcgatataccaatattagctgcaattgcattgtatgcacattatacaagcagtgcacatcattcttaataacaaaaatctactgtgtcaccgctctaacaaacgttgggggtctatcgccaattactactgttttgttatggagattgccgtacttgcttgactactttgatctcaagtgctgctgtaatcgcgtgtcggtgtaatcagtacaaacctacccatacgccccgaaagttatctaaaccgaatagaacgctcgacgctataaaaagagaacagacactgctgtacggactcagtccagaatttacacctaatacagacggcacacggattggaactactcagaatgccgtacagaccagcaagctattacgatgctgatcgcaagatctggagcggagaccaattggaatactacttcgacccacatctgtccatcggagagattatattcaacgagatgcggaggcatccacagctcatcgctcaggttaatgccaaagaaaactgttaaggactgcacatggataacagaaactcacctttcagatctcagctacggagaacacgatattgaccagggcggaacttcaggccaatgcaatgcacat

SEQ ID NO: 23900 - DNA, 1629 bp, DROSOPHILA
atgttggacctcaatggcaatcccgcgaccagctatgatcccgttcagaaggtctggagtggctgcagccggcacagtctctacaacgaggagctgaccgtgggccagataatcttccggcagctgcagcggcaaccccaaaggatatttcaaatctcgcacacggataatacccggctaacgcggtttcagatgctccaaaatgccgccaagataggttgctatctccgggatcagggtttcaagaaggagacggatttggtgggactcatggcacgcaactctacgcatgtgggtgccttggcctacggttgcttgttcaacggaactccgtttcatgccgttaacccaaatctggaacacaatacaatctctagtctctacaagatcaccaggccacgcatcctgtgctgtgacacggcggactacgaaaagattaaggacataggagcctcgctgggagctctgatcatcaccgttaacgggaaactaccgggtgtaataagtgtggcggatattctgcagaatccccttcccgatgactatgagcccgcccagtttcagcgaggcgtcgatcgcaccatggccatcctctgctcctcgggcaccaccggaactcccaaggcggttaccctctcaaacagccgcaagctattcgaaatgcacagctatctgggatccgatgatgttcaatatgctcccagcacattggattggctaacaggactcattaccctggtcacagctgcagtatttggcacagttcgcctgatttccagtgaaatgttcagtacggcacatttcctggacatttgtgagcagcacgaagtctcctggaccatcatggccaattcccatgtggccatgttggccaattgcccaaaaaccagcgctcaaaaactgagaagcctcaagcatctactctttgccggaggtcattgtttggtggcaaccttaaagaagatgcagtccttcctgcacggatcgggtatcctaagaaatgcctatggtttgaccgaggtgggaacactggtatcctataactacgacacccaatccaagcccacatctgtgggccgcctaatggcaaacattcgagtgaaaattgtagactcctcgggacagttgcaaggtcctaaaggattgggtgagatcctctgtcacaatgggcaaccctggagcggttatgtgggaaatcccctggccaccgccgagatgagagattcagcggggtggtaccatactggagatgttggatacttcgatgaggatcactacctgcacatcgtggagcgcaaaaaggacatgctgaaatacctgggcatgatgtactatccccacgaggtcgaggaagtaatcgcccagatgccagacgttgcagaggtttgtgtttttgggatctttcgggagacggagggcgatgccgccgctgcatctgtggtcctgcgatccggtagcaaactggatcccaagcacgtggagcagtatgtgcggaaaaacgtatccgtgcagtttaaacatctccatggcggcgttcagttcgttccacagctggcgaaaagcgccaacggaaaggtcaatcggcaggccgtaaaggcggcctacttgagagatgctacccagtcctaa

SEQ ID NO: 23901 - protein, 542 aa, DROSOPHILA
MLDLNGNPATSYDPVQKVWSGCSRHSLYNEELTVGQIIFRQLQRQPQRIFQISHTDNTRLTRFQMLQNAAKIGCYLRDQGFKKETDLVGLMARNSTHVGALAYGCLFNGTPFHAVNPNLEHNTISSLYKITRPRILCCDTADYEKIKDIGASLGALIITVNGKLPGVISVADILQNPLPDDYEPAQFQRGVDRTMAILCSSGTTGTPKAVTLSNSRKLFEMHSYLGSDDVQYAPSTLDWLTGLITLVTAAVFGTVRLISSEMFSTAHFLDICEQHEVSWTIMANSHVAMLANCPKTSAQKLRSLKHLLFAGGHCLVATLKKMQSFLHGSGILRNAYGLTEVGTLVSYNYDTQSKPTSVGRLMANIRVKIVDSSGQLQGPKGLGEILCHNGQPWSGYVGNPLATAEMRDSAGWYHTGDVGYFDEDHYLHIVERKKDMLKYLGMMYYPHEVEEVIAQMPDVAEVCVFGIFRETEGDAAAASVVLRSGSKLDPKHVEQYVRKNVSVQFKHLHGGVQFVPQLAKSANGKVNRQAVKAAYLRDATQS

SEQ ID NO: 23902 - DNA, 2834 bp, DROSOPHILA
ctaagcatagccgaagccactagtttctgcaagtcgtgtggcagtagctcgatgttaccaatcacccgaatgcggatgccatgttcgtccagtcgagcagtctcctccagcaggcgggcaaacttctctctggccaaattgaacagaccctccacctcctcgttggaacgcttgaagttctcgatgctgaaggcaaaggtggtcacctcgcggacgccaacgtccaggcaccagcgcaggcagtccgcaagcttctcgaatccccgcgaatgaccctcgatcttatcaatctgctgtgagcgggcgaacctccgattaccgtccatcacgaaggcgacgtggtgcggaatgtagccacaggcgcgcagcgttcgcatcgctatccgctccgtccatgtgtacttgtagtcggagacccacgacatggtctttgaattcagctggattaagattggatgtcagtcaattaaataaataaatatttatttatttttttgcggtgtcttgtgattagaccgctgccaatcgactattacgctatcgatacttagaaccttttatatagaacgcagtgtgaccatatgcgatatttcggtatttagcatagactccaaccgacacgatgaaaatgtggccgttgtgagatataaatgtaataccattaagcagatacacgaaccaacatcgatagaagagtagcccagacatcaaccgtctacgaaaataagcgcagaaactgcagttattcggttttttttggaagtctttcctctggcgtggcttttaattataatataagtctatctgaaactaataaatgtttcataaaagtgctaaaccaattaaaagacgcacaaaaaagaatgcatttttaaatccacctggggtttgaagccccgacacactccctatcgataagctatcgccaaacatcgcaaaactcagcaaccctgtcattttgacagctacgtcaaccttcttttttgatatccggttaacgcaagtggttcgtctttaatttttccctcttaatttttgcgaaaaaaaacccgactttgagcccctaaacttaaaaaatgtgccttcctccagagtgttcagagcgtcgactgaaaatgacaaacaagctgcccggcagctaatttttttttacattttttgttttgtttgttcgcacgcatttgtttttatttgtgaaacacgtggtataaatgtggaaattcccttgctattcccgcagttgctgatcgacaaacaaacccagaatggcacccaggaaggctaaagttcagaaggaggaggttcaggtccagctgggaccccaagttcgcgacggcgagatcgtgttcggagtggctcacatctacgccagcttcaacgacaccttcgtccatgtcactgatctgtccggccgtgagaccatcgctcgtgtcaccggaggcatgaaggtgaaggccgatcgtgatgaggcttcgccctacgccgctatgttggccgctcaggtgagttgtgcgctctccggtccagttggagcccgtctaacggtttcaattccctccaggatgtggctgagaagtgcaagacactgggcattactgccctgcatattaagctgcgtgccaccggcggcaacaagaccaagacccccggacccggcgcccagtccgctctgcgtgctttggcccgttcgtccatgaagattggccgcatcgaggatgtgacgcccatcccatcggactccacccgcaggaagggcggtcgccgtggtcgtcgtctgtagatggcagtatctggaaagcagtagtctatgtttgcggtcgaaatacaatactgcatttgtgtatgcgataagaaagcttttctgttcgtgtgcataggtgcactgtaataaaccaggaaaatacgatgtaaatgactacaagacatttttgtgtgtgcattgggttcggtttggggtctgcaagtgctgcaatatttgatttataaggacattggcgaaatgtttacaaaaattgcacattacaagccgaagagttgccaccctggcgtgcccaacgcggtggtagcccgattgcgccatcaaagtaactatgcgtcgataactatcgcattaccagctgtgttgtttttgccttctttttttcgcatccggcgcacgcaattggttggttttctgctatttctccctttttttgttcaattttactgcaattgacttatttggcggcaaaagcgaaaagttgctgctaaatatgattcagtgatttagcataaaatgaaaaattttgcggacgccgtgaaagtggtggcgaattaatttgtttctcccccatttttttttgtgttgtttttttttttgtagtgatttgagccggcaaataaacatggtgtttttttctcttttagttgctgatcgacgaccagactctgcagaatggctccaagaaaggctaaagttcagaaggaggaggttcaggtccagctgggaccccaagttcgcgacggcgagatcgtgttcggagtggctcacatctacgccagcttcaacgacaccttcgtccatgtcacggatctgtccggccgtgagaccatcgctcgtgtcaccggaggcatgaaggtgaaggccgatcgtgatgaggcttcgccctacgccgctatgttggccgctcaggtgagttgtgcgctctccggtccagttggagcccgtctaacggtttcaattccctccaggatgtggctgagaagtgcaagacactgggcatcactgccctgcatattaagctgcgtgccaccggcggcaacaagaccaagacccccggacccggcgcccagtc

SEQ ID NO: 23903 - DNA, 775 bp, DROSOPHILA
caagtggttcgtctttaatttttccctcttaatttttgcgaaaaaaaacccgactttgagcccctaaacttaaaaaatgtgccttcctccagagtgttcagagcgtcgactgaaaatgacaaacaagctgcccggcagctaatttttttttacattttttgttttgtttgttcgcacgcatttgtttttatttgtgaaacacgtggtataaatgtggaaattcccttgctattcccgcagttgctgatcgacaaacaaacccagaatggcacccaggaaggctaaagttcagaaggaggaggttcaggtccagctgggaccccaagttcgcgacggcgagatcgtgttcggagtggctcacatctacgccagcttcaacgacaccttcgtccatgtcactgatctgtccggccgtgagaccatcgctcgtgtcaccggaggcatgaaggtgaaggccgatcgtgatgaggcttcgccctacgccgctatgttggccgctcaggatgtggctgagaagtgcaagacactgggcattactgccctgcatattaagctgcgtgccaccggcggcaacaagaccaagacccccggacccggcgcccagtccgctctgcgtgctttggcccgttcgtccatgaagattggccgcatcgaggatgtgacgcccatcccatcggactccacccgcaggaagggcggtcgccgtggtcgtcgtctgtagatggcagtatctggaaagcagtagtctatgtttgcggtcgaaatacaatactgc

SEQ ID NO: 23904 - protein, 151 aa, DROSOPHILA; identical to SEQ ID NO: 1440

SEQ ID NO: 23905 - DNA, 2353 bp, DROSOPHILA
ccaatacaccgattggaactcaggaatcgagacaaaccatgttgcatgttcttggaatcgggttaaattagtaaagaaggtgcatagttagaaacatttcgcagtctctctccaacactctccaatttcacactttaaaacaaacaacttcttgaccaaatagttatgtatttatttcgtcgctctataggagcaacattcaaatttttatgtacaacgtgtacgtgtacggatggtttgactagagatttggaacccaactaactatcgatcgatggctgatcacacctgcttgacatttcaagttcttgtgaaaaaataccgaaaatactgaaaatgtttcgattcgcaattgtctgatgagaacctatacagtgtatattctcttcacagttgatcccagtttatccttggagtccttgtgcaactgatactccagcacgtatatgttgtccatgcgtagaaccttgcgtaaaatgcgtccaatttcaaggactgtagtctgatttcccccgtcagcgttccaaatagagatcttgttcgactttccgcgaatattgaccacaacgccacaaagatcgtccgagtgcttacaggcctctccaatcagacagagcatggcgtccatccagaaactgtccagagccatcttggcgctcttggtcaagttgatgacccagcgtcctccattgacattggcctcatcctcccacatgggtcgaatgcccttcttgaacagggagtagtcactgcccagcataagctcggatgggggcttgatgtgagtgatcaggctccaaaacttctccacggtatcgaagcttgtaaccttgtgcagcatttcttcccaacttttatttcgatcgttctctagataccacagagtccagcagttgttgagtggatgttgaggatcctcgacctccaaaagttcggcgttctccgccgcgatggtcagatcatcatcacatttattgttcagtgacagaaattctagtgaattgtcaaaagcgaccaccgcatcttcttttttggccggtggacatgtgttctgtttaatcctgggctcgagcctcaagctcaaaagcttctgctcggataaccgcattaggaccttctgccctaaaagattttcttgtgtgattatctttccctgcatattcttttcgattagcttcttgtcctgcagatccttgtcgagcacattcttcctatattgtgcactagtcgactgctcctgttcagggctattttctttctgctggaccatctgttttccttggcctttacccttctcattgtcatcatttcccgtcgactttccatctttgcccggattgttgcttcgactgctcttgctcgtctgactgggagtgcgtggcgcattcttttgattcttcttgcccttccggttccccttgccacgtttttggggctctgatggcgacgttttgtttggatcattcatcggttcttgggtcttttctggttgagtatcttcagtggattgaggagctgcagcaggctgggtaacatcagttggtgactccactttttggggaccttgtgtgggatattcattgttgttcgcacagcttttaaacattgttctcggattggcaaagtccctcatcctgtaaaagctgttgggaagcatggcggctttgttcgaggtcagcaacggctgtagagttatacggaaatggcgaggttagcgctatgtttaaacaaacaaatctaacaaaaaaaagggttaatataatggcgatttttgggatctttcattttcgtagcttcctatacaattatatatatgatgaatccacaaagccaagccaaacgctctttctgaacttccgactaatgaggcaaacaagccaacatgccccttttctctaagacgtgagctggaaatttcttctttggaagcacgaaaggaaaaactgaccaagaccaagggacgtgtgcagaagttggcaactttagcaacaaatatttacacaccccccgaactgaatgatttgagtgggtgcaaaaccccaaacacacgggtgtaaggtaacacagcacgcatttcttattagctgggtcaagttgtgcttgccccttggaaataaccgagtaaaagcgtttttcacacgccaaaatctccgatagaaaagattacgatgccttggtatttacgcatcttttaaaatcattaaaaattctctacatttacgatatgcagcggacgaaggaatctttatgtaatggcatcacaaaagtaaaccaccaggagaacaaactttgatttgactctggctgccataagttaaaatggggtcaaaaggactcgaatttatgagtgaga

SEQ ID NO: 23906 - DNA, 353 bp, DROSOPHILA
gcagtcgaagcaacaatccgggcaaagatggaaagtcgacgggaaatgatgacaatgagaagggtaaaggccaaggaaaacagatggtccagcagaaagaaaatagccctgaacaggagcagtcgactagtgcacaatataggaagaatgtgctcgacaaggatctgcaggacaagaagctaatcgaaaagaatatgcagggaaagataatcacacaagaaaatcttttagggcagaaggtcctaatgcggttatccgagcagaagcttttgagcttgaggctcgagcccaggattaaacagaacacatgtccaccggccaaaaaagaagatgcggtggtcgcttttgacaat

SEQ ID NO: 23907 - protein, 51 aa, DROSOPHILA
MESRREMMTMRRVKAKENRWSSRKKIALNRSSRLVHNIGRMCSTRICRTRS

SEQ ID NO: 23908 - DNA, 6756 bp, DROSOPHILA
attgaaactaagagccatgcaggcaccacctccggaacactgtcctggcgtcgagagcgaggaggcgggcaagggaagtgcctgttcgggctgccccaaccaaggactctgcagcgatcccaacaagaaactcgaagatcccggcaaggctttggtggtcgaatccatgaaagatgtcaaacacaagctgctgatcctgtccgggaaaggcggcgttggcaagagcacggtaaccagcttgctaacccgctatctggccagaagtaatccggacagtaacttcggcgtgcttgatatcgacatttgcggtccatcgcaaccgcgtttgatgggcgccctgggggagagtgtccaccagtctgggtacggctggtcacctgtgggaatcgaagacaacgtgtgtctgatgtccatcggatttcttctgggctctgtggacgatgccattatttggcgaggacccaagaagaatggcatgatcaggcagtttctgagcgaggtggactggggaaatctggatctcctgctactggacacaccacctggaacttccgatgagcacctgtctgtggtttcgtacctgaaagacgacgccaacccggagtccctgcgcgccgtgatggtgaccactccacaggaggtgtctctgctggacgtgcgcaaggagatcaacttttgtaaaaagcaaaatatccccattgtgggcgtgatcgagaatatgagcagtttccgttgcggccattgtggaaatagctccgaaatctttccagccaaaaccggaggagccgctgccatgtgcgccgaaatgggaatcccgctgttgggctccctgcctctggatcaacagatatccaaagcctgcgattctggcgaggatttaactgagtttaagaatgtcaccactgaggcgctggaaggaatttgctcaaagattatggccagctttagttaagaataagttaaagaccactcagtttttaaataaaaaaaaagatgcctgtacaattttatgtaacatttattattaagcattgaaaggataataccaattggaaataccgattcacctgaggtcatcaaattacgtctcggtctttaccagaaattagattaccaggcagtttacaacatgcccctttacaggataagaaaacattctacaatattgaagtaggttggagttaaacattaagtatggctggggaagatggcgggcttgctagggacacatccgtggttactcttcccgtggcatctgacggttgagcagcaacctcagtggcggcctgtttcagattttgcgcgagtattgtgtccctcaccgtactttccaagggcggcgcaaatgtggtatccctccccaactcactaatcaagcggactatttgctctgacggcggcgattggctcttcttcgtgggggtatcgtcttggttctcggcagctatcgtgttatccccctcaattgttccacccacgtactggctgttagcgaccactggcgactgagtgggcagcgtaggcggatagttcagcatagtgatggagtccgtacaatcgctgaccttgtatatgcccaccaggaagttggccagctcaaacatgttgacacgaagtgaaacaattatgaactgagcgtttttcgtacgttcctaagtgaacacaacaacaattggctttaaaatgtgaatgtaaggcaagaaagcagagaggtatttaccttgatatagtgacccactatagacacattcttgaaatccagcgccgcatcaatttcatccatgaagtacagcggagagggcttgtaataatgcagggcaaacacaagtgccaatgaggagagagttttctcaccacctgagagattcgagatgtatttccagcttttctttggcggtcgcacagtaaaatttacgccctcggtgaacggatccatggagtccaccagctccagctcagcatcgccgcccagtgtgatcatctggtacatttccttcagttttcttgttataatgctaaagccatccatgaactccttgtaccgtcgcttgcgaacttcttcgtacttgtcgcgcatctcattgcgcttggaggtgatgtcctccagcacacggacgcgatcgaggtagactaagcgcttctcgttgaactcctttatgcaactcaagttgggcttctttgttttcagatcttcctccagcatagtttgcttatattgcaaggcttccagagtctctgcctccagctcttcttcgttgagttctttgagtggcgcttgcggttcagtctctcctggaatctcgttgagcttcaaaggcgccagttgagcctgccatccgggaatgtcattcttcaccttgttcatttttcccgctgcagcttgcagcttagtatctatttcaatgcgctcgatatttcgtttgttctcctccttggtgatctcatctatttctttttttatatcggaggattgtgatttggcgccctcgatggacgcttccgattcctctatttccttttccaactcctccttcttttccttagccttatttcgatcctcattcaacgatttcaatttttcttctgcagcttttatattctcacggagattattattgtttccagtgattttcgttatatttcgatctgctgtggccaagcccacattcaaggaccgcacattggcggccagcttttctatctggctatttaccttcttgatcttggcctccacaggcttgacactttcatttctaagggtatcgtattggttctggatctcttcgatttggctggagacagcctgttcggcgaattgtgcttgttccagctcttgcttcgctgcttctatttgctcctcccgctccttgactgccctttcgtctgttgttttcttgagcattcgctgccgctgcgcctcgcattgcttcaggttgctggccatctgttgttccaaagaagtgatgctcaccgccagccgcttgtactccgcctcgtcacgctgcaagccattcttcagggtttgaatctcgcgctcaagactgccctgctgttcctggcaataattgactcgggcctgtaactcctccgcctgaatctgcatgtcttctaacgccttctgagatatttgcgaactgtcagccgattctgccgtcttggtgcgcacctgggtgcccatttttccgcgtataggacgactgccgccaccagacatggttcccgtcatctcgatcatctcaccacgtaaggtcacaactcggtagcgttccctgccgtaggcgatgcgggtgccctgttctagatcgtcacataccagtgtgttccgtagggcgaaatagaaagcggttcgtacgcggtcatcttcaaccttaaccagatcgtacaaacgaggaacgttttctggtctgcaatagtacgtgaatggtgttaataaccatttccattcattctgttactattacttacgtatttatcctggagttggcctcacgacgatggtgctcaatcttgtccaacgtaataaaggtggctctgcccacgttgtactcctttaaagcgccaatggccgccgatgcggtctcatagttgtccgtaacaatgttgtccaaccgcccgcaggcagtcgaaatagcaatgtcgtacttggcatctatgccacccaaatcacccaggcgtcctagaataccagggatctttccctccatcttcatacgcatgaggaagtctaggaccttgttattggatcgctgagcctgcatgacgctagatctttcattgatctgccggaaaaggtatttataaatagaagaacagtatagaatgtaaataaatgaaccatacctctgttcttagtttgttgcactgcatggataggttgcgttcctctttaaccattttgtccacttccgcggacttgctggcaatttcggtcttcatccgtggaatgctttctttcagctcgtccacccttgttactttctcctccagacttttctgcgactgctcgtacgaactttttagggtttcatatttcctagactcagtggtctctgcctgtttaaggatcttgagctgcgactcgaacacttgaacctctcctttagccgtgttgaccttctccttaaggcccaccagttcgtcactgagcttaaggcgcttctcggtaagcggtgcagtggttttagttaactcggcctgctgcttttcaagctcctcattcagtgtcaccttacttacttccaggctctccaatttcttgttgcaatcctcgatctcgcgctgatttttctccggcaacttgtgcagatcctccagctctttttcgttcttttctatctgggctttgtccttcttgcgctgcttgttcgtgttctccattgtgctctggatctctgtgtaggcactctcaacagtcacaagtcttttcttgatctgttcgcgctttttcactagagcttcgtattctctgaaattacgtaatgtaatgtaatatatagctcagtttgaagttgaagctaggtacttactcaatttcctttcggatgattgtttccttttcggctcgtgattgtttcagggcagcagtgccctcgtcgtgggtttttagctcttccgcacaggcttcatgctcctgggtgtactgctccagcttgctctttttgatgctgatgatcttttggatgtggaaggatttggtgcgcaccagctcattctccttcttcagatagtcgacggcctcattgaacggttgctccagatctttcatctcgcgctcggccagcttgcagcggttgtgcttctctgttcggtcgtctgtgagttgatctacccgttggtttatctgctgcagtgggcgaatgtagcgctgtgttccgacaatatcctccaggtattccaacattccagtttcattttcagtctgcccttttggcttcatcatggcaatggactccacttcgccctgcagaatgaggaagcgattgtgctccagatccacatgatgcttcttaagcagcttagccacatccttgagctgcgcccgtttgtcgttgatctggtagtaggaagagttgtccgacatggcagtgcgttcgataacaatgctggagtcgggcacgtcctcgcatgtgccgtcgcccttgtctacgatctgcttgaagtggacggcgaccgagcagctgcgtaaattgggataactagacgaggagtggatcaaggtggagacacgcttgcaacggatgcgattggcgcggcaaccaaacacaaacatcatggagtcgataacgttgctcttgccactgccattgggtccaatgatggcagtgaagctctggtggaagggacccaattccacttcgcccgcatagctcttgaaattccgatttacaattttcgagatgatcaggcgcggtccggtgctctccatggagcaatgtggcggcaccggaggcggtatgtatatgtcgccgatccgggtgccgccctcctcgtcgtcgaagatcagtgcatcatccagcgcgtccacggcggcgtcctcctcctcctgttgttgctgcgcccgcaattgttgctgagcagttagctgcggtacgcgaaactggccgctctgccgggctccgccagctgccttgggcgtgcccttgctgggacgcgccttctgcatcgtgcgctattctcagtaaattctccgtgtggatttatccaggaaaaatcctcgaattacaaaatcgctttttcgggcgccaatggtaataggacgctatcagcagtgtgaccgtcttgatgtgcccgcaaaatactggcaaggccgttaaataaatcaggcgagttgtcagctctgtagtttgaatttaaattaaaagtcgttacatcgacgctaagaacaaatttcaaatattctaaaacatatatgaaactgatatttgtaaatataatatgaaatattattaattaaatcacaataaaactcaactaagtagttttttcgatgaagttagcaaaataatgaaatacatttatttcatcgtaaagtaaatgaatttcataataagcaagcaaactacttaatttccaaaaaagccgtgtaatagtttggaaattatgaataactcagcgcgctctgcgctccccaaaaacataagcgagacacccactgcgcggagctttctctccgctatccgcaagtcagagaaatgcccaaatatatataatgccttggctgcatctcgcacgactttagtcacaactcgactttggctcggtgcggaaccattttcactggcggtttttccttcggttttccgatcgcgcgcaagattaaagcgctcaaagcaagcagccaaacacaaacgcgagtggcaaagtggaaagcaggctgaaaaatgctctgcccgggggaaaatgcctataatgcaaatggccaaacgggtttcacagtcaaggtcgtcgcttccgcccagcgacgctcgaagccacaaccaacagcgcgaattcccaacgcccaccgcttacccagtttgtgcatctggatgatggtggcgcttatgattatgtcgtcgtcgctggacgccctggtcattggtaattttctccccttttgttcgcttttcgattgggtacgactgaatttatttagtttttggcatgctcatgcgcgcatgcgcacattgggtgtgaaagttgtcgatcgaatcgaaggagttatataacacgaaacgaccagccaagtggggccaagtcgggttgtccacatgcccg

SEQ ID NO: 23909 - DNA, 4505 bp, DROSOPHILA
tcctattaccattggcgcccgaaaaagcgattttgtaattcgaggatttttcctggataaatccacacggagaatttactgagaatagcgcacgatgcagaaggcgcgtcccagcaagggcacgcccaaggcagctggcggagcccggcagagcggccagtttcgcgtaccgcagctaactgctcagcaacaattgcgggcgcagcaacaacaggaggaggaggacgccgccgtggacgcgctggatgatgcactgatcttcgacgacgaggagggcggcacccggatcggcgacatatacataccgcctccggtgccgccacattgctccatggagagcaccggaccgcgcctgatcatctcgaaaattgtaaatcggaatttcaagagctatgcgggcgaagtggaattgggtcccttccaccagagcttcactgccatcattggacccaatggcagtggcaagagcaacgttatcgactccatgatgtttgtgtttggttgccgcgccaatcgcatccgttgcaagcgtgtctccaccttgatccactcctcgtctagttatcccaatttacgcagctgctcggtcgccgtccacttcaagcagatcgtagacaagggcgacggcacatgcgaggacgtgcccgactccagcattgttatcgaacgcactgccatgtcggacaactcttcctactaccagatcaacgacaaacgggcgcagctcaaggatgtggctaagctgcttaagaagcatcatgtggatctggagcacaatcgcttcctcattctgcagggcgaagtggagtccattgccatgatgaagccaaaagggcagactgaaaatgaaactggaatgttggaatacctggaggatattgtcggaacacagcgctacattcgcccactgcagcagataaaccaacgggtagatcaactcacagacgaccgaacagagaagcacaaccgctgcaagctggccgagcgcgagatgaaagatctggagcaaccgttcaatgaggccgtcgactatctgaagaaggagaatgagctggtgcgcaccaaatccttccacatccaaaagatcatcagcatcaaaaagagcaagctggagcagtacacccaggagcatgaagcctgtgcggaagagctaaaaacccacgacgagggcactgctgccctgaaacaatcacgagccgaaaaggaaacaatcatccgaaaggaaattgaagaatacgaagctctagtgaaaaagcgcgaacagatcaagaaaagacttgtgactgttgagagtgcctacacagagatccagagcacaatggagaacacgaacaagcagcgcaagaaggacaaagcccagatagaaaagaacgaaaaagagctggaggatctgcacaagttgccggagaaaaatcagcgcgagatcgaggattgcaacaagaaattggagagcctggaagtaagtaaggtgacactgaatgaggagcttgaaaagcagcaggccgagttaactaaaaccactgcaccgcttaccgagaagcgccttaagctcagtgacgaactggtgggccttaaggagaaggtcaacacggctaaaggagaggttcaagtgttcgagtcgcagctcaagatccttaaacaggcagagaccactgagtctaggaaatatgaaaccctaaaaagttcgtacgagcagtcgcagaaaagtctggaggagaaagtaacaagggtggacgagctgaaagaaagcattccacggatgaagaccgaaattgccagcaagtccgcggaagtggacaaaatggttaaagaggaacgcaacctatccatgcagtgcaacaaactaagaacagagatcaatgaaagatctagcgtcatgcaggctcagcgatccaataacaaggtcctagacttcctcatgcgtatgaagatggagggaaagatccctggtattctaggacgcctgggtgatttgggtggcatagatgccaagtacgacattgctatttcgactgcctgcgggcggttggacaacattgttacggacaactatgagaccgcatcggcggccattggcgctttaaaggagtacaacgtgggcagagccacctttattacgttggacaagattgagcaccatcgtcgtgaggccaactccaggataaatacaccagaaaacgttcctcgtttgtacgatctggttaaggttgaagatgaccgcgtacgaaccgctttctatttcgccctacggaacacactggtatgtgacgatctagaacagggcacccgcatcgcctacggcagggaacgctaccgagttgtgaccttacgtggtgagatgatcgagatgacgggaaccatgtctggtggcggcagtcgtcctatacgcggaaaaatgggcacccaggtgcgcaccaagacggcagaatcggctgacagttcgcaaatatctcagaaggcgttagaagacatgcagattcaggcggaggagttacaggcccgagtcaattattgccaggaacagcagggcagtcttgagcgcgagattcaaaccctgaagaatggcttgcagcgtgacgaggcggagtacaagcggctggcggtgagcatcacttctttggaacaacagatggccagcaacctgaagcaatgcgaggcgcagcggcagcgaatgctcaagaaaacaacagacgaaagggcagtcaaggagcgggaggagcaaatagaagcagcgaagcaagagctggaacaagcacaattcgccgaacaggctgtctccagccaaatcgaagagatccagaaccaatacgatacccttagaaatgaaagtgtcaagcctgtggaggccaagatcaagaaggtaaatagccagatagaaaagctggccgccaatgtgcggtccttgaatgtgggcttggccacagcagatcgaaatataacgaaaatcactggaaacaataataatctccgtgagaatataaaagctgcagaagaaaaattgaaatcgttgaatgaggatcgaaataaggctaaggaaaagaaggaggagttggaaaaggaaatagaggaatcggaagcgtccatcgagggcgccaaatcacaatcctccgatataaaaaaagaaatagatgagatcaccaaggaggagaacaaacgaaatatcgagcgcattgaaatagatactaagctgcaagctgcagcgggaaaaatgaacaaggtgaagaatgacattcccggatggcaggctcaactggcgcctttgaagctcaacgagattccaggagagactgaaccgcaagcgccactcaaagaactcaacgaagaagagctggaggcagagactctggaagccttgcaatataagcaaactatgctggaggaagatctgaaaacaaagaagcccaacttgagttgcataaaggagttcaacgagaagcgcttagtctacctcgatcgcgtccgtgtgctggaggacatcacctccaagcgcaatgagatgcgcgacaagtacgaagaagttcgcaagcgacggtacaaggagttcatggatggctttagcattataacaagaaaactgaaggaaatgtaccagatgatcacactgggcggcgatgctgagctggagctggtggactccatggatccgttcaccgagggcgtaaattttactgtgcgaccgccaaagaaaagctggaaatacatctcgaatctctcaggtggtgagaaaactctctcctcattggcacttgtgtttgccctgcattattacaagccctctccgctgtacttcatggatgaaattgatgcggcgctggatttcaagaatgtgtctatagtgggtcactatatcaaggaacgtacgaaaaacgctcagttcataattgtttcacttcgtgtcaacatgtttgagctggccaacttcctggtgggcatatacaaggtcagcgattgtacggactccatcactatgctgaactatccgcctacgctgcccactcagtcgccagtggtcgctaacagccagtacgtgggtggaacaattgagggggataacacgatagctgccgagaaccaagacgatacccccacgaagaagagccaatcgccgccgtcagagcaaatagtccgcttgattagtgagttggggagggataccacatttgcgccgcccttggaaagtacggtgagggacacaatactcgcgcaaaatctgaaacaggccgccactgaggttgctgctcaaccgtcagatgccacgggaagagtaaccacggatgtgtccctagcaagcccgccatcttccccagccatacttaatgtttaactccaacctacttcaatattgtagaatgttttcttatcctgtaaaggggcatgttgtaaactgcctggtaatctaatttctggtaaagaccgagacgtaatttgatgacctcaggtgaatcggtatttccaattggtattatcctttcaatgcttaataataaatgttacataaaattgta

SEQ ID NO: 23910 - protein, 1409 aa, DROSOPHILA
MQKARPSKGTPKAAGGARQSGQFRVPQLTAQQQLRAQQQQEEEDAAVDALDDALIFDDEEGGTRIGDIYIPPPVPPHCSMESTGPRLIISKIVNRNFKSYAGEVELGPFHQSFTAIIGPNGSGKSNVIDSMMFVFGCRANRIRCKRVSTLIHSSSSYPNLRSCSVAVHFKQIVDKGDGTCEDVPDSSIVIERTAMSDNSSYYQINDKRAQLKDVAKLLKKHHVDLEHNRFLILQGEVESIAMMKPKGQTENETGMLEYLEDIVGTQRYIRPLQQINQRVDQLTDDRTEKHNRCKLAEREMKDLEQPFNEAVDYLKKENELVRTKSFHIQKIISIKKSKLEQYTQEHEACAEELKTHDEGTAALKQSRAEKETIIRKEIEEYEALVKKREQIKKRLVTVESAYTEIQSTMENTNKQRKKDKAQIEKNEKELEDLHKLPEKNQREIEDCNKKLESLEVSKVTLNEELEKQQAELTKTTAPLTEKRLKLSDELVGLKEKVNTAKGEVQVFESQLKILKQAETTESRKYETLKSSYEQSQKSLEEKVTRVDELKESIPRMKTEIASKSAEVDKMVKEERNLSMQCNKLRTEINERSSVMQAQRSNNKVLDFLMRMKMEGKIPGILGRLGDLGGIDAKYDIAISTACGRLDNIVTDNYETASAAIGALKEYNVGRATFITLDKIEHHRREANSRINTPENVPRLYDLVKVEDDRVRTAFYFALRNTLVCDDLEQGTRIAYGRERYRVVTLRGEMIEMTGTMSGGGSRPIRGKMGTQVRTKTAESADSSQISQKALEDMQIQAEELQARVNYCQEQQGSLEREIQTLKNGLQRDEAEYKRLAVSITSLEQQMASNLKQCEAQRQRMLKKTTDERAVKEREEQIEAAKQELEQAQFAEQAVSSQIEEIQNQYDTLRNESVKPVEAKIKKVNSQIEKLAANVRSLNVGLATADRNITKITGNNNNLRENIKAAEEKLKSLNEDRNKAKEKKEELEKEIEESEASIEGAKSQSSDIKKEIDEITKEENKRNIERIEIDTKLQAAAGKMNKVKNDIPGWQAQLAPLKLNEIPGETEPQAPLKELNEEELEAETLEALQYKQTMLEEDLKTKKPNLSCIKEFNEKRLVYLDRVRVLEDITSKRNEMRDKYEEVRKRRYKEFMDGFSIITRKLKEMYQMITLGGDAELELVDSMDPFTEGVNFTVRPPKKSWKYISNLSGGEKTLSSLALVFALHYYKPSPLYFMDEIDAALDFKNVSIVGHYIKERTKNAQFIIVSLRVNMFELANFLVGIYKVSDCTDSITMLNYPPTLPTQSPVVANSQYVGGTIEGDNTIAAENQDDTPTKKSQSPPSEQIVRLISELGRDTTFAPPLESTVRDTILAQNLKQAATEVAAQPSDATGRVTTDVSLASPPSSPAILNV

SEQ ID NO: 23911 - DNA, 3564 bp, DROSOPHILA
ggcagtggacgatggccatgccgccccttccgaagaaccaacccagcggagtatctattagtcagcccgatataccgggagcctcggatattttggtgcagagcatcttcaacatcgatccatcgctgtgtcccaaggggtacatacgcacgggtccacatcacacgtgtcgtaggatagcctaggaagacaagctctgaagatcgatttaaagttcaatatcagaacgtgctacaagctgtgtttttattgatacttaaataaattctatataaatacttgcaattctcacatacatatttaaaaaatacgacacattcggtttatataagtacaggttcattaaagttaatcaactgattgttggcactgatgaaatattgtttaataacattgttatattttatctgtttacgctggttttcggcatcgatctaggtacagttgaaaaccaggcgagcatttcttttccacttgaagaagtagttgtatcgccgtccaagtgatcagatatagccatcttttaagttggagcgccatttccatacaatgcacttcgtacaacaatcgcttcaaaactaatgttctacggcgatcaaaaaagttagcttttatgtagggattttccctgttatgtgtgtgctcttcaagatattgataaaaatgcgcattccatttatttgattagtcaatgtaaccaattacacacagctttgtaattatacaactgtaattcaatattgtagagataacgttttctaaattgatatatttcaagaaaaatgataacgtattgcagcttaattgcattcagctgattaatacaatttgtgatgttcaaaagctgttacagtggtatacgtaagctactacgaagtcatttttttaccgaagagcatgctgaggtaatctctgggaaatttgtacttccaatcttgcataaacaaccttatcagttgaataaaatgccccaaaaattgtatgtctcaattattacacataatgacagatttaatgacacaatgaaatatgtattgtgaacatgaaacagtattaatcagaatttcatttgaatccgaattccctaggcttccttcctgcaacgtcctgccatgagcttgagtccttctgcacacttgggatccaggttgaagagactgcgctgatttaccgactctggacttgcttcctcagcatccgacttgggatctcggttggctccaggcgctgtgctcaattctggtgacagaaaatcatgggtgttgaagaggtcgttgatgttttggtcaacattgtcagaagattgagctcgccctggaataggttggatcacagaagactgcggatgcccgggaatcggttgaattgtctgcgctccgccagatcccgcagtttcgtaatcctggccgggtcgaggctgcaaagtcttgggggactggaaattgaagtcggaaaagtcttcatctgcgcttccgggacgcggttgtatggaattattagaagtaccaggtttccgtccctggtttagacctggttgttgaaactctccagaattctggtctggttgttggaatcctccagaactctggtctggctgccggaatcctccagtactctggcctggctgttggaatcctccagtactctggcctggctgttggaatcccccagtactctggcctggctgttggaatcccccagaactctggcctggttgctggaatcctccagtactctggcctggctgttggaatcctccagaattttggcttggttgccggaaccccccattattttggcctgactgttggaatccgccagcattttcatttggctgttcgaatccaccagggttttggccaggtcgaggctgtagggtatttggatcaccacccggctgctggggttccaatcctcgagggtaggtgggtagctcctcatggctgccagattgttgatgtcctggcgcccttccagatggttgtggtctattgaattcatttcctggctgctgaaaacctggttggcccctgttgaaatctccacccggttgctggaggcctggatgtcccctgttaaaatcacctacagggtagggatattcctgttgtcctctatgaaaaccacctccatgttggtgaaattgactgccaggttgtccttgaactgcaccgacgttcggataatacggttgacgacctcctgatggttgattatctggataatacgaaggaggcggtggaaaacgaccgaagacaaagggaggtggtccaatggatcctgggccatatcctgacccatgtacgtgatgaccatggtggcgatgatggttccttaatagaaaaaaagtattagtgatacaaatattataaaatcataacaatcttattaattaattttaaatactcacggatatccatgtccgccgttttccacgtagtaaggattctggggacgagctgaagtccattgtccactgattaaaaggatcagtgacatagccaaccttatagataagagttgcaaaaacattttcgacacgaaatcgacccaacggcagcgttgaatattcaaaacagactgagcagcgctgtcgagtcgagaacagacgatctaaccgagtttagtatttattatgagccgctgataagccaagttcatgacagcagataaggcatcaaattacatagcagaagagtagggaataactgatgcagctgaatgcaccgggaattgtttgagttagacactgactcacagtgatggccaccaaactaaaattactgcgttttacacgacgctaagtttcccccaatagcgtttctcccacaattgtgatttgggttttctatgggtatttttgtctgcctccgaatcgtttataatagtcaccgaaaaaaccattaatcaatcaaaagttctacacaaatatcactttattggctaacatcaatcttagcgactacagattacgccggctttctgcatcgttttccgaacagctcaaagccaggcttacatttttgggtcgtctccagcaatattcggttgtctataactggcagcacagtggtgttttcattaaccagctcctccgatccgctggtgatctgttctgtgctgtttgtactttccaaacggagtgctattgtggatgcgggttcctcagttgtcgttgtggtcgagtatgtgaatctcgagctggtatcgtcgtcatcctttggaaaaacgatgcgatcgttaccactgggccgtgttctcgcctcggtgaggaggaagaccagcggtaggatgcacagcaccaatggattaatacgtatcaacattatctccgagatgcacgctcgtttgctacgatgaagcttcgatgactgagcgcggaaacaactggctggccatttacattcagattttcattcccagcgaaaccagataaatgatgggagcaaatcgttgggagacaacaataagaatggcaagggagctcataagctctcccatgaaaacaaaacgtaaacaaagcagaagagtagcgttaagcttttcagatatatctcagctagt

SEQ ID NO: 23912 - DNA, 1487 bp, DROSOPHILA
aacgctgccgttgggtcgatttcgtgtcgaaaatgtttttgcaactcttatctataaggttggctatgtcactgatccttttaatcagtggacaatggacttcagctcgtccccagaatccttactacgtggaaaacggcggacatggatatccgaaccatcatcgccaccatggtcatcacgtacatgggtcaggatatggcccaggatccattggaccacctccctttgtcttcggtcgttttccaccgcctccttcgtattatccagataatcaaccatcaggaggtcgtcaaccgtattatccgaacgtcggtgcagttcaaggacaacctggcagtcaatttcaccaacatggaggtggttttcatagaggacaacaggaatatccctaccctgtaggtgattttaacaggggacatccaggcctccagcaaccgggtggagatttcaacaggggccaaccaggttttcagcagccaggaaatgaattcaatagaccacaaccatctggaagggcgccaggacatcaacaatctggcagccatgaggagctacccacctaccctcgaggattggaaccccagcagccgggtggtgatccaaataccctacagcctcgacctggccaaaaccctggtggattcgaacagccaaatgaaaatgctggcggattccaacagtcaggccaaaataatggggggttccggcaaccaagccaaaattctggaggattccaacagccaggccagagtactggaggattccagcaaccaggccagagttctgggggattccaacagccaggccagagtactgggggattccaacagccaggccagagtactggaggattccaacagccaggccagagtactggaggattccggcagccagaccagagttctggaggattccaacaaccagaccagaattctggagagtttcaacaaccaggtctaaaccagggacggaaacctggtacttctaataattccatacaaccgcgtcccggaagcgcagatgaagacttttccgacttcaatttccagtcccccaagactttgcagcctcgacccggccaggattacgaaactgcgggatctggcggagcgcagacaattcaaccgattcccgggcatccgcagtcttctgtgatccaacctattccagggcgagctcaatcttctgacaatgttgaccaaaacatcaacgacctcttcaacacccatgattttctgtcaccagaattgagcacagcgcctggagccaaccgagatcccaagtcggatgctgaggaagcaagtccagagtcggtaaatcagcgcagtctcttcaacctggatcccaagtgtgcagaaggactcaagctcatggcaggacgttgcaggaaggaagcctagggaattcggattcaaatgaaattctgattaatactgtttcatgttcacaatacatatttcattgtgtcattaaatctgtcatta

SEQ ID NO: 23913 - protein, 456 aa, DROSOPHILA
MFLQLLSIRLAMSLILLISGQWTSARPQNPYYVENGGHGYPNHHRHHGHHVHGSGYGPGSIGPPPFVFGRFPPPPSYYPDNQPSGGRQPYYPNVGAVQGQPGSQFHQHGGGFHRGQQEYPYPVGDFNRGHPGLQQPGGDFNRGQPGFQQPGNEFNRPQPSGRAPGHQQSGSHEELPTYPRGLEPQQPGGDPNTLQPRPGQNPGGFEQPNENAGGFQQSGQNNGGFRQPSQNSGGFQQPGQSTGGFQQPGQSSGGFQQPGQSTGGFQQPGQSTGGFQQPGQSTGGFRQPDQSSGGFQQPDQNSGEFQQPGLNQGRKPGTSNNSIQPRPGSADEDFSDFNFQSPKTLQPRPGQDYETAGSGGAQTIQPIPGHPQSSVIQPIPGRAQSSDNVDQNINDLFNTHDFLSPELSTAPGANRDPKSDAEEASPESVNQRSLFNLDPKCAEGLKLMAGRCRKEA

SEQ ID NO: 23914 - DNA, 3658 bp, DROSOPHILA
tctgctctcgcacgaatgagaaatcaaaacaaattgcaaaagaatagagattttctgcctgggttatgtgtatatgttttgacgagcgtgtaccaagcgtatgcgcaccgccacaagcggaataaaaaatatacaaaataatttgctgcactcgcacgcacacacaccagcgcacctccgctgacacacacacccgcaccaactgcaggcattatgcacgccatataaacaattgcgaaaaaattacacttggtttcgtggccctcgacagctacgtcatagcactaaaataatggcgcgctttttcagtgcagccacaaaaagtcgcttataattaaaagaaaatgcaaataatatcaatcaggagaactttgcgacgcccaattccaggtgaactcgagtaactcgatgctcgacggcgtaaacaaacaacattctggatgcaacgaaaatttctctacactttcttttttgcacccaccgaggcacaggcacatcaatattttccattttatatactgcctgggcatcgtgtggccgcactgcgttaaaacgccctgaaacgccacaaaactcacctagtttcaactatcctagtctgaaaagcacgcgctacgtgtttgcaaacatttaggcgtgcgcttggcgtaaatattcccgcgattttctttggaaattaaaaataagttcttctcaaattctttttcagcgacgaaactcggagcagtcgaatcgagatggcattgctgcgataggcagcacggtatcgattgcctgctctttccgcactatcgtttgtcattcgcaacttttcgtgtacgatagttctgttgtatttgttttataatctattaaatttgaagtaattaaattaaacagataggaaactatctataacattattttatttctctaatacttttctagtggactcaaagaagggctcacctattttgaccgaaagttccgcttgcttggaatgtctaacaatatctctactttaatttatcgtctgcaattttagacaaatttctatgcttatgttgagatccggtttgtatctgttaattaggcgcagtaagttgtactttttcgccttggagttgtttgattccagttcatacagcgtcgagagattgaccagcaaactctcgttgagggacttctggggattcaggttgatagcgcgctcgtacagatttatagcatcctttagctttccggcgtagagaaggcacactcccatgttgttcaggatcattgtgttgccggtgtccaggtgcagagctttctggaatatcacataggcctcgggaaagtcgttcttggccacagctattaatcccttatcgaccaagtctctgagatcaggcgcggagtttctacaacaaagcatatcattgaactgaaaatagcgttggttagagtagggccttacatctcccttaatctcctcgagacggcaatcttctgctccgctccaaatatgtcaccaatttgcagataaatgcggccccaagcggagtacaaggatcgccgatcctccttgctcaggttggagcgctttaaaagcgttccctccattatgtcgtctatcatactgaatttcttcatctgcaagaattaaatgggcaatgttacactcatttaaactacagttaagttttcttgaacgtaccatcaatccacagttgatgattgaatgcaaaacccgttcgcatcgcctttgccaaaactcctctgccgccttgttgtgcagacttaaatagtgctccttgatttcccgcgtggtcacatgaagttctgaaagtctgtccagggcgacatggggtttacccagatatatgggcagctctgcaagcaagagccggaaggaaaaacaggctatggatccacttttcccgttgtacatctccggatagaagtcgtagaagacatcggggctggtaagttggccaaaaggttctgcctcggcattcagcagctcaaactcgcccaacttggcaagcagcgcgaggcgcgtgaaccacagttgcagggagtggggcgaatgctttgctggctgaccagatcgcccgtaaccctgaccgtaaatggtcagaagacggcccgtaagattcacggcagtgcgatagcaaccggcgtggattagtgttctcaagccgcgctcgtcctgggtgacatcatcgacgcgaaggatcttgcggtaggacaactcggcctctccgaggtgttgagtcaccgccacgctgatgggatctgcctggaacagtcataaagtgtcagtaagtaaaagtgtcattacctttaaaaagaagtatagaagcattctatacgcaccaagtcagtttgcagatggatgcccggcataataagtttaccgggctcgttttcccgcggcaactcccacagatttcttacgtcgtcaccgacttttatagaatcctctcctgcctcaggtgtctcaacatattcaggaggttggaagaacccgacgaaggtgttggacatcatgtttggggcggaactggtgctactggcgctgctggaactcccttctgttgacaagttgttgcccttgggtttgctggccagctcatcgaagaaactgggcggatcatttgcgaaatattcgcttattttgtgtgacatgtctttctttgatggtttttcgataggctttcagggatgtcactatcgctgctgccacagtaagagctatcggccgcgaatggcgccaatacttcagtggttttaaacaatcttattttgatccgtttaccgtattgcttgctaaaagttcttttcaacgttactattttgcatttgcaaaatttttttacaccgaaattttcataataaacaaaaagtccaagcacaaaaatattcatgtgttatataatgatttttactatctaatatatatatttttttgagaccagacttggaacttgtgctgtggaacttgatttaggattctttatttcctaattttcttaaattttctcttcttaaaaatgtctatatttcatggcgtaacgcagattaaaatgtgttgcgttgaaatatgtggtacataaattttaaatatgattttagtgttaagttttaagattcggttagcgcaaatgactagtttggccaattgtttgtattagtttttacaaaaataatgattagggcaaaggaaaagaaactagcgtttaaccaacatatatattaacatataatcactatatgaacatattgtctctggcttacctatattatatcccttttattcgtaggccagcattttccatttgattagcccataaaaattatagctaagagaaattatccatattgattttccatatgattttcagcgacagtggatataaattatttttcttttacataacccaaatttcccaaataaaatgcacacaaattcatttgttgatctaatgtcatttgtttattattcgagttatacagtacataaagcaaaaattggttaattctagagctaacaaagatggccatttgatggccactttccagttgcctgtgtcctaacatacaaacgcattacactttatttacacaaaaacagcctcctcacatcgcagtttattgcccattgaaaatcgtttcgggataatagcttggagca

SEQ ID NO: 23915 - DNA, 1461 bp, DROSOPHILA
aaagacatgtcacacaaaataagcgaatatttcgcaaatgatccgcccagtttcttcgatgagctggccagcaaacccaagggcaacaacttgtcaacagaagggagttccagcagcgccagtagcaccagttccgccccaaacatgatgtccaacaccttcgtcgggttcttccaacctcctgaatatgttgagacacctgaggcaggagaggattctataaaagtcggtgacgacgtaagaaatctgtgggagttgccgcgggaaaacgagcccggtaaacttattatgccgggcatccatctgcaaactgacttggcagatcccatcagcgtggcggtgactcaacacctcggagaggccgagttgtcctaccgcaagatccttcgcgtcgatgatgtcacccaggacgagcgcggcttgagaacactaatccacgccggttgctatcgcactgccgtgaatcttacgggccgtcttctgaccatttacggtcagggttacgggcgatctggtcagccagcaaagcattcgccccactccctgcaactgtggttcacgcgcctcgcgctgcttgccaagttgggcgagtttgagctgctgaatgccgaggcagaaccttttggccaacttaccagccccgatgtcttctacgacttctatccggagatgtacaacgggaaaagtggatccatagcctgtttttccttccggctcttgcttgcagagctgcccatatatctgggtaaaccccatgtcgccctggacagactttcagaacttcatgtgaccacgcgggaaatcaaggagcactatttaagtctgcacaacaaggcggcagaggagttttggcaaaggcgatgcgaacgggttttgcattcaatcatcaactgtggattgatgatgaagaaattcagtatgatagacgacataatggagggaacgcttttaaagcgctccaacctgagcaaggaggatcggcgatccttgtactccgcttggggccgcatttatctgcaaattggtgacatatttggagcggagcagaagattgccgtctcgaggagattaagggagataaactccgcgcctgatctcagagacttggtcgataagggattaatagctgtggccaagaacgactttcccgaggcctatgtgatattccagaaagctctgcacctggacaccggcaacacaatgatcctgaacaacatgggagtgtgccttctctacgccggaaagctaaaggatgctataaatctgtacgagcgcgctatcaacctgaatccccagaagtccctcaacgagagtttgctggtcaatctctcgacgctgtatgaactggaatcaaacaactccaaggcgaaaaagtacaacttactgcgcctaattaacagatacaaaccggatctcaacataagcatagaaatttgtctaaaattgcagacgataaattaa

SEQ ID NO: 23916 - protein, 484 aa, DROSOPHILA
MSHKISEYFANDPPSFFDELASKPKGNNLSTEGSSSSASSTSSAPNMMSNTFVGFFQPPEYVETPEAGEDSIKVGDDVRNLWELPRENEPGKLIMPGIHLQTDLADPISVAVTQHLGEAELSYRKILRVDDVTQDERGLRTLIHAGCYRTAVNLTGRLLTIYGQGYGRSGQPAKHSPHSLQLWFTRLALLAKLGEFELLNAEAEPFGQLTSPDVFYDFYPEMYNGKSGSIACFSFRLLLAELPIYLGKPHVALDRLSELHVTTREIKEHYLSLHNKAAEEFWQRRCERVLHSIINCGLMMKKFSMIDDIMEGTLLKRSNLSKEDRRSLYSAWGRIYLQIGDIFGAEQKIAVSRRLREINSAPDLRDLVDKGLIAVAKNDFPEAYVIFQKALHLDTGNTMILNNMGVCLLYAGKLKDAINLYERAINLNPQKSLNESLLVNLSTLYELESNNSKAKKYNLLRLINRYKPDLNISIEICLKLQTIN

SEQ ID NO: 23917 - DNA, 3591 bp, DROSOPHILA
atcaacggtgatgaggccaccgcggccgtggtcaagaagcggggtagtgctctcacggcccaggacattgtggactatgtggagacccatatcgatgccaagtacaagcagttgaacggaggtgccatcatcgtggaggatctggtgcgcagtcccaatggcaaaaccaaccgcatggcaaacaaagcatttttcttggaggccaaaagttcagcaaaataaaagaatcccgaggttacaatattccaaatttttgtttaatactagttaataatagtccaaaacttaaatatagctagaaaggccaaacatttattgctaaatgtatacatagatatatattttttatttttatagattgcaactaatgagctaataatttaatttaaagggtttcaataagaattcgagattgtttagattagattgtgtaattaattgacttgacattcatacatttattttatgtgcttatctaagacatagataaatgataagtgggccatgagaagcgcatttgcccggtcaaggtcttttcttttatctgactataactcactcaactcgctttagacatttcaaaatgagtttgaatttgtcttatctatctggaaacgccttttagcgagcttttttagcttcggcgattggaagcgataagattggaaggcacggacggcaattgcccggaacttgtcggtcggtcgccagttgctggaaacccgttattcgatccggtcccggattcacgcccggacagaaaatagtttgttgatacccgggctaggcttatcagtcaccgcaatgaatcgctcgaccacgcaattcgataaatacaccaaaatttggagtggaccaaggccggccagtttcttcgatgcggactgttcgattggtaaaattctttttgcctttatgcgaaatcatccgaacagcatatgtcaggtggataaattccttaatcaatacattgtattatatattaagttatgccccgtagatttccgatacggaaggtacagccttaaccaatggcgaagctatcacctttgccattcgcattgcacagcaactgaaggctatgggtctgaaacaggatgatgtggtgggcatcgtggggaccaacactacctaccttatgccagtggtattgggatgtctgctgaatggaacacccttccatgcggttagtccctggcaagacgaggataccataaagcatctgttctctatcaccaggccaaagttaatcttctgcgacggaaaatgcttccagcgactaagcatcattgccaggatacttaagagtcatgtctacacgctcaaggatcatcgactgggcatgccgcgagtcgaggatttgctggagccaactacagctgagctgtactatgtgtaggtccggcgttaatgcttttagaaactgtcttaatattcctgattcgcatcctacagacccgaaactcttctcctgggaggtgatcataccgtcgctattctctgtacttcgggaactacgggtctgccaaaggccgtttgcattagcaactcagcgtgtctctttgattttgggtaagaaatatggtttaaaaataacccattcataatattcaatccattccagctttgtcactggccaggatgtgctgctctccttcagcaccatcgattggtctgcgggtatgttcaacatgctcttcagttgctgccatggctctacgcggataatcacggatcggccatatacgccggaatatatgatccagctggtggagaagtacaaggtgaccttgttgacagtggtgccgcagcaggtggcctctctgttgaagacgcccacccttaataaacagcgcctagccagcatacgtttcgtcagcgttggcggtggctcctgctatgtggccaatcttctcaagctgcaggaattcctaatcaccgggcagatatcctacggctatgccttgaccgaatgcggaggagtggcggcaaatatgggcgtggcaaagccatcatcggtgggcaggattgtgcccggagtgagggttaagatattggacgaagccggccgaagtctgggacacggagagacgggtgagatcctggtgcacaatggcaaggtgtggaatggctactacgccaatccgaatgaatcgaagcgcatgcaggactaccagggctggttccacaccggagacatgggctacttcgacaacgagaactacctgcatatcgtggagcgaaaggaggatcttctgcgcttccatggtgcccagtattctccccaagaaattgagcaggtcatcgccgagctgccggacgtgatcgaagcctgtgtctttggcctgtggaacgaggtggatggcgatcctgcggcggcggctgtcgtcaaaatacctggcagtcgtctcaccgaaatggatatcgtggaatatgtggccaagcgcctggtggtcgaccacaagcagcttcactgcggcgtcttcttcctgcccgaactgccgaaaactggaagcggcaaggttctacgtcagcaggcacgcgatcaggcactgggtaaaaaatgggccgatcacggcaacggccactaatcttttcatagacataattctgttaggcttaaagacaattagttattaccaacgggtgactcatccattcaagacatcaagaactgccgaaaaaaataaaataaaatacgcacacaaacataagcagacgacattttttgttaccgttggccaacacatttggggctattctttgatatcgacggcttatctccagttgattagcgattgcgtttcaggtgcgatagttcaccattcgctatgtggttcaaggtaatggctccgttgacactttttaaagttcagaatttctgggaaaacatagtgctatgttaatgacaaatacttgagcggttagaaacaattatagacgaaccttagggcgatattaagtttaattaaaaggtgcgggcttgcattggtacctagtttggaatgtttaaacctgataagcaatacctatgttatttgagtggtgggctctgtaattatcagattctataatgaaaaatgaaataaatgtagttgtagacactgatatcccccgcgcaccatctttttgaaataaaaacgtattgcaactgatgttaatcatttcaaggtactttttataatatgcccagttataaagctttaataatttgttgataaaatccggctgctgttgcaaaagcaatattaccgaattacttctatccacattataaaaacaaaagaatttaagaacaaattcatataataaacttcattagcgctttaatcatcttcagtttatataaaaattcgatgctatcaagaacttcatatcacaaaattatcacaacctaatgatcctccgaacgccattacataggacaaagagagattatgcgatcaccttagaactaacagctgaagacatcaacccgccctcgcagcgtcttatgaagtacctaatggtgcacattccagttgaacaaaccctttagtttcagtgatggaacggaataacatcattatttgattgacagtcgggcaaagt

SEQ ID NO: 23918 - DNA, 1479 bp, DROSOPHILA
atttccgatacggaaggtacagccttaaccaatggcgaagctatcacctttgccattcgcattgcacagcaactgaaggctatgggtctgaaacaggatgatgtggtgggcatcgtggggaccaacactacctaccttatgccagtggtattgggatgtctgctgaatggaacacccttccatgcggttagtccctggcaagacgaggataccataaagcatctgttctctatcaccaggccaaagttaatcttctgcgacggaaaatgcttccagcgactaagcatcattgccaggatacttaagagtcatgtctacacgctcaaggatcatcgactgggcatgccgcgagtcgaggatttgctggagccaactacagctgagctgtactatgtacccgaaactcttctcctgggaggtgatcataccgtcgctattctctgtacttcgggaactacgggtctgccaaaggccgtttgcattagcaactcagcgtgtctctttgattttggctttgtcactggccaggatgtgctgctctccttcagcaccatcgattggtctgcgggtatgttcaacatgctcttcagttgctgccatggctctacgcggataatcacggatcggccatatacgccggaatatatgatccagctggtggagaagtacaaggtgaccttgttgacagtggtgccgcagcaggtggcctctctgttgaagacgcccacccttaataaacagcgcctagccagcatacgtttcgtcagcgttggcggtggctcctgctatgtggccaatcttctcaagctgcaggaattcctaatcaccgggcagatatcctacggctatgccttgaccgaatgcggaggagtggcggcaaatatgggcgtggcaaagccatcatcggtgggcaggattgtgcccggagtgagggttaagatattggacgaagccggccgaagtctgggacacggagagacgggtgagatcctggtgcacaatggcaaggtgtggaatggctactacgccaatccgaatgaatcgaagcgcatgcaggactaccagggctggttccacaccggagacatgggctacttcgacaacgagaactacctgcatatcgtggagcgaaaggaggatcttctgcgcttccatggtgcccagtattctccccaagaaattgagcaggtcatcgccgagctgccggacgtgatcgaagcctgtgtctttggcctgtggaacgaggtggatggcgatcctgcggcggcggctgtcgtcaaaatacctggcagtcgtctcaccgaaatggatatcgtggaatatgtggccaagcgcctggtggtcgaccacaagcagcttcactgcggcgtcttcttcctgcccgaactgccgaaaactggaagcggcaaggttctacgtcagcaggcacgcgatcaggcactgggtaaaaaatgggccgatcacggcaacggccactaa

SEQ ID NO: 23919 - protein, 465 aa, DROSOPHILA
MGLKQDDVVGIVGTNTTYLMPVVLGCLLNGTPFHAVSPWQDEDTIKHLFSITRPKLIFCDGKCFQRLSIIARILKSHVYTLKDHRLGMPRVEDLLEPTTAELYYVPETLLLGGDHTVAILCTSGTTGLPKAVCISNSACLFDFGFVTGQDVLLSFSTIDWSAGMFNMLFSCCHGSTRIITDRPYTPEYMIQLVEKYKVTLLTVVPQQVASLLKTPTLNKQRLASIRFVSVGGGSCYVANLLKLQEFLITGQISYGYALTECGGVAANMGVAKPSSVGRIVPGVRVKILDEAGRSLGHGETGEILVHNGKVWNGYYANPNESKRMQDYQGWFHTGDMGYFDNENYLHIVERKEDLLRFHGAQYSPQEIEQVIAELPDVIEACVFGLWNEVDGDPAAAAVVKIPGSRLTEMDIVEYVAKRLVVDHKQLHCGVFFLPELPKTGSGKVLRQQARDQALGKKWADHGNGH

SEQ ID NO: 23920 - DNA, 6870 bp, DROSOPHILA
taataacaggtttgaattgaaagaaactgtttaattaagcgcaaaaatgctttgtgtagttttttgtttatcggtacatacggggtggggatagcatatcggtttagacaataaatttcgacttagacgataattggattctaaaaattttgccgagtgctactttctataaattggctaaattcccttaggtttgatttaagattatgccgggcggagcacctcgaggttttgcctacaagctccttgaagactccacccagatccttaacggatttaaattatttatttattgtgcggtgcctagttatggttttgtttcaattacaaatttggttctctgcgcattcccttcattaaatttccttcactacttacgttagttatcgatttgtacatacgataatttagtattcaaataattgtttgccattttcgtaaaagttaatgtattctagtaagttaatattctcacaaacgattgttaagggcttcacagttcacatgaatgtgttctttatttctcacttcgttttgtgaatggacaaaccattgcgaaataccctgaaacaaggatagagaacagtacccctacccatactatgtatgcattattagagtcttttgttgggtagcttggcccttgtttgttgggtacaatcgtataagataaacagcggccaggccggcatttttatcagctatttcaaattaaatataacatatttacaattaattataccttgcgatgggggcaataccagctgccaaaggccgagcactgtgtacgtttgaaaattaaagctttgacaagaagtacaaaaatgtgtacgtttgaaaattaaagctttgacaagaagtacaaaaatgtgtaacaaaatatttagtgttttaaagcctgttgtttgacccaaacgtaatttaccattcggacaggcatcatttgattaacaccgagcgatgtgtaacgttacaaattaagtttttaaaataagaaattacaaaatattgcgtaatatgtatatgcgttttcctggttccaacgatacattttgaaaacggaattggatagttgtactttttcggaaaaacagaagttgccatccctttggcttccgcgtttgtttaaattaaagcgattatcatccgattacacaaaactaaacctcagaactgggagcatggccgctagtgtggcttcaggcccaattggttttttcttcctcaaatgtaaccctaatttatgctaacagaaagtgcacagatagtatggacaaaatagaaccatgtgtggatagcaagatcccaaaaagaatcaaatctagacggctgagttgatgaccgcttgcgtggatgcggaactactgatgctattggcctggccaaatgcagatcccgctccagcagccgatgtggtagtcgttgccgtaatgctcaccgctgccgctgtggcagatgtcactccatccggatagccgcccgaagcaggagccggtgaaagagacatcgtcgacgaggagggcgaagagcaatcgctttgcacactcattgtgggcgaggcggccaccaaattgctgctactgctggtgttgctgatggtcatcggaaactgtggcggcggattcccggtgggcgtgtgcggggacagtggcgacattgaggacgatgttgtggtcagcgacgggctgctgcttgtgctcgttgtagtggctgtggatgagctgttgctattgactccactgatcgtacaggagttggttgttggagccgtggatgcggcggatgggggcgtcgatggcgattgctggctggaggttaccccagctgctgccgccgcagctgcagcccgctcacgctcccgatctcgttgtggcctgaaggcctcacgcagtgcctccacgcgaatttcattgggtccccatcgcgcgtatccggcgctattttgcaaccacaccacctgtgtgccctgcatgcacttgatcagcacatcagacctggaaattaacggagttaaataagtatgaatgggaaaagcataagtttaactaacttacttttgcaacatgtgctgatagccgtgtctgtactcgtgggccatgcccaataccaccattgaacggcgcttgtacatgctgtcgtccagcttggatatgctcttccactccggcagaaacacaataaagctgagtaaaacaagaacaaattgtattatactcataagcaacatcaaaccgatgtttaatctcacctcagaggctccatggtgtccgtgagcagtttgtcgatgtgcagcaaagaagcctcaatcagctcctcgcaatgaggagggtttacttggaaggaaccggaaacgggcttgaagtcgaggaagggcctgtaaaggtcacacatttcacttagattcagcttattaaaattcactatttggctacataccccctggaaccgaagtaggcatccgtgtcggcaaacgcagagcagtactgtcggaaataggaattgaatggcgaggcgaagcactcgaagcttacaccaaactgcctatgtaggcactcgaacactggcactggcaaggcagcctgggtaagctccgcctcctgggaggaattcagggcattgcccaggaaggtctggtacctcttgagcagacaccatacccggccaatgaacagatcgaacttcttgtcgtcgaaacagttgtggcggtacagctgttccagcttctgtagataggtaaggttgatgtactgagcatctggctggttgatcgtggcgggcgtgtacttgatgatcatgtggtcgcgatcctgtaagtactcgatcgtcggcatccgaggcgatgggacggcaaactgtatgggatagcaccacactttctttagatgtggcggcggcggaggaggcgtgggttccggtattccgtgctccttgagcagctgcgaatggcgctcacggatcttgcgggcatgatcagccgacaagtgatagattttcacgcacaaggtttccacagaactcttgacggtctcaaccaaatgtggctcacattgccgtttaagatgggccaaacggtcctgaaaatcctcgtagctcgcgcccacggtacgcctcagccattgaaatgtgtcctccacattccacttgacgaccttcttggattccgccggcgcggatcgggattctattatctgcttagcggcctctgcgtagcgggaaagctgcttcctggcatcccctgtgaacttgggcttcactatcttgataggtatatccgacatgatctcgcggtacatggagctggagatctccggcatgcaactgctgggcagcagcgggtcgcagccggtgtctatcaccttgcgttccatcagccagcggttgaaggaatctctgggtgcctttatattttctctccgcatgcacagatcttcgtaggttttcagcagcttcatggtgaaggctgcccgtaaagcctctacctcaggatgcggttgcggcagaagtgtcggcggtcgctctacaataacggcattggtgcacacctccaggtcccagggaccggccagaacaaacttcttcattggaggtccgccgcccatatgatgctgattgggatggatgtgcatgtcatccgacggccgccgcttcaggtgatgatgctggtgctgttgctgctggtgcatattggggatgatcggcgtcggaccgcccgcatggcagatgcccaaagggtcggtgagcggatcaaagggtctggtgccgggcatctcccacagcgattcgccggtgactttgttccaatagtatgggcggttttccctcttggaccagaatttccgccatccctggtttaccagctcggcggttagctcctcgccatatccaccgggtcccaaggttggcggaccttgcggtgtatggcccatgctctccagcggtgagggcgcatgtgttttcgtgggcgtcgagggggaggagcaactggccaccggtgaactgcccgctcctacgcccagattgtctggtagaatgggtcccgtgaccgtgggcgctcctgccgtgggtgaaggtgacatgttgttggaggcactcgccgtcaattgatcccaagcactctgtgcggcggaggaggcggacgatgaagatgctctggagggcacgggcgaggatcccatgccaggagtccccgtcgacgcaatcacggaggagagcaagccctccgtccccgcgcccaggttgtgtatgatgctattgttgttgttagctgccatgctgcgaaatatttctgcaagagcaaggtaaacaaaaacaagtgttttcaatcaaagaagagagtgagagcaagacagtgaaaagaaaagataatcaatggccagtgatggcaaattgaattttcggaaaatagctattctcttggttaatatatcttatgatgactaatcggatgttaaatattaatcgatgttatatattaaacaatcaatatatgcatataaaacaatagttatagttgcagtgctaaatactaataacagttgttcaacacgtcttgaacacctatatttctttttagttcagctttattttttgatatttaataccattaaataccatcaatataataccccttaatttcggaaaaaaaaaactacggcttgaagacgtgactatcaccaagtatagtacagcaaagtggcctaattgaacctcttgcatataaaaataattcaaatataggataaaaaaccgccaagtctccctttggctagaaaatatccaaagcgacattgtcacgatggcagataataaagtgagcgcgcaccggaatcgaatcgaagaaaccagaaccaccaccagagagctataactgccgttaatcggccagtcgacaacagccactcagcggagcgagatcgggggcacgctagagtcggacggaatgatgcgtggagatcgtggggagtagtagaaattaacactaaatgttggcctgataaatccaaaaaaaaaaatcagaaggaagcccttggccagaaaacagttaattcgacacccactcaaacgaggctaagaaggcgcgcatgagcgagagagccagagagagcgaacacagctctgctctcgcacgaatgagaaatcaaaacaaattgcaaaagaatagagattttctgcctgggttatgtgtatatgttttgacgagcgtgtaccaagcgtatgcgcaccgccacaagcggaataaaaaatatacaaaataatttgctgcactcgcacgcacacacaccagcgcacctccgctgacacacacacccgcaccaactgcaggcattatgcacgccatataaacaattgcgaaaaaattacacttggtttcgtggccctcgacagctacgtcatagcactaaaataatggcgcgctttttcagtgcagccacaaaaagtcgcttataattaaaagaaaatgcaaataatatcaatcaggagaactttgcgacgcccaattccaggtgaactcgagtaactcgatgctcgacggcgtaaacaaacaacattctggatgcaacgaaaatttctctacactttcttttttgcacccaccgaggcacaggcacatcaatattttccattttatatactgcctgggcatcgtgtggccgcactgcgttaaaacgccctgaaacgccacaaaactcacctagtttcaactatcctagtctgaaaagcacgcgctacgtgtttgcaaacatttaggcgtgcgcttggcgtaaatattcccgcgattttctttggaaattaaaaataagttcttctcaaattctttttcagcgacgaaactcggagcagtcgaatcgagatggcattgctgcgataggcagcacggtatcgattgcctgctctttccgcactatcgtttgtcattcgcaacttttcgtgtacgatagttctgttgtatttgttttataatctattaaatttgaagtaattaaattaaacagataggaaactatctataacattattttatttctctaatacttttctagtggactcaaagaagggctcacctattttgaccgaaagttccgcttgcttggaatgtctaacaatatctctactttaatttatcgtctgcaattttagacaaatttctatgcttatgttgagatccggtttgtatctgttaattaggcgcagtaagttgtactttttcgccttggagttgtttgattccagttcatacagcgtcgagagattgaccagcaaactctcgttgagggacttctggggattcaggttgatagcgcgctcgtacagatttatagcatcctttagctttccggcgtagagaaggcacactcccatgttgttcaggatcattgtgttgccggtgtccaggtgcagagctttctggaatatcacataggcctcgggaaagtcgttcttggccacagctattaatcccttatcgaccaagtctctgagatcaggcgcggagtttctacaacaaagcatatcattgaactgaaaatagcgttggttagagtagggccttacatctcccttaatctcctcgagacggcaatcttctgctccgctccaaatatgtcaccaatttgcagataaatgcggccccaagcggagtacaaggatcgccgatcctccttgctcaggttggagcgctttaaaagcgttccctccattatgtcgtctatcatactgaatttcttcatctgcaagaattaaatgggcaatgttacactcatttaaactacagttaagttttcttgaacgtaccatcaatccacagttgatgattgaatgcaaaacccgttcgcatcgcctttgccaaaactcctctgccgccttgttgtg

SEQ ID NO: 23921 - DNA, 3262 bp, DROSOPHILA
cctatcgcagcaatgccatctcgattcgactgctccgagtttcgtcgctgaaaaagaatttgagaagaacttatttttaatttccaaagaaaatcgcgggaatatttacgccaagcgcacgcctaaatgtttgcaaacacgtagcgcgtgcttttcagactaggatagttgaaactagatggcagctaacaacaacaatagcatcatacacaacctgggcgcggggacggagggcttgctctcctccgtgattgcgtcgacggggactcctggcatgggatcctcgcccgtgccctccagagcatcttcatcgtccgcctcctccgccgcacagagtgcttgggatcaattgacggcgagtgcctccaacaacatgtcaccttcacccacggcaggagcgcccacggtcacgggacccattctaccagacaatctgggcgtaggagcgggcagttcaccggtggccagttgctcctccccctcgacgcccacgaaaacacatgcgccctcaccgctggagagcatgggccatacaccgcaaggtccgccaaccttgggacccggtggatatggcgaggagctaaccgccgagctggtaaaccagggatggcggaaattctggtccaagagggaaaaccgcccatactattggaacaaagtcaccggcgaatcgctgtgggagatgcccggcaccagaccctttgatccgctcaccgaccctttgggcatctgccatgcgggcggtccgacgccgatcatccccaatatgcaccagcagcaacagcaccagcatcatcacctgaagcggcggccgtcggatgacatgcacatccatcccaatcagcatcatatgggcggcggacctccaatgaagaagtttgttctggccggtccctgggacctggaggtgtgcaccaatgccgttattgtagagcgaccgccgacacttctgccgcaaccgcatcctgaggtagaggctttacgggcagccttcaccatgaagctgctgaaaacctacgaagatctgtgcatgcggagagaaaatataaaggcacccagagattccttcaaccgctggctgatggaacgcaaggtgatagacaccggctgcgacccgctgctgcccagcagttgcatgccggagatctccagctccatgtaccgcgagatcatgtcggatatacctatcaagatagtgaagcccaagttcacaggggatgccaggaagcagctttcccgctacgcagaggccgctaagcagataatagaatcccgatccgcgccggcggaatccaagaaggtcgtcaagtggaatgtggaggacacatttcaatggctgaggcgtaccgtgggcgcgagctacgaggattttcaggaccgtttggcccatcttaaacggcaatgtgagccacatttggttgagaccgtcaagagttctgtggaaaccttgtgcgtgaaaatctatcacttgtcggctgatcatgcccgcaagatccgtgagcgccattcgcagctgctcaaggagcacggaataccggaacccacgcctcctccgccgccgccacatctaaagaaagtgtggtgctatcccatacagtttgccgtcccatcgcctcggatgccgacgatcgagtacttacaggatcgcgaccacatgatcatcaagtacacgcccgccacgatcaaccagccagatgctcagtacatcaaccttacctatctacagaagctggaacagctgtaccgccacaactgtttcgacgacaagaagttcgatctgttcattggccgggtatggtgtctgctcaagaggtaccagaccttcctgggcaatgccctgaattcctcccaggaggcggagcttacccaggctgccttgccagtgccagtgttcgagtgcctacataggcagtttggtgtaagcttcgagtgcttcgcctcgccattcaattcctatttccgacagtactgctctgcgtttgccgacacggatgcctacttcggttccagggggcccttcctcgacttcaagcccgtttccggttccttccaagtaaaccctcctcattgcgaggagctgattgaggcttctttgctgcacatcgacaaactgctcacggacaccatggagcctctgagctttattgtgtttctgccggagtggaagagcatatccaagctggacgacagcatgtacaagcgccgttcaatggtggtattgggcatggcccacgagtacagacacggctatcagcacatgttgcaaaagtctgatgtgctgatcaagtgcatgcagggcacacaggtggtgtggttgcaaaatagcgccggatacgcgcgatggggacccaatgaaattcgcgtggaggcactgcgtgaggccttcaggccacaacgagatcgggagcgtgagcgggctgcagctgcggcggcagcagctggggtaacctccagccagcaatcgccatcgacgcccccatccgccgcatccacggctccaacaaccaactcctgtacgatcagtggagtcaatagcaacagctcatccacagccactacaacgagcacaagcagcagcccgtcgctgaccacaacatcgtcctcaatgtcgccactgtccccgcacacgcccaccgggaatccgccgccacagtttccgatgaccatcagcaacaccagcagtagcagcaatttggtggccgcctcgcccacaatgagtgtgcaaagcgattgctcttcgccctcctcgtcgacgatgtctctttcaccggctcctgcttcgggcggctatccggatggagtgacatctgccacagcggcagcggtgagcattacggcaacgactaccacatcggctgctggagcgggatctgcatttggccaggccaatagcatcagtagttccgcatccacgcaagcggtcatcaactcagccgtctagatttgattctttttgggatcttgctatccacacatggttctattttgtccatactatctgtgcactttctgttagcataaattagggttacatttgaggaagaaaaaaccaattgggcctgaagccacactagcggccatgctcccagttctgaggtttagttttgtgtaatcggatgataatcgctttaatttaaacaaacgcggaagccaaagggatggcaacttctgtttttccgaaaaagtacaactatccaattccgttttcaaaatgtatcgttggaaccaggaaaacgcatatacatattacgcaatattttgt

SEQ ID NO: 23922 - protein, 920 aa, DROSOPHILA
MAANNNNSIIHNLGAGTEGLLSSVIASTGTPGMGSSPVPSRASSSSASSAAQSAWDQLTASASNNMSPSPTAGAPTVTGPILPDNLGVGAGSSPVASCSSPSTPTKTHAPSPLESMGHTPQGPPTLGPGGYGEELTAELVNQGWRKFWSKRENRPYYWNKVTGESLWEMPGTRPFDPLTDPLGICHAGGPTPIIPNMHQQQQHQHHHLKRRPSDDMHIHPNQHHMGGGPPMKKFVLAGPWDLEVCTNAVIVERPPTLLPQPHPEVEALRAAFTMKLLKTYEDLCMRRENIKAPRDSFNRWLMERKVIDTGCDPLLPSSCMPEISSSMYREIMSDIPIKIVKPKFTGDARKQLSRYAEAAKQIIESRSAPAESKKVVKWNVEDTFQWLRRTVGASYEDFQDRLAHLKRQCEPHLVETVKSSVETLCVKIYHLSADHARKIRERHSQLLKEHGIPEPTPPPPPPHLKKVWCYPIQFAVPSPRMPTIEYLQDRDHMIIKYTPATINQPDAQYINLTYLQKLEQLYRHNCFDDKKFDLFIGRVWCLLKRYQTFLGNALNSSQEAELTQAALPVPVFECLHRQFGVSFECFASPFNSYFRQYCSAFADTDAYFGSRGPFLDFKPVSGSFQVNPPHCEELIEASLLHIDKLLTDTMEPLSFIVFLPEWKSISKLDDSMYKRRSMVVLGMAHEYRHGYQHMLQKSDVLIKCMQGTQVVWLQNSAGYARWGPNEIRVEALREAFRPQRDRERERAAAAAAAAGVTSSQQSPSTPPSAASTAPTTNSCTISGVNSNSSSTATTTSTSSSPSLTTTSSSMSPLSPHTPTGNPPPQFPMTISNTSSSSNLVAASPTMSVQSDCSSPSSSTMSLSPAPASGGYPDGVTSATAAAVSITATTTTSAAGAGSAFGQANSISSSASTQAVINSAV

SEQ ID NO: 23923 - DNA, 2689 bp, DROSOPHILA
atcttcggccagggaagacgccgcgtaattgccatcgtaaagttggttttgtttatttgcaatcgacagagtctctgaagtctcagtttccggctctgtctcactttctgattcagattcggattcacttcgagaggataactttaaaaggaagctcaagtaaacacattcacttcattcaatatcgcactaagttctaaatctgtggaggttcaatttttaagaatttatagcagtttctaagaccctaagatattcatcccgtcgtagatactataaaatattatttaaaaattattctaagtgtgattcagtttttcagcaccttattatagagcgaatcacttggaatggttatagttgaaaatgggaaaagcttacccattcaaataagtttgtatgcagagatattcattatatccgtttcccgtatagaatatttgattcgttgaaacacttactgatatactaacgaagacgttaccagcagcaagatgtctgcatttgagttcatttataatttttattactaaaatctaagcattatcattaatttcgtaaatctattactaatatttatagatctgataaattttactgggtttccctaatcctttgcagcaaatgctggatcataaaattgtatttgccccagaacgcagaagctggtcaattaagaatcttttgaggaggtgtgttttaaatgtccatatttgtatgtccttatttgtatgtccatatttgtacacatgagaatgaaattatatggacatatgcaaaagcatctttgatatgctaatgatagaacgatttgactaatgcattcaatataattagcgggactattccagaactgggaattttagacgtgcacaaatgacaagagaacaaatattgaattctagaaccactgtgtttaatcgatgctacaaatatttaagtaaatctgggaagtactccattataacaatatttttaatatattttttttttaatttttgttaattaattctcagttgttcccagttttatggcactaatctaggcaatttttcggcaatgatcatttacggtcagagtagtgccctgtggacaaattcgcgttgtttccaggacaatccttggcccaataaccacactagtggcactgctagcattggtggcttccgtatgatcccaaggcgctggcttatctgaactagattcctggccgaaggttatcatcttggactcgctggaaggatgtgcatgatttttcgaaatgctgggcacatcgttcattttaatctcttgtgttgatgagtttccctgtggttcggtcaagtttttcgaatcattggtagtatttgccggtgactcatgcttgttgtcgttagccgtagttctcggtgtgccctttttgatttctttgaggattggtagatttacatttgtggctctagtcacctccgccatttctcgctcgatttccttaagtctggattccagtcggatggctgtggcatttggcttggactccgagggaaacacaaactgatcgctgggcactcgagctgcacgatttgtatccaatgacagacacagccagacaaacaaaaacagcagcttcggccagggaagccgccgcgtaattgccatcgtaaagttggttttgtgtattcgcaatcgaagcccaagtaaacacgttcacactcgccaatatcgctttcgagactgagtctctctcgagcctcagtttccggctctgtctcagtttctgattcagtttcggatccacttcgagaggcagaagtcggggtccgagaggcattagcttgttagttctacaacctgctggcaaatgtgccaatatgtttgcacgctgataaggcctacatggcaccgaattgaaaaccgcttacataatgaagtgaatagtcagcgaatcggcagagcaaccgcaatgcattgcattcaccatcgcgaataatcagattcaaggcaacgatcataagttaatactcgaatgttatctcccttatgaactgatttgaaaatctatttcgaaaaatagtttacttacttcttccaagctttagtaaaaacagtcaagtttgcgtaatgttcaaacatgatttatttggtggaatcaatatagttgattcaacaatgatacaatttgactattagtttttttcactttttaaggccaagtgcattgtccacccctttttacaaatccaaggcgacacttcatcgccgagactggttttaagtcaaatgccaagcacagcaaaaccatcaaagaaagtagtttcgaacaggaatgtcggttgatcagcattgtgaagtctgatttgataactttagaggaagctcaagtaaacacgttcacttgattcaatatcgcactaagctctgtatcgtcgagtctcattttttagaatttatagcagtttctaaatcacaaagatattcttcccgtcgcaagaactataaaatattatttaaaaactattcaaagtatgattcggtttttcagaaccttattattgtgcaaataacttggaatgattatagttttcgcattcaaataagtttgtatgcaaggagatactcgtagagtatactggattcgttgaaacgcatgtaacaaaatataatattttacataccgagcataatataccattaaaaccacacttgttct

SEQ ID NO: 23924 - DNA, 689 bp, DROSOPHILA
tgaacgtgtttacttgggcttcgattgcgaatacacaaaaccaactttacgatggcaattacgcggcggcttccctggccgaagctgctgtttttgtttgtctggctgtgtctgtcattggatacaaatcgtgcagctcgagtgcccagcgatcagtttgtgtttccctcggagtccaagccaaatgccacagccatccgactggaatccagacttaaggaaatcgagcgagaaatggcggaggtgactagagccacaaatgtaaatctaccaatcctcaaagaaatcaaaaagggcacaccgagaactacggctaacgacaacaagcatgagtcaccggcaaatactaccaatgattcgaaaaacttgaccgaaccacagggaaactcatcaacacaagagattaaaatgaacgatgtgcccagcatttcgaaaaatcatgcacatccttccagcgagtccaagatgataaccttcggccaggaatctagttcagataagccagcgccttgggatcatacggaagccaccaatgctagcagtgccactagtgtggttattgggccaaggattgtcctggaaacaacgcgaatttgtccacagggcactactctgaccgtaaatgatcattgccgaaaaattgcctagattagtgccataaaactgggaacaactgagaattaattaac

SEQ ID NO: 23925 - protein, 198 aa, DROSOPHILA
MAITRRLPWPKLLFLFVWLCLSLDTNRAARVPSDQFVFPSESKPNATAIRLESRLKEIEREMAEVTRATNVNLPILKEIKKGTPRTTANDNKHESPANTTNDSKNLTEPQGNSSTQEIKMNDVPSISKNHAHPSSESKMITFGQESSSDKPAPWDHTEATNASSATSVVIGPRIVLETTRICPQGTTLTVNDHCRKIA

SEQ ID NO: 23926 - DNA, 3140 bp, DROSOPHILA
tggggtcacaccactaaagtcagagagtcactcggactggggctgaggtaatcccccaaaaatatattttcgggcagggtcaggtgttatgtaagcccccgcgggcaatcttctttctttctttcttggaagcctaactgtgtcgacaagttcagtcagccacaacaattgaaaggccggccgcagcaataaattagatagtttcgtatgacagttaacaaagggctgcaaatgtgacagatgtgaacaatgcagaggggggggggggggttgagttgataagctgcattggacagcaatcggtgggctgatgatagatctattaactggggaatcgagagcagtcaaaggcgtgggtcaaatttgctcgcacattagcagcgaaatgagccgtgaaaaaggtgttaaataatttcatttcatcgttatggctgtaaccagttgttaatcccctacacttttatgttttccccgtcgcgattcggttatttatgggcttaacgcctgatttttgttaattcccaacccactccgtgcgctttctgggcagtggtggcaggaggggcgaccggcgataccaacatttcatttcacattttttattaaagtgcaagagcagcagcgacattcacttttcattcatttctttgttgtgttgttactttttgaccgacgtctccggttcatgttttgcatgcggtaatcatttttgcatgttatcattcattaattaatggcgttttctgccaaagccaagtctgtagattcaatttttcagttttcgactctttccgtacaatagatacatatgtacatctacatataatgcagtatagatatctaagtaaatattgctaattattatgacctaattgttcagttttcatatttacaattacattcgttttttcattcgaactaagctgttcctacttagtatgctgattaagcacctagatggtcaataccacactgctggtacttcttactcaatgcatattcaattgaataactcgctttcgttttcgtcctctgcaaatatggcagtcatcttgccggtgttcgaaaattgtgaattctccaggtatcctgcgctgtcgagggcgtcaactcctttcagccattggagctcctcgtcctgggactcgtctattgcgcttctctggcttcgattcttcgcagcaagggccggactaaactgcggtttttggcggacaatcggatcgttgtggtggccactggccaagccatggcgtatcaactgattgcgccgcatataatctgctccgcagacggagcatatataggccttacagatactatggacgaagagatgaacatccctgttttcgggccgtccgaagagctttccacagatcggacagccgtagctcttcgcggagccatgggacgccaagtgctttctataatttacaggatggctgaagcgggcactgcaggtgtcgcaaacgaggttccgctcattctggtggaccgtcttcacatgctgatcacactcccgcctctgctggaaacgcttcttgcagcccggttctggacaggagtgcaggtacaccttccgatgaacgttcttcaggtgacactccctattgctgcgctgcacaaagcgcgccggacactcgggacacggatagttccgcacgtcgttgtgggcattcatgtgatccacaagggcgttgtgcttttggaagacccttccacacgcgtcgcaggcatgctccgacgcgggcgtttgctgtccaccctggtatcggtgtgtgggccgatgggcggccaactcctccctggtgaggaatagcgctggacagcgtctgcagacgaaggacggagatcctgcgggcgaaaaagcaaggctggtaaggtgtcgccaagcacaagtttggatcgactggtgtggtagggacttgtgatataaacgcagttatagatctaatgggcttttactgatcaaaaatgcctttgaagtgatgagttttaatttaccgccttgctggtgctggcttctctcattgagttcctcgaactgtagctcttctgtgtttaaggacagctcctcatcctcatatgtatgtggtagtagagccaagatctcggcctctttatattgtacttcagtcatttgagaataatcaaattaaaacacattagtttatgttgttttgatttttacatactcttcacccgaatgtactaacgcctagcagcggcagcacgaaaatggctaacgctagtgtgcaagcactgttaggaatgcctatcgatacctatcgcatttgagtttgagtcaaaatcatttttaaaaattgtgcaataaaacgaccgttactttctgtatattaatcaattgttatgcaatttatttatacgctatgtaaatataatttgttcacaactgttatataattatttagcattttctttctttaatgttttctttgctttgttttgattttaaagcggctgctcaacaattttccgacttcgattcgcgcccattgatcgatctcaatccacattcggcactctaaaaatcacacatttggatgatttctaagtgggtcgcctgttttgctcgtatctgggatctgggggtctttcttttgtgattgtagtacaactacttggcgcgatttggtgaatcttgccccgttttgccccatttgttggcttttagaaatgttaacaaatttacagacttatattgttattacaataattgtgtatttatatatatgtatattagtggatttatttatatatgtatagatgcattatataatatgcactgaaaagtgtcaacaggattgggagctcttcacgcgattcgctgtggaatttgtgggcgggaaatgggaaacggaaatggcagttaaaagaggaaaaccggaaggaaatatcatcttgccttaaccttaggtaaaaaccgatttctctaaaatttttcttactttctcgtttactattcacgtttataatcgtatctgctcgctatccgtctactccctactccctttaatatcatttaatagatggattttgcggtttttgtcagttaaagtacgaaaaagtgcgctagttttcccctccttcactggctaaaacgtgaaaagtctttgctt

SEQ ID NO: 23927 - DNA, 990 bp, DROSOPHILA
atgactgaagtacaatataaagaggccgagatcttggctctactaccacatacatatgaggatgaggagctgtccttaaacacagaagagctacagttcgaggaactcaatgagagaagccagcaccagcaaggcggatctccgtccttcgtctgcagacgctgtccagcgctattcctcaccagggaggagttggccgcccatcggcccacacaccgataccagggtggacagcaaacgcccgcgtcggagcatgcctgcgacgcgtgtggaagggtcttccaaaagcacaacgcccttgtggatcacatgaatgcccacaacgacgtgcggaactatccgtgtcccgagtgtccggcgcgctttgtgcagcgcagcaatagggagtgtcacctgaagaacgttcatcggaaggtgtacctgcactcctgtccagaaccgggctgcaagaagcgtttccagcagaggcgggagtgtgatcagcatgtgaagacggtccaccagaatgagcggaacctcgtttgcgacacctgcagtgcccgcttcagccatcctgtaaattatagaaagcacttggcgtcccatggctccgcgaagagctacggctgtccgatctgtggaaagctcttcggacggcccgaaaacagggatgttcatctcttcgtccatagtatctgtaaggcctatatatgctccgtctgcggagcagattatatgcggcgcaatcagttgatacgccatggcttggccagtggccaccacaacgatccgattgtccgccaaaaaccgcagtttagtccggcccttgctgcgaagaatcgaagccagagaagcgcaatagacgagtcccaggacgaggagctccaatggctgaaaggagttgacgccctcgacagcgcaggatacctggagaattcacaattttcgaacaccggcaagatgactgccatatttgcagaggacgaaaacgaaagcgagttattcaattga

SEQ ID NO: 23928 - protein, 329 aa, DROSOPHILA
MTEVQYKEAEILALLPHTYEDEELSLNTEELQFEELNERSQHQQGGSPSFVCRRCPALFLTREELAAHRPTHRYQGGQQTPASEHACDACGRVFQKHNALVDHMNAHNDVRNYPCPECPARFVQRSNRECHLKNVHRKVYLHSCPEPGCKKRFQQRRECDQHVKTVHQNERNLVCDTCSARFSHPVNYRKHLASHGSAKSYGCPICGKLFGRPENRDVHLFVHSICKAYICSVCGADYMRRNQLIRHGLASGHHNDPIVRQKPQFSPALAAKNRSQRSAIDESQDEELQWLKGVDALDSAGYLENSQFSNTGKMTAIFAEDENESELFN

SEQ ID NO: 23929 - DNA, 2758 bp, DROSOPHILA
gggattcgcaatatgcctactgattttgtgggcatgtagagcgattcaaatcacaaaatggtaaggtcagatgaggcgcaaaagtttttctaatgtttattggcgaactttttcattttttacaacttttgtagaagtttacgtcgtacatttccaaccccccgattgcattctgccttttctgttgttgcctaggatcgtccccggtcattttaaagtttaaattatactaggggggagtctgaggtctgagtggtctggaatccaacgattgtcagcacattaggcctacgaagttgtcgaagaggagtggtgggcagccatacttggaattaaacttttatcgcatcaattccgagagtttttccgcgtttccatggcaaagtttcattgttggagaattttctgatattaatttctttatttaaaatctccctagtcgccgagataaggcgaataaacggtactcacccttctggggataggtgccacttacctgcaagtgaagaaaaatatatgaaaacaagagagaatgctatagtcgagttccccgactatcagatacccgttaatcagctagtgtgattgcgaacgcaaaattttataatttttctgagatatcgatagataattgggaaaaaaatgataaaaaatttaaaaattgcttaaaagtgtgggcgtggccggcttagcggcgtttttagcaaatcgataaaaatttacaagactaaaacattatgaaaaaatatcgaaaaaattttctataatttgggcgtggcagttttatgcggtctaagtgtgtaagaatgggcgatagaaatcgatataaatttacaagactaataaaaatgtgaaaagagatcaacacatctactctgcgagtaacgggtatagttacaatatttggaagttctagctagagaaaacgatattttttagtcagcaatatagtaaagtagtaagggatctacccttcaaagtcttatataactattgtatattttttacagccgcaacatgatttttatgcctgctctaaacttgcttgtgtacaacgtacttgtaggttacataagcatggaaatcaatcgaatcataaatggtaagttctttgtaaggaccatctcctaatcactgaagtctttttagtttctacagcccagacaagtctttggcagaatattcctattatcggccagatgttcgctccgttacaaccggaaaccaattatggagtggagttcggggaaagcatgtgggactttaacctatatgtaaacatcttactgcttctccccgcattttttcaggtaaaagaccacataactcggggaccacattaatgtaccgaattcacaaccagatctatcacatctccttgctggtggcgattgttctcatgtggaactgctaccttcaccagtgtctggctgctttccacctgaagatggtgtggcacttgtggtggagcgacctatgctggagctactacgcttctcttgtccttttcggattcctgttgaccatgctgcactttagtctgattatagcaaccgttatgtatcagatgcagatcgacggagatcccaaacctcggatccagtccgaggctctcccagagcagcagccacatcccgcagaggaaattcaggaacgaatggcaatggcccagaccattaagatctaaaaaatcagacactaaacgacggagcacaggttcagccgcctttaagtgggtcaccatcagtcaggggcttaaccttgccgcatctacaaatacactgggtcggtggttcaactaataaatatgccagaaaacaccagacacacagataccccgcacgcacacaccagcacactaccgcagaccaggacatgtacaaatgaatcgcagctgagggccggtcgagcatcgggaaataaaaccattaaatatttgcggttaaacgcaccaaaaacaaaccgcaaaagtaaatcatatccagagcaggcattggacatggccaagcatccgaggcaaagaatttctcttgcctcacccgaccgtcgtccggcatttgtaggcaaaaatattagattagaaattagaaaggcatggacatgccccggattggattgagattgggcaggcagcagaccagagcgccattaaattggggatgggatgcagggcaggaaactgactgccaacggcctgccaaaaattccaaatggtccatggccaagaagcataaatcattgaaactgacatttcaccatttcactggatttgtatgtatatgccaaaggtttggccaattcttggggaagaaagtgttttttggtggtcgaggaatttgcatagatatccgtcgtttttcccaaggaactactgggacaatcgccctggagtcgaaaatatggatccctgtgtgtcctttataggttccccttttcccttgaactagttcccccccagagagcggagcatatcagagctccgaaacgaaatatcgtcatctctatttcatcttaatctatgctaaaagccagctccctccacttgaagggaatattgattccgtttcatattcggagggatttggcaggatgtgcctaataccgtaaatgggggtcaacttaacctcatagcaagaaatgtcagcaaaatcacgatatctgagccaaggtatttttattgtcttaaacagcctgaaatatatattattaggagcaattattaactttagggaaacggtaagtgagcgcatggtttttg

SEQ ID NO: 23930 - DNA, 658 bp, DROSOPHILA
ttttttacagccgcaacatgatttttatgcctgctctaaacttgcttgtgtacaacgtacttgtaggttacataagcatggaaatcaatcgaatcataaatgtttctacagcccagacaagtctttggcagaatattcctattatcggccagatgttcgctccgttacaaccggaaaccaattatggagtggagttcggggaaagcatgtgggactttaacctatatgtaaacatcttactgcttctccccgcattttttcagatctatcacatctccttgctggtggcgattgttctcatgtggaactgctaccttcaccagtgtctggctgctttccacctgaagatggtgtggcacttgtggtggagcgacctatgctggagctactacgcttctcttgtccttttcggattcctgttgaccatgctgcactttagtctgattatagcaaccgttatgtatcagatgcagatcgacggagatcccaaacctcggatccagtccgaggctctcccagagcagcagccacatcccgcagaggaaattcaggaacgaatggcaatggcccagaccattaagatctaaaaaatcagacactaaacgacggagcacaggttcagccgcctttaagtgggtcaccatcagtcaggggctta

SEQ ID NO: 23931 - protein, 189 aa, DROSOPHILA
MIFMPALNLLVYNVLVGYISMEINRIINVSTAQTSLWQNIPIIGQMFAPLQPETNYGVEFGESMWDFNLYVNILLLLPAFFQIYHISLLVAIVLMWNCYLHQCLAAFHLKMVWHLWWSDLCWSYYASLVLFGFLLTMLHFSLIIATVMYQMQIDGDPKPRIQSEALPEQQPHPAEEIQERMAMAQTIKI

SEQ ID NO: 23932 - DNA, 9358 bp, DROSOPHILA
tgaacattcgtttccattttcttatcgaaccaaatcacaaattaacatagtattaaaagaatttgatgatatctgtcttgttgaaactccattaggcgtaaaaaaggccattcatttaaaattgaagacaaaagattcaaccaataaaaaaataccaattctccaccttaattctaatgataaaaccggcgttaacacaacggaaagaaagatttccattcatgaaaacttctcaaaaacccaaactgtttatattgatgaatgtattgaatctaatgagaaaatgcaactgctcgttaaatgtggatcgaaaaacagtgtgttaaacgacttgtctgattatgaaaacgaatttaaagatgcacgtcaagacgaaaatacaaaactgttatcccctgaactaaaaatgcctaagggtttcgattttcttagcaattggtaaaacctatttaaatctcatagatagtcgaaggagagccgatattttagaacataatttcatttgatttcaaggcaaaacaccaaaacatacacattaatattaatcggtcgtaagtccaaactttatacattacattattaaggattcttttttaacatagacttaataaaataagttatgaatttaatggattgcccaaacctgtttcaattctcacttcaataaggcattcaagctttaaaatttattaatgcatatgttatctcactgtattgttttaatcccttaaatttcatttgaattgttagaaatggtcgagagttatatgagttggaacttgtttgaaacagctctgttttgaattaatttaaattatatcagctaatttattttaatcaattaatccttctgttgtgtaccctctatctgacctcttcgatgtgaacgggtcacagcacttattttaggcagttgtgtaaactgggtattacctaagattgattaatatcgattagtttaagaaaatatcggacatctacctagaagagtctgtcgtgatccaggcgaagtgcgagtgagagcatcgtatagttactttttatttaaattgcgtgtgttaaaatgaattagcacgagtagtgaatgtttttgtgtgcgtaatctttcgaaaacaagcgctttgtcattaaaacgaaaagattgccaacagcccaccacggatagaatgtacggagtaatgcagctaaattgaagtagaataattttaatgtatggttgaagacgtactcagtacgattaaaagcgaaactttctgacataacctaagtgtgcataacctaaatggtcgcaaaaacccaagcgtttagtttcggacatacgcatgtgtgtatcagtgcagaataaattctgttcgcttgtgtatcgtgcattggaaaagtctatatgtacatatgttccagtcaagagttgccacgctttaaatcttttacataatgacaaagcaatagggaatttaaatgtgtcgcatttgctttgaggttttccacaccaacagttaaaatttagtaatagtgtaattaaaaataaagtaagcattttgcatatttgcattagtctatactccacatacctttccattccgtctttaaattttgactaggtggcaatattgcaagcaggaatatctgtatgggtttatttaatacactagtaactgccgtccccatcgtcgaacgtgcgcagaaatttatattcaattacatcgaattataattattgttgagtctaatcagttttcgcattcaagattgttattaatcccagtttattttgtgaaatatgaaaaactataattgattgtcgaatgtgtgtatgttttacaacacatacacactttgtgaactcgtcaaagtggcttgacatgcatacacacaaaaatgcacatatatttacatatatagagaaaatcaacttctcgttcagtaaaggcaaaaattgttgcaaatattcggtgaactattagcgtatacacaagtgttcaattttactataaacgcatattctggcaatagatattaatttctaatttctgtttggtaggttttagttagatctccattttgtgacgttctcagcttttcgcttgtatttctacacatagggtacaagacacgcgaatatactaagtattgtacaatgacttctctacatatgcactagagtactgaaaatgtattcatacaaatgtatatacatgtatatatctatcgcattagtctttttgccaatacttgcatatatacaggttgtgtaaatacattttaaattctaagtttatttgagcataattgcaagtgcgaaattaggaaagggagacataaaatagggtgcttccgtcaatgtctgcctgcccagagttgacaaattcattttacttgtgtacatatgcatatgtatatttatataccattacagagttgtgaatttaattgttttattttttgacatgcattcgtttttcacacaggaatttgtcgttaatgtgggtggggattctgccggttgggcagcagacctggtaggtcagcgatcgcgatgcatatttcatttttaaaattctttatgtacatactaagtatacatgtttaactcctgtcaaatgactcccactcttatatacccatatgtatgtcctcagactttttgaatcgattataaagcttaaatttttatgatttctccttcagaattttaactgatgttatgcagttaaaaatctgtaaagaagatattgattaagcctacgaaaagctgatcagaattaaaaaattttttaagaacaacgaacaatagaaaaactaaaaacaaacgtgcacaacgtaggggtcactagaatctgcatgcttattctcaactgtctagcttttatgtcgaaaacgcttccgctatgtaacatactttagaacaaatctggtataccatataccattttactctattaataatgtgtataaagcataaacgtatcacggtgattaagtttatttatcctgtgtatatacaagaaaataaaaaaagaacttagcaatttgatttagaatgaatattttgtaataaaaataataaatgttttctatatttctacagaacacggaaagaacaaggattcagattaagtcattccttttcgattaaattaaataacttttaaaaattgccataaatgcttatgataatgaagttaaagatcaagtggatgttggaatagtaaggaatgctacttttgaagctgacaatcagttagaacacttgagcactatgcgtgaagcccttttttcccaagatggctggggctgtcagcatgttaaccaggatactaattgggaagttcccagttcgccagaaccagccaataaggatgcacccggtccaccaatgtggaagccaagcattaacaatggtactgatctttgggagtccaatttgagaaacggaggtcagccggccgcacagcaagttccaaagccgtcgtggggtcatacaccatcctctaacttaggtggaacatggggtgaggacgacgatggcgccgatagtagtagtgtgtggactggaggagctgttagcaacgcgggatccggagctgcagtgggagtaaaccaagccggagttaatgtcggtccaggcggtgttgtttcgtctggcggacctcagtggggacaaggtgtcgttggcgtcggacttggatcaactggtaggcctaatatctattagaattaatgaagttaagcgcaaacgatcagataaaggctctagcttttccctcaaaatgtgactaacaatacatgataaaaacataaagtgtagtaattgaagttggagccttatctggggaattacctattctaagttctacagaaacttttatttcattaacccgaaatacttttatatttctgctgttatttaaggaggtaacgggtcaagcaatataactggatcgtctggagtcgcaacaggtagtagcggaaactccagcaacgctggtaacggttggggagaccctcgtgaaatacgccctttgggagttggtggctccatggatattcgaaatgttgaacatcgcggcggtaacggttctggagcaacttcgagcgatccacgagacattcgcatgatcgatccgcgtgaccctattcgaggagatccccgtggaatatctggtcgtcttaatgggacctctgaaatgtggggtcatcatccacaaatgtcccataaccagttgcaaggtatcaacaaaatggttggtcaaagtgtagcaactgccagcaccagtgtcggaacatctggctcgggcatcggtcctggaggtcccggtcctagtacagtatcaggcaatatcccaacacagtgggggcctgctcaaccggtaagcgttggtgtaagtggtcccaaagacatgtcaaaacagataagtggatgggaggaaccatcaccaccgcctcagcgtcgcagtattcctaactacgatgatggtacatcgttgtggggtcagcaaactcgtgttcccgctgcaagcggtcactggaaagacatgactgattcgataggtcgtagtagtcatctcatgcgtggccaaagccaaacgggaggtataggaatagccggcgttggaaatagcaatgttccagtgggagccaatccaagtaatcctataagcagtgtagttggacctcaagcccggattccatctgtgggcggcgtacaacacaaaccagacggcggcgctatgtgggtgcattccggcaatgtaggtggcagaaataatgttgctgctgttactacttggggagatgacactcatagcgttaatgtcggcgctcccagcagtggcagtgtatccagcaacaattgggttgatgacaagtccaactcaaccttggcacaaaactcttggagcgacccggcccctgttggagttagttggggcaataagcaaagcaaaccgccaagcaatagtgcttcatcaggttggagcactgctgcgggcgtggtggatggggttgatctaggatctgagtggaacacgcacggggggattattggaaaatctcagcaacaacaaaaactagcgggacttaacgtgggaatggtgaacgtaattaacgcggagatcattaagcaaagcaagcaatacaggatccttgtcgagaacggctttaaaaaggaagatgtagagcgggcattagtgattgctaatatgaacatcgaagaggcagccgatatgctccgtgccaactcatccctatcaatggatggttggcgtcgacatgatgagtcccttggatcttatgccgaccacaatagttcaacaagcagcggtggatttgctggtcgttacccggtcaacagtggacaaccttcaatgtcctttcctcatgtaagtatcgtggaactaagcataatgaaggtttttcgcctaatgataacaatatcttaaaataaatatatgtaatcactaaattatgtattaaaagcgcgacctcgtactcatgggcacacaaattcttaattagcgacggtcccttccaacaggtggcacatttggcagtaattttaatagaaagttctatgtactcaactataatatgaaagtttgtttaaaatattttgtgaatcaatctactgaatgcttttttgtttgtttgtttgttgcgacatttgcgcgaattggtatgttggttttatcgtaggttaccgtagtttggtattcgtctcgtttgactcttggacattttaagacaatataatataaccgtgaagatttagaaagtgcgggtcctagcaacgcttacgagcgtggttcatgctgtaagcatagcatttgtaattcatttacatttgttaatttatatttatatttataccttttactcgcttagtcaaagggtatagtatattattagaaaagtaagttgcggggtagtgagtggattcaactctgtggagtgtgtatttattatcactgtccaaatccttatatctgtttccgtccgctccactaaagctctctttgaaattgaatttgctttttttcttaaatctgggtgtagtattttcacagccgaactattcgcctgttccacaccttcgtgtaaaaacttttaaatctaaaaaccgaaggatgatatattaaccttaacctttatttgttttgcagaataaccttatgaataacatgggaggtaccgctgttactggaggtaacaacaatacaaacatgacagctttacaggtgcaaaagtatttaaatcaagggcaacatggtgtcgctgttggaccgcaagccgttggtaattcttcagcagtatctgtcggatttggtcagaacacgtctaacgcagcagtggcaggagcagcctctgtaaatatagcagcaaatacaaacaaccaaccgtctggtcagcaaattcgcatgctaggccagcaaattcagttggccattcatagtggtttcatatctagtcagatattgactcaaccgctaactcaaacaacccttaaccttttaaaccaacttcttagcaatattaaggtaatttccatatttaaaaggcagttcatgttacggaattaaaattagtatattagaccggaataaaactgtaacatgaaaaactgccctaatgggacccaacaagtatttgttggttgcgatgcacagactcggaataaagtgcctgaagcagtgtaatcaacaaaaattgtttgagtcctccaatataatttattaaaataattattattatttaataaaaaatactagcccttactgaatttaaaatgtgttctttcagcatctccaggctgcgcagcaatcccttacccgcgggggaaatgtcaatccaatggcagtgaatgtggctatatctaaatacaagcagcaaatccagaatttacagaaccagataaatgcacaacaggctgtgtatgtaaaacagcaaaatatgcaaccaacttcacaacaacaacagccccaacaacagcaacttccttctgttcatctaagtaactcaggcaacgactatttaagaggtcacgatgcaataaataatttgcaaagcaacttttctgagctcaatattaataaggtaaacaaaatctcaagtcgtaagtctgaactattgttttctatctcgacttaatttttggaggcgtttccgtctacgcattttttcagcaagttgaaaaattgaaaactaaataataattaaatttatgtgtgtcatattttatgtgtcacacataaattcttcgcttaaccatattatattaagcaaaaaagggtactattatttattttttcggtttgttacctttttaatcatctataaatattgttaatgtacaatgtttaaataaggatcgggggtattgatggggtttgctatgatttgggcacctctggtgcggtttcccgccttaatgacgtctccggagctacggtgtctttcgaattttaatataaacacaaaactgcacaaattcagtttttcaaatttatatggttgtagggatgttttaacaaatcacttaaatgctttcagccaagtggatatcaaggagcgtccaatcaacaatcccgattaaatcagtggaagcttccagtattagataaggagatcaactctgacagtacggaattttctcgtgccccaggtgcaacgaaacaaaatttgacggccaacacaagcaacataaactctttgggtcttcaaaacgataggtaagataattagataacttcacctttactctcttagttaatacgtatgtataaatctaccaaacagatctaaaaaagatatattctaactttgcttaacttactagcttttcttaatggcatgttgctattgtaattacgcggtgtaaaacatgaaacaaaatgttatagttcgtgggactttatattcgtacatttactcgtcaagtaaaaatatatattaaattcgttaaaaattgctaactaaattgtttctcaccatattaccgcatcaaaatagtttgcatgctagttagtaatttggaagtcttttcttttcgcatccgaaaaagctgagtaacctgatgcgagatacttgattatttggtctactttgtttgtataccctagttggctactacatttgcgactcaatatcagtatatttatagttgatcattatcaacaggcacgtcattctgtccgcccgtcggtcctttccgaaaagttcgttaaaaggaatgtaacaggcagaaggaagcgtttccgaccatataaagtatatatattcttgatcagtttcaatcgccgagtcgatctggacatgtccatctgtccgtatgaacttcgagatctcaagaacttgtattagtcttgtaaatttttatcgatttgcaaaaaaaaaaaaaaaaaaaaaatacggtagcttgtcgaacgagtgtgccgaccacatatttggtttcataatggcaaatctagttgaattggttcagtattttaagacaatatgaagctaactaacataatgtaatttcttatgtgatcatcgtattttatagtacatggtcaactggacgcagtattggtgacggttggcctgatccctcatctgataacgagaataaagactggtctgttgctcagccaacttcagcagcaactgcttacactgatctggtccaagagtttgagccaggcaagccatggaaggtaaaactgttaatttacataaaatgtaaacatatccaagcagaagtttgattttaagggttcacagatcaaaagcatagaagatgatcccagcattacaccaggaagcgttgctagatctccattgtctattaattcgacgccaaaagatgctgacatatttgccaataccggtaaaaattcaccgactgatttaccgccactaagtttatcgtcgtctacatggagttttaatccaaaccaaaattatccgaggtaatattcaaatgtgaaaatatatatcccaaatatcagaatcgattatatttcaatacagtcacagttggtctgacaatagtcaacaatgtaccgccacttcggagctttggacaagcccgctaaataaatcatcgtctcgaggtcccccgccaggattgactgccaattcaaataaatctgcaaatagtaatgcgtcaacgccaacaactattaccggaggtgcgaatggatggttacagcctcgaagtggcggtgttcaaaccacaaacactaattggacaggtggtaacaccacttggggctccagttggttgcttttgaaaaatctaacagcacaggtatgttcaaaatctaaatttttctcaccatacacagttactaatgtatccaattactatttcaat

SEQ ID NO: 23933 - DNA, 3165 bp, DROSOPHILA
tccaggcgaagtgcgagtgagagcatcgtatagttactttttatttaaattgcgtgtgttaaaatgaattagcacgagtagtgaatgtttttgtgtgcgtaatctttcgaaaacaagcgctttgtcattaaaacgaaaagattgccaacagcccaccacggatagaataacacggaaagaacaaggattcagattaagtcattccttttcgattaaattaaataacttttaaaaattgccataaatgcttatgataatgaagttaaagatcaagtggatgttggaatagtaaggaatgctacttttgaagctgacaatcagttagaacacttgagcactatgcgtgaagcccttttttcccaagatggctggggctgtcagcatgttaaccaggatactaattgggaagttcccagttcgccagaaccagccaataaggatgcacccggtccaccaatgtggaagccaagcattaacaatggtactgatctttgggagtccaatttgagaaacggaggtcagccggccgcacagcaagttccaaagccgtcgtggggtcatacaccatcctctaacttaggtggaacatggggtgaggacgacgatggcgccgatagtagtagtgtgtggactggaggagctgttagcaacgcgggatccggagctgcagtgggagtaaaccaagccggagttaatgtcggtccaggcggtgttgtttcgtctggcggacctcagtggggacaaggtgtcgttggcgtcggacttggatcaactggaggtaacgggtcaagcaatataactggatcgtctggagtcgcaacaggtagtagcggaaactccagcaacgctggtaacggttggggagaccctcgtgaaatacgccctttgggagttggtggctccatggatattcgaaatgttgaacatcgcggcggtaacggttctggagcaacttcgagcgatccacgagacattcgcatgatcgatccgcgtgaccctattcgaggagatccccgtggaatatctggtcgtcttaatgggacctctgaaatgtggggtcatcatccacaaatgtcccataaccagttgcaaggtatcaacaaaatggttggtcaaagtgtagcaactgccagcaccagtgtcggaacatctggctcgggcatcggtcctggaggtcccggtcctagtacagtatcaggcaatatcccaacacagtgggggcctgctcaaccggtaagcgttggtgtaagtggtcccaaagacatgtcaaaacagataagtggatgggaggaaccatcaccaccgcctcagcgtcgcagtattcctaactacgatgatggtacatcgttgtggggtcagcaaactcgtgttcccgctgcaagcggtcactggaaagacatgactgattcgataggtcgtagtagtcatctcatgcgtggccaaagccaaacgggaggtataggaatagccggcgttggaaatagcaatgttccagtgggagccaatccaagtaatcctataagcagtgtagttggacctcaagcccggattccatctgtgggcggcgtacaacacaaaccagacggcggcgctatgtgggtgcattccggcaatgtaggtggcagaaataatgttgctgctgttactacttggggagatgacactcatagcgttaatgtcggcgctcccagcagtggcagtgtatccagcaacaattgggttgatgacaagtccaactcaaccttggcacaaaactcttggagcgacccggcccctgttggagttagttggggcaataagcaaagcaaaccgccaagcaatagtgcttcatcaggttggagcactgctgcgggcgtggtggatggggttgatctaggatctgagtggaacacgcacggggggattattggaaaatctcagcaacaacaaaaactagcgggacttaacgtgggaatggtgaacgtaattaacgcggagatcattaagcaaagcaagcaatacaggatccttgtcgagaacggctttaaaaaggaagatgtagagcgggcattagtgattgctaatatgaacatcgaagaggcagccgatatgctccgtgccaactcatccctatcaatggatggttggcgtcgacatgatgagtcccttggatcttatgccgaccacaatagttcaacaagcagcggtggatttgctggtcgttacccggtcaacagtggacaaccttcaatgtcctttcctcataataaccttatgaataacatgggaggtaccgctgttactggaggtaacaacaatacaaacatgacagctttacaggtgcaaaagtatttaaatcaagggcaacatggtgtcgctgttggaccgcaagccgttggtaattcttcagcagtatctgtcggatttggtcagaacacgtctaacgcagcagtggcaggagcagcctctgtaaatatagcagcaaatacaaacaaccaaccgtctggtcagcaaattcgcatgctaggccagcaaattcagttggccattcatagtggtttcatatctagtcagatattgactcaaccgctaactcaaacaacccttaaccttttaaaccaacttcttagcaatattaagcatctccaggctgcgcagcaatcccttacccgcgggggaaatgtcaatccaatggcagtgaatgtggctatatctaaatacaagcagcaaatccagaatttacagaaccagataaatgcacaacaggctgtgtatgtaaaacagcaaaatatgcaaccaacttcacaacaacaacagccccaacaacagcaacttccttctgttcatctaagtaactcaggcaacgactatttaagaggtcacgatgcaataaataatttgcaaagcaacttttctgagctcaatattaataagccaagtggatatcaaggagcgtccaatcaacaatcccgattaaatcagtggaagcttccagtattagataaggagatcaactctgacagtacggaattttctcgtgccccaggtgcaacgaaacaaaatttgacggccaacacaagcaacataaactctttgggtcttcaaaacgatagtttcaatcgccgagtcgatctggacatgtccatctgtccgtatgaacttcgagatctcaagaacttgtattag

SEQ ID NO: 23934 - protein, 941 aa, DROSOPHILA
MREALFSQDGWGCQHVNQDTNWEVPSSPEPANKDAPGPPMWKPSINNGTDLWESNLRNGGQPAAQQVPKPSWGHTPSSNLGGTWGEDDDGADSSSVWTGGAVSNAGSGAAVGVNQAGVNVGPGGVVSSGGPQWGQGVVGVGLGSTGGNGSSNITGSSGVATGSSGNSSNAGNGWGDPREIRPLGVGGSMDIRNVEHRGGNGSGATSSDPRDIRMIDPRDPIRGDPRGISGRLNGTSEMWGHHPQMSHNQLQGINKMVGQSVATASTSVGTSGSGIGPGGPGPSTVSGNIPTQWGPAQPVSVGVSGPKDMSKQISGWEEPSPPPQRRSIPNYDDGTSLWGQQTRVPAASGHWKDMTDSIGRSSHLMRGQSQTGGIGIAGVGNSNVPVGANPSNPISSVVGPQARIPSVGGVQHKPDGGAMWVHSGNVGGRNNVAAVTTWGDDTHSVNVGAPSSGSVSSNNWVDDKSNSTLAQNSWSDPAPVGVSWGNKQSKPPSNSASSGWSTAAGVVDGVDLGSEWNTHGGIIGKSQQQQKLAGLNVGMVNVINAEIIKQSKQYRILVENGFKKEDVERALVIANMNIEEAADMLRANSSLSMDGWRRHDESLGSYADHNSSTSSGGFAGRYPVNSGQPSMSFPHNNLMNNMGGTAVTGGNNNTNMTALQVQKYLNQGQHGVAVGPQAVGNSSAVSVGFGQNTSNAAVAGAASVNIAANTNNQPSGQQIRMLGQQIQLAIHSGFISSQILTQPLTQTTLNLLNQLLSNIKHLQAAQQSLTRGGNVNPMAVNVAISKYKQQIQNLQNQINAQQAVYVKQQNMQPTSQQQQPQQQQLPSVHLSNSGNDYLRGHDAINNLQSNFSELNINKPSGYQGASNQQSRLNQWKLPVLDKEINSDSTEFSRAPGATKQNLTANTSNINSLGLQNDSFNRRVDLDMSICPYELRDLKNLY

SEQ ID NO: 23935 - DNA, 4783 bp, DROSOPHILA
aataaacgggagcttagctctagaatctagccaatcttgactgcttcttctgttagaatggctttaatttatataatttcaaccgcacactggcagattcactgggtacgttgccccttttattggacatttgttcaatagcgccgacttgcttctcggtcgcttttttgtagcattaatgataaaagacaaacaagcatactcgcttatcaatgcgtgggggtgggggtggttgtgtgtgggttaaaaaatcgagtggctgtaaaaggagtaccaaactcaaacttgcttcgccgcaagactttttatttaaaacaaaaaataggtaaacaacataacggcatacagagaaaacacacactgcactcacacacacacacgaagaacgagtgcttcgaaggttttcgttttcgatgccttgcacgacgccgtcaattcgctttgaagccctcgcacagctcgaatctttagtccccgatccaccgcacaaatcggttcggctttacatgttcattcgcacaagaacttctgggcctaaaacacgagaacaacgaaaacacggggaaaaaacgcagttctgctagagctggaaataaaatcgatgcctatcgaatactatcgatgatggcagagaggtggcaaaaatcgaatacttgtccatgtacacctgcagccctgattcgtttctcggcaaagtgcttagccgctgctcgaaccaaaaaatgcactatgcaaaattttgagcaccaataattattttctcaacagatggctctactgttcctcttcgaaataattaaaattgctatgcactttatttaaccatttacaatggcctacaaatgctatttttataagaaaaaataaagacttcaatatactatactatagctaagaattaaagctaaaatacaattacaatctagtatattgatactatagctaagaattaaagctaaaatacaattaagatctttatggaagaaggtgtacccaaggctcatctgcccttgaagaacctagccgtgcgtccttgcacggctccaaagcctccattcgcggcgttcgcctccacgatgtggcgggaaatccacttcggcagtttgccgcgtatcttcggatccgcaaaacgcttatccagcagatatacgcaggcatagtccttgatgtggcgcactgcccgtcctatgcactggttgacagcctttacgcagagattctcgtagtattcgttgcctgcgcccggtcccagtttctcgtccaggtgctgcattcgctggcgcagctccggcgacaggctgttggaatacggcaggcccactacgagcactgctctgcccagatcgtcagcgaagttcaggccttcggagagctttcctcccacgacactcaggaggagggctccatacgaagcaggtctcttaatggccagcgcatagttgtccaggagctgctcggccgatccggagacctcacgaaacacgcttttcctgccgctaatcgtctcgagggtgccggactgctccaggtacttgtagaccttgtctaaatactcgtaggacggcaggaagcaaactactccgcccggcaccacttggcacagattccgaagaatcattgagagctcccggagctgcagtggagccatcaataagggagcaaatatggaagacatatcaaaagggactcaccatttctgcactgcctctatgagcaaacttaaaagacagcggagcaccgctggggccattggatatcacaaagggcaagatcgcgtcattcgccaccacgtggttgtagaaacgctcgaccaaacgatcatggcaaccggtaaatagctgctccttcagctccttagtgggctgcatggttccgccagcgatcacaatctatcgagcattgcactgtgattaaaaggtgcatacatatatagcatggatttgcgtagcttaccgctctggcttctgcaacgatgtcggcgaattgctcggcggggtcgaggagtatgtacttcaaggttccccccacgggatccaccaaaattctgccatcctcagcattgctggtgagggtttccagaaatgccagcaatggtctgattggcgaaggagctacttcctcgaccggcttcttcgttggcttctgctgttcttgcaactcctccgctttatcttccttattgatgtcttccactcttcttttgaccgacttggttttctctttcagcttttgctcgcttgccaatctttggaggatcagactcctcgccgttgacacaggagcttgattctcactcggccgtggttcccgctccattctgtctgcacgtccctgtactttcctcgcgaaacgagtgcgagcgcaaaagtccagaagctcgcacagatcgatgttgaagaagtcaccctcggcggttagctcataggtgcgcatcatgctgcagccgttggactgcaattccttgcgctgatctagaatcttaagcaatcggcgaattatgaagatgatttggttgattttcaggagattcttggtggtgaaacgcttttggaagtggtccttatagccggagatctgcaccttggcccgctccaactgctgacggctgatttcggagccgtgcagctgggccacgctgtccagtaggttgtgagcctcatctactatgacgattgaccccttaagacttatacccagctggttacgggcggacttctggagcagcagttgatacggcagtagtataagttgagcgtgctccacagcggatcttgaggcgtaatacgagcagccaccgcaggcggtcccctcattggccagctcctcgatgtccagcggttcggtcaaagccaaatccctgagggattccaccagggaagccgctttaaacgggcatctactgttggcctctgcagttagccgactttttttgctgggattggggcgtgctttcttggtagccatatccaggcaccgctcgttcatcaggccgacatgcttcagcttccggactgcgggattcccgcacagctgctgccgcgagcccagggaaatggaccttaccgactggccatgaggtgttttccgcagttcggccacaatttgtgccaactgcgaatgggtgcggctgcaaaagaagatttgcacagggcgatagcggtcttcggctgcttcctgcggtccatcggcggtttcgtgttctgaatccgagtcggattcaggatccaggtccttctccagttcctcaagcttgcctgggtgcacccttccttgccgcttatgctttttagcccctttcctgatctgatccagctgctgctcttgtttgtccagcaaagcctgcaggtgctgcaatctaaggagctccgcccgctgtgctctggactttccctggctctccagccagttactggactgctcgctctcctccttgagtttagccaactcctgttctactccgcgaatcctggccagcatttccgtgcgcaccagctcctcgtgcctagccagccaggtgagggcgccgcaggtgagggtgagggacttccccgttcccgttggactctcgaatatgcccacctgacctctctcgagcacttggaagagctcctgcatcagctgctcctggatttcgtacggtgagtacgggaatccgaactcctgggcgccgggcgtgtccagccgctggttgggcgtgtactgggacattttcgagatgttttatatccttattttacatttttgcgtcaaaagaggcagaaattgcaaaatgccaagacaaaacgacgcgccaagaagaagaagaacaaaaatgggctaacgcgttggcgaggcatattcaagtaagtgatggaacatgatggcggcaatgaatacgatatttaaaacttttgcgccgttacgcttaaaaacatcttaagtgaatgcttaaaaacaaatggaatcataagttcagctaataatatctttaaacgtatttaaatgctgtactcttgtcaaaaatcttaagattcgtgaaacgatatatttaaagccaccgataaccggcatcgatagcgcctgcgttgtcactaaaaaatactgcggtccgcatagccgccaaaattcataaattacaacagcaacaagtggcaagtagaagaacgaagcaaaaaaagtgaaaccgagaacaaaaagcgcaaaatgtggatacctgctgtgagtaatggttgaaaagtatagtacacatgcaaattgaatgcaacacttgcttggtaaacattaacgattgattgattgccaattagtcatgatcagcgctataaaatttcgtaagctgctgatgccatctcgctctgccaagatgtcgtccattttaatttcgatttaacgactttaatggctggatttcgcgttaaaagattttgaaaaatattcacttggctttcaatattcagattaaatattcaggcgagatgaaaaatatgttcagcatcccattgctgccatctcttctctgcgtctctttaaatcctaatttgcggtactttccaagtctttcatcttacatacacatccatacttacaaatgtttatatatacattcatatgtttatgataaatcgatcgtccatctttatttgcaattatcgcactaaatattcggctacttttgtttttaacattgttcctaatgctttcaagtaactatatacaatacattatacctccacaacaaaatcgacccagactaatttagttatattgtgattaagacaagttggtatgcatcaatagattattt

SEQ ID NO: 23936 - DNA, 2661 bp, DROSOPHILA
ttttgtcttggcattttgcaatttctgcctcttttgacgcaaaaatgtaaaataaggatataaaacatctcgaaaatgtcccagtacacgcccaaccagcggctggacacgcccggcgcccaggagttcggattcccgtactcaccgtacgaaatccaggagcagctgatgcaggagctcttccaagtgctcgagagaggtcaggtgggcatattcgagagtccaacgggaacggggaagtccctcaccctcacctgcggcgccctcacctggctggctaggcacgaggagctggtgcgcacggaaatgctggccaggattcgcggagtagaacaggagttggctaaactcaaggaggagagcgagcagtccagtaactggctggagagccagggaaagtccagagcacagcgggcggagctccttagattgcagcacctgcaggctttgctggacaaacaagagcagcagctggatcagatcaggaaaggggctaaaaagcataagcggcaaggaagggtgcacccaggcaagcttgaggaactggagaaggacctggatcctgaatccgactcggattcagaacacgaaaccgccgatggaccgcaggaagcagccgaagaccgctatcgccctgtgcaaatcttcttttgcagccgcacccattcgcagttggcacaaattgtggccgaactgcggaaaacacctcatggccagtcggtaaggtccatttccctgggctcgcggcagcagctgtgcgggaatcccgcagtccggaagctgaagcatgtcggcctgatgaacgagcggtgcctggatatggctaccaagaaagcacgccccaatcccagcaaaaaaagtcggctaactgcagaggccaacagtagatgcccgtttaaagcggcttccctggtggaatccctcagggatttggctttgaccgaaccgctggacatcgaggagctggccaatgaggggaccgcctgcggtggctgctcgtattacgcctcaagatccgctgtggagcacgctcaacttatactactgccgtatcaactgctgctccagaagtccgcccgtaaccagctgggtataagtcttaaggggtcaatcgtcatagtagatgaggctcacaacctactggacagcgtggcccagctgcacggctccgaaatcagccgtcagcagttggagcgggccaaggtgcagatctccggctataaggaccacttccaaaagcgtttcaccaccaagaatctcctgaaaatcaaccaaatcatcttcataattcgccgattgcttaagattctagatcagcgcaaggaattgcagtccaacggctgcagcatgatgcgcacctatgagctaaccgccgagggtgacttcttcaacatcgatctgtgcgagcttctggacttttgcgctcgcactcgtttcgcgaggaaagtacagggacgtgcagacagaatggagcgggaaccacggccgagtgagaatcaagctcctgtgtcaacggcgaggagtctgatcctccaaagattggcaagcgagcaaaagctgaaagagaaaaccaagtcggtcaaaagaagagtggaagacatcaataaggaagataaagcggaggagttgcaagaacagcagaagccaacgaagaagccggtcgaggaagtagctccttcgccaatcagaccattgctggcatttctggaaaccctcaccagcaatgctgaggatggcagaattttggtggatcccgtggggggaaccttgaagtacatactcctcgaccccgccgagcaattcgccgacatcgttgcagaagccagagcgattgtgatcgctggcggaaccatgcagcccactaaggagctgaaggagcagctatttaccggttgccatgatcgtttggtcgagcgtttctacaaccacgtggtggcgaatgacgcgatcttgccctttgtgatatccaatggccccagcggtgctccgctgtcttttaagtttgctcatagaggcagtgcagaaatgctccgggagctctcaatgattcttcggaatctgtgccaagtggtgccgggcggagtagtttgcttcctgccgtcctacgagtatttagacaaggtctacaagtacctggagcagtccggcaccctcgagacgattagcggcaggaaaagcgtgtttcgtgaggtctccggatcggccgagcagctcctggacaactatgcgctggccattaagagacctgcttcgtatggagccctcctcctgagtgtcgtgggaggaaagctctccgaaggcctgaacttcgctgacgatctgggcagagcagtgctcgtagtgggcctgccgtattccaacagcctgtcgccggagctgcgccagcgaatgcagcacctggacgagaaactgggaccgggcgcaggcaacgaatactacgagaatctctgcgtaaaggctgtcaaccagtgcataggacgggcagtgcgccacatcaaggactatgcctgcgtatatctgctggataagcgttttgcggatccgaagatacgcggcaaactgccgaagtggatttcccgccacatcgtggaggcgaacgccgcgaatggaggctttggagccgtgcaaggacgcacggctaggttcttcaagggcagatga

SEQ ID NO: 23937 - protein, 861 aa, DROSOPHILA
MSQYTPNQRLDTPGAQEFGFPYSPYEIQEQLMQELFQVLERGQVGIFESPTGTGKSLTLTCGALTWLARHEELVRTEMLARIRGVEQELAKLKEESEQSSNWLESQGKSRAQRAELLRLQHLQALLDKQEQQLDQIRKGAKKHKRQGRVHPGKLEELEKDLDPESDSDSEHETADGPQEAAEDRYRPVQIFFCSRTHSQLAQIVAELRKTPHGQSVRSISLGSRQQLCGNPAVRKLKHVGLMNERCLDMATKKARPNPSKKSRLTAEANSRCPFKAASLVESLRDLALTEPLDIEELANEGTACGGCSYYASRSAVEHAQLILLPYQLLLQKSARNQLGISLKGSIVIVDEAHNLLDSVAQLHGSEISRQQLERAKVQISGYKDHFQKRFTTKNLLKINQIIFIIRRLLKILDQRKELQSNGCSMMRTYELTAEGDFFNIDLCELLDFCARTRFARKVQGRADRMEREPRPSENQAPVSTARSLILQRLASEQKLKEKTKSVKRRVEDINKEDKAEELQEQQKPTKKPVEEVAPSPIRPLLAFLETLTSNAEDGRILVDPVGGTLKYILLDPAEQFADIVAEARAIVIAGGTMQPTKELKEQLFTGCHDRLVERFYNHVVANDAILPFVISNGPSGAPLSFKFAHRGSAEMLRELSMILRNLCQVVPGGVVCFLPSYEYLDKVYKYLEQSGTLETISGRKSVFREVSGSAEQLLDNYALAIKRPASYGALLLSVVGGKLSEGLNFADDLGRAVLVVGLPYSNSLSPELRQRMQHLDEKLGPGAGNEYYENLCVKAVNQCIGRAVRHIKDYACVYLLDKRFADPKIRGKLPKWISRHIVEANAANGGFGAVQGRTARFFKGR

SEQ ID NO: 23938 - DNA, 7142 bp, DROSOPHILA
ctagcagttgattactgctcttcttccctcgacttgtttttctcgcaggcttgcaatggaatgttaatcgatatacctagttaatgtataaaaatttggttatgtacagttgtgcaagtgtttctttcaccgctgcgcgtgtgtttgtgtgctctcgtttctgcttctctgcttctgcttctgtttctgccttttgtccatttttctttacaccttactccttacagctctttaatgatagttacttgttaattgtttctgcttcttgcttcatgaggtagtcaagccacaggctggatgccggctccaggcggacttgggatcaaggtatgggggtttcttgggggcggggatgtatctcgggttggggattttattcgagtggtccttgattgaatcgcgggatccagacctttgaggggaactctgctattggaagaacttggattgcttgtgttaaaatgtagcggtttaaagtttgcttaggataaaagaatccgaaaagcaagtggctcaaaaaaatatctgtggtctgctttcaattctatgtaagaaagttgtaggctaggaagaaatgtgtggctttgattttgaaagaaagaatgctttagttatataactgataacagggatcgcattgcatgaaatgggatcttcgctacggattggttgttggggtttaaagggggaactgcggcttatttttctgtactcctgcttagtcgagtggcgtttaagattaacattagtatgtgatgatgatgatgccctagccctagcaccagtagtctacatgagtccaagccggatcctgatcctctccgagttgcagctccatttcgagttcgagttgcacctgcccatcaagctgtggactggccggtggctcttccttcccggccgggtattggactgcttgctgttgctgagtgtttggctgttcgaaggctggaagcagcaggtcgcggtctcgatcccgctccctgtccggcgcccttcctcacgccaggcaactgccgttgttcatgaaggcagtggctgagtccaggtcgacatactcgccgccctcctccaccagttgcgacagcagatcggtggcaaagcatccattcttcagcagcagtaattgctcgtcatcgtagggcgtcatcacgcccactccgactcccactcccacaccaactccgacgccaacgcccactccggtcccaatgttgccatgctgcaggccctggtggaagtccatcaggtgattgttgttgttgttattattattatggtggctgttattattgttgccggtgctcccgttcgtgtttaccacgctggccatgttgaggccattgatgccgcagggcgagggcaaaacacaggcgtgcttgatgtccggaaagccatcgctgggctcgaacaagaacctttccgcactgagggcggtggtgtagggactctgcgagtccaccagctcattcttcacgaactcaatggcgctgctggtggcggtgggcgttgtactgctagtggcgttgctgctgtggctgctgatgttgctgttgttattgctggtgttgctgctggcgccgctgctgttgttgttgttgttgttgttgttgtgactgggatggttgctggcactgccagttaggccgtcgcagttgggaacgtagtcggaaagcagactgggactgggattggcatgctgctggtcaatcacgttgttgccggcgggattcagggactgtggctgctgttgctgctgctgctgctgctgttgctggtagccggcgtgctcgaattcctgggcgctgggcgaaggtttacagtagccattgggcagttgttgggccatggccgccgccgttttggagccatacttgaaggtggccatcgagggtatgctctgcagccgctggttgttgttaccggagttgggaccgtcgatgctcaccgtttccagttccagttcgctgagatatttctgggccggcgattggagcagttggctgggcaattggcagcctccggctcgctggcagccgtgcgatttcagcatgtccaccaacttttggcgttcggtttccagctgacgtacttggttctttagctctacgttttgggtatccaggacctccgactccttgatcagattctgtgtgcgttcgcgcttcttcattcggcacttggtggccgcaatcttattccgctcgcggcgccttcgccgtctgtcctcgtcctccggggtgagtcccttgggctgtgacttggtttcgctgtcgtcatcgctggactcctcgcagtcgtcgtccaaatcgttggcgttgctcatgctgccgctatagttgttgctgctgccgctgtgcccgttgtggttgctactgcggcgcgagtacttggagtgcggctgctccgatccggagcttgagtcgcaggtggacagcttacgcttgctctggatggacagcttcaggccctccttgatcaggcgcgaacaggtctgcaaagaaagtcaggtagttccagagtaagttggagtcaaatacgaccaaatatccttgctacagcgtattttattaggctacaaacttatttcgccctaattgtggaaaatattaatgaaaactggtacttagaccaagatatgcggcttatgatttaaataagtgtctggcttgtgcgatgatttcttgccatctgtgcgagtttccccgtgaactggctgaggtttccgagtgagagctcgacacagtttatcgggagttggacgtagatataaagatatgacgaatcgcgcggcccgttttctcgggaggagattatctgaagcggctttttcggcattgtttgtttgtttatttgcccggtgatttactcaagcaacctttttcgcgctttggcttagggcttggcacctggattttgggtttggggacactcgagttgtgcatgaattataaatattacagcgaacagatagaaatctgcgacaatcaccacgcccagaaaccagaaagtttagcgtgttcagcgctctctgtaccaaggcaagtgcacgcggcatactcgattgggctcacaaaagtggtggtgggtgggcctacggaaacagaaaccgaactccgaataccgcaaaccgaagtaacctcgatatatccagcctgcactgggtcagttccatttatggaggaacgccatagcccagacaggaacagatggtcatcactctgctccgcgcactgtgtcaactttcgttgattgactgactgcgtactgcactcagctaaaccagctgctgaaataccctttatccttagtgattgcgtaactagctaggctacgttggtaggtttgtaaactacagacgagtatgtttgtatcaactacttaattctgtggattattgaaaagcataaaccagatttcagatcgcaaaagtatttcttgaagctagcaaattatgcagcaggtcattgagttgtcgaccagaccgaagtgtagtgtttatttctttcgtattttttactcggggtttccctttttgcgcactttgtttgttgtctgctcgagaaattgttcggatgccactgattgaacgcgcccttcttttcaatgttgcctttgcgcttctgttaatttctcggcatttcggcatcgggttccatttgaattttaggcacgctgcgctatatttattgacccagaaatcagataaataaattttgtgtttaaaaagcgacaagtaaggaatgccgaaaccgaaatccaaaacaaaatcataataatcgcatgcgccaggcccccttctccgcccaaaaaatccaagacgctggcaatttggagccagtacatgaccatatggtcatatggtcatatggtcatatggtcagcgtcgactcaataagtcggacgaagtctgctggaaaattgtgcaattgcgccgggggaaatctggatggagatgtatgtatatggaagtgggatcgggaatggacggcacacaggttgcggctttagtcaaagagcccgtatagacatatatatatatgtatatatatattgtatctacgcatctgtacaatgctcaggatttttcgttctgattctgaatgaccctacggaacgaccgagcctttctttgcacttcgcatcgctgcaacttttgtcgcaaaattcacgcgaaaacgcataaaagagccaatttttcgggttggcaaatttgcattttgtttggcttgtttgcacttttgcacatttctcgctcgttctcgtgtttgccgttcttattatttatccccatttcacatttgcccctctttttcggcaacatttgtgcaaatatttggcgtgcgcagaaaaacaaaaacacacacagtgagagagagagagagaggggacaggaaacctttgaatgaggccgggtccgattcctcagggttcaattaggggtcgaaaaccctgttaaatttgaattgcactgaggcaaagttcgcccttagtcatcgaaaggtttgaagaaacaaacagaaattaaatgccttggacacacttttttttctatttagtacaatggtgcaacactactattctaactttgagttgtggtttccaactcagtcttgcttgcttttcactaattttcccccaacgccattcaccggaatcatgcacaagcacttgtagcattaatctggctttaatctggccgcatcaatttggcctgtttcattcattcattcattcatttattcgatgactgttttgcccacgcagcacactctgccgtgcaaaatcaacccacgcactctccactggccattggactgttgctctgtccgtccgtttgtccatttgtccatttgtccgtatgcttgtccgtccgtatgacaccgacgtgagcttcggcgttgagtgggcgtcaattgcaagacgcagcgagaattgatttcacttttgtggcgctgagttcgagtatctgcatctgaatctgcctctaaagctgaatctgagtctcagtgcgagtggggcgaattactcttgactggctgactgactgactgactggctggctggctgcctgacattggccttaatgaggcacgtagctgcggtggtgtcaacttcagcgattaattccacatacatacgagctaaaggccgccgattcgaaccgatctctgcgttgtgcaacgaacgcatccctagtccgctccccttccgctcccgcacctagcaataattggcaggtgtctatagactatataagccccggttcttccctcctccctcccacctccacccaccgccgttcgctaaccatcatccgtgtgtgcaaatgtgatttatgattattacttgaaacgaatttataggcgttgtgccagcgcgggttttaattgctgcaacagtcgggtgaaagaaagaggcatagcaacgcctttttaattttttttcaactaatttctcgtaaattagaatctccgaacgttttgcatcgcattttgtgtattatttcggtagatgagcgagtgctgcgtgttttagaaatatacatatatgagcttcgaactatgtatgtttgtgtgtgtgaatgtgcctggcaaaaaaggacctaacaatgcttccagcaatacagatggttgtactaattttaattgatttacctgttgcacgctgggtgtggtagccgtgcccgctggggagtcgagcggtgatccggagcaactggaatgactgctgtcctgcgagtgcgactggaagtacatataaagtatacgcacattaagtatacgacatgtatccacacgatggatatgggggaaatcgctcacctgaccattgggatggccgttgaagtggcgcacggtgaccaccggcgtggaggcggcactgcaggatgcagatgaggatgcgacggaaactgccgccgccgccgccgctgctgaactgtagctaaagttctccagcggattggtcatggcaattagcgagttgaggatctctggcgtcttgggcgtatggccgcccatcaggaggccgccgctgtcgatgctcagcagcgaggaggccggtatgttggaattgaacatggtcgacgttgacggttacacgcacggtaaataaaacgaaaactaaaccgaactaaaattaatcgtaacaaactggtgttttttttttttgtttttttttttttttttgtttgcttgctatatattgttaaatcacagttaaaggcctacgcgttgcatttgttttgttggactgttcacaaagttgtttgttctatatctcttgtgtatatgtgtatttgtatatatattatatattgaattttagaggcacacacttttcacttttttgcttatcacatgtcaaactcgaagagtcttcgctgtctagagtgttgtttctttcggttcaattgggattggggttcttagggggtcggcggcagaggagtaagatcgatccatcggttccatcggctcagatccccgacttttgttgttgctcagagcgctaaggccgagcgaatgcaatgcgttgaacgtcgaacagccggcacctcccttcacatcggcatcgaatctgcaaaatgcacagagacaaaacagaaagagagagtgagtgagtgtgactgagagatatgatgtggatgtatgatgtatgtatgtacatatgtatccacatatgtatgtacatatgagcacatgtgtgtggatagagagagagagacccgcgaacgtgagtgcaccatgtcaacgtaaacaaaagcaattaaattataaaataaactcggctaaattgatttatgtaagtctcggtgaaccggcgaagcgcgtgacacgcgataaagcttacaaatcacgattgatcgtgattgatcacgcacccgaaaagccgccccacacccctcctttccactcctcgcgaacatactctcacatacgcctcaattaagccattaatcggctaattgagaccaggtccactggccatatagccaatacagatcgggtgccagggtgtcaatatgtctacatctgtatctatatgtacatatgtatgtacgtatgtgcatgcacacttagaatttccaaggggtatggtaacggacgacacacacattcctctcgggttgtgcgagg

SEQ ID NO: 23939 - DNA, 1901 bp, DROSOPHILA
attttagttcggtttagttttcgttttatttaccgtgcgtgtaaccgtcaacgtcgaccatgttcaattccaacataccggcctcctcgctgctgagcatcgacagcggcggcctcctgatgggcggccatacgcccaagacgccagagatcctcaactcgctaattgccatgaccaatccgctggagaactttagctacagttcagcagcggcggcggcggcggcagtttccgtcgcatcctcatctgcatcctgcagtgccgcctccacgccggtggtcaccgtgcgccacttcaacggccatcccaatggtcagtcgcactcgcaggacagcagtcattccagttgctccggatcaccgctcgactccccagcgggcacggctaccacacccagcgtgcaacagacctgttcgcgcctgatcaaggagggcctgaagctgtccatccagagcaagcgtaagctgtccacctgcgactcaagctccggatcggagcagccgcactccaagtactcgcgccgcagtagcaaccacaacgggcacagcggcagcagcaacaactatagcggcagcatgagcaacgccaacgatttggacgacgactgcgaggagtccagcgatgacgacagcgaaaccaagtcacagcccaagggactcaccccggaggacgaggacagacggcgaaggcgccgcgagcggaataagattgcggccaccaagtgccgaatgaagaagcgcgaacgcacacagaatctgatcaaggagtcggaggtcctggatacccaaaacgtagagctaaagaaccaagtacgtcagctggaaaccgaacgccaaaagttggtggacatgctgaaatcgcacggctgccagcgagccggaggctgccaattgcccagccaactgctccaatcgccggcccagaaatatctcagcgaactggaactggaaacggtgagcatcgacggtcccaactccggtaacaacaaccagcggctgcagagcataccctcgatggccaccttcaagtatggctccaaaacggcggcggccatggcccaacaactgcccaatggctactgtaaaccttcgcccagcgcccaggaattcgagcacgccggctaccagcaacagcagcagcagcagcagcaacagcagccacagtccctgaatcccgccggcaacaacgtgattgaccagcagcatgccaatcccagtcccagtctgctttccgactacgttcccaactgcgacggcctaactggcagtgccagcaaccatcccagtcacaacaacaacaacaacaacaacaacagcagcggcgccagcagcaacaccagcaataacaacagcaacatcagcagccacagcagcaacgccactagcagtacaacgcccaccgccaccagcagcgccattgagttcgtgaagaatgagctggtggactcgcagagtccctacaccaccgccctcagtgcggaaaggttcttgttcgagcccagcgatggctttccggacatcaagcacgcctgtgttttgccctcgccctgcggcatcaatggcctcaacatggccagcgtggtaaacacgaacgggagcaccggcaacaataataacagccaccataataataataacaacaacaacaatcacctgatggacttccaccagggcctgcagcatggcaacattgggaccggagtgggcgttggcgtcggagttggtgtgggagtgggagtcggagtgggcgtgatgacgccctacgatgacgagcaattactgctgctgaagaatggatgctttgccaccgatctgctgtcgcaactggtggaggagggcggcgagtatgtcgacctggactcagccactgccttcatgaacaacggcagttgcctggcgtga

SEQ ID NO: 23940 - protein, 613 aa, DROSOPHILA
MFNSNIPASSLLSIDSGGLLMGGHTPKTPEILNSLIAMTNPLENFSYSSAAAAAAAVSVASSSASCSAASTPVVTVRHFNGHPNGQSHSQDSSHSSCSGSPLDSPAGTATTPSVQQTCSRLIKEGLKLSIQSKRKLSTCDSSSGSEQPHSKYSRRSSNHNGHSGSSNNYSGSMSNANDLDDDCEESSDDDSETKSQPKGLTPEDEDRRRRRRERNKIAATKCRMKKRERTQNLIKESEVLDTQNVELKNQVRQLETERQKLVDMLKSHGCQRAGGCQLPSQLLQSPAQKYLSELELETVSIDGPNSGNNNQRLQSIPSMATFKYGSKTAAAMAQQLPNGYCKPSPSAQEFEHAGYQQQQQQQQQQQPQSLNPAGNNVIDQQHANPSPSLLSDYVPNCDGLTGSASNHPSHNNNNNNNNSSGASSNTSNNNSNISSHSSNATSSTTPTATSSAIEFVKNELVDSQSPYTTALSAERFLFEPSDGFPDIKHACVLPSPCGINGLNMASVVNTNGSTGNNNNSHHNNNNNNNNHLMDFHQGLQHGNIGTGVGVGVGVGVGVGVGVGVMTPYDDEQLLLLKNGCFATDLLSQLVEEGGEYVDLDSATAFMNNGSCLA

SEQ ID NO: 23941 - DNA, 6656 bp, DROSOPHILA
cagattgtggagttaaagcctcagggccagagcattcccgtgacgaactcaaaccgcattgagtacctgcaattgattgccgactacaagcttaacgtgcagatacgtcgtcactgcaacgccttccgaaagggtctatccaacgtcctgcccatcgaatggctgtacatgttcagcaataaggagctgcaaatactcatctcgggtgccgagatacccattgacctggaggatctaaagaagcactgtgaatacggcggtgaattctctccagagcacccctcgattgtgacattctgggaggttttggaaggtttcgatgatatgcagcgccggcagctgctaaaatttgtcaccagctgctcgaggccaccgttgttgggctttaaggtgggtatttaatcgcattttaagcaaacatgtgttacctctttgaatttccataataggacctggacccacctttctttatccaaaacacgggagatatggaacgtctgcccacggccagcacctgcacgaatctgctaaaacttccgcccttcaaaaccgtagaacaaatgcgcgaaaagctgctctatgccatacagtctggcgctggctttgaactaagctaagcactaagctgtcacttcccaaaaaccaatctccgaaaacatatcgatgaccacagatgactaccaaaccccatacaattcacccacctggcagagcgaatagatcgcaggacggcaagttgacaggcaggaaaactattccagttaatctattaccaatgtacatttgattaccgcaattgcttagtgtaaagtatcaagcttaagaggtctgtttatccacgttttctttgtttttcgtattacaaaacataaatgtaaatcaatgcgatctaagaatatttaaataaagggcaagcgttgtcagtccacgtttggtggaacttattcctgtttcctcgttccgtcggagtcccacgcgtagccacgaattttcagttgccttaaagcgccgccaatgccatgtccagctgccaggcctgttgaataatgcgctgaaagaccacttggggcgccgaggaggcgaacagaaagtcaatgtgattatagcccggcacctgatacatctgcgtgacgctgttccgcagctccctgaccaggcgctgcacatccgccaggctggacagcgtgtcccggctgccgtggaagatctgcagctgcaggcgtacattggccaactgatacgaggggggcgtggtccggccatatcgcagcgtattcagccggggggagcggtagtcgtactgctggaatttgcctgcggacgatgatgcgactcatttaatgcgcaccacacttgaatgtgatgcacagagaaaatagtttctctctttacagattgaaacattttggaaaggttttaggttgatccatactaatgtaagaaactctgatttctcgcagtgcatccgacttaccgctattgatgagctgcccgaagtgctgcagctggccccgcgaaatgcccgccggcgtcgtttccaggatgcgtggcaagatgctctggcaacggaagagaaggcaggccattttgttaggcataagctgccgccgaatcgcttaaattttatgagcaaccgccggaaacaggacctccatctccaccccgcctgaccactcatgtgtgtatcggtgtgtgttcaggctgctatttccgtttcattgcgacacaaagcatatgcggaagtgcacacaagcacactcgctcacactcgcactcacactcatacacgcccactcacacatgagcgggcacaggagcgaggactcgggccaaaggccaagaggtccttgctttgattctgcaatggaggaggcgctgcctgaatttatattgcggctatttgtttcgaaattagctgctcgcactcgctcactcgccgcattctcagcctctgattaaggtaagtgcactgagcttttcagttttgtatcgagattgatattgatattgccacgggccactgattgaaatggccgacggatttgaaaaggcggctgagagaggtctcaataaagtccttttctaaggaaataccaataccaactgactcacacagtggagtcaatgggccgtggcatgtttcccatatcgaatgggaaatgagttgaggaaagttatcttcaattaaaattactgtgtgctcaggaatgtatctttttacttactaaattaacactttaaaaatgtaatgctttaatgaataatctccccgattgcaattgtaaatagtattatttgtgccttctaaatgtaaaacctaacgttgagaaataaaaagctgattgtaaattaaatgggactgaagagcttcatcagtttaattggggagttttgcatgcggaaattccgtttaaatccgaaaagcgttgtttaaacagagtgtctgaaaaaatgagcgaacttttttccgttgttggccactttttgcgacccctcagttatagcattttatgtaaatcggccgactttaaaatgccatgacaagccattgaaacgttgcatgcgtcctgcggcgacacattttttgttttgatgtttatttgattttccgcctggccgttgcatttcgcatttcccattttcctttttgcagccaccagccagcaacttgtggcaaatactggcaattttgtgccgccagcttgtttgtgtttcccgagtttttcttttgccatcccatcccttgcatttatttttcttacatctcgaattttgtatttttttgcacttcagctgcaatcttattcgacgcagtgcagtttttccaagagtgttgaactttgggggtcgtgggcgtgggcgagggcgtgggaggccgccgggttactaaatatgcacaaatatttattcggacctccatctgtggtggtggtgcggcatgttcggcagttgtcgcaagtatcgcctcgctccatttgctcaagctcggcgtctttcatgtatttgcttaacaattttccgctgccggatctggtttgttgacttttcgtggaggttatgactccgccaagtatctgtgactctcgagtcaagtggcagtagctcggggaatttgttttctgagttaaacagtcgcatcggaaacaatagttcgcaaataccagttttggcaactagttttttggggtgaagagttcactatatagacacacttttttgcttcaacgagtcaagttgataccgatgagtactaaattcaatgggctaatcacttaacataagttttttaatccacagcttaatccccttagtcttaactgaacttttttttgccatgcttatttaaaatgcatttaaaagggtgtgccacgcctccactcctcacttatcctttggattattcaacgcctgaaatgcttatttatggccgcatatgtgaaaagattcgagcactgtatgcgcggcaacttcctaacccttatttgtgctcttcaggcaactaaaaaaaaatccaaatccagctttgcatcgcagtgtccagggccgcagccaattggccaaagcgccactttaataacttacaagcgccacttggcaccgaggtccgaccccgattccgaatccgacccccctatattccggccaaccaacaaaaacacaccaactaactcagctcggatgcggatggtaagccttttgagcacgcgccccgaaaacactccgaacacacagataagccataaagttgcttccttcgttgcacgctcgcgatttatttgccatatttcacggcaaaacaaaatttaaatgtaccgtgtgcgcgggaaacaaaaagtgttcaaggcaccgtggcgtatacgtaatgtgtgttatactctagttagccgccagctggagcggcgttttcggtggggcagaggggggaaagtttggagcacctttcggttgcacattatggtgggcatttcggattctccagagtctatgcggaaatactctaaatattaaaatttaacatacggttaggaaataagcgatctatttttataggcacttatttggttaatcacataaagaacctactggtgtgcagttgctaaactaatttaaaggtattttgatatatttcgtgtattcaaataatctggatacacaaacttgactcgtacgcacgcaccaattaacccgctcagttgggcatttatcaccccttcgtaatccccttttatccgcatccacaatagttgtggaccggctggccaccaggaagctctgcccggcaggagcagctcgtttacgcatttaaattcaaataacttttattaccgaaactaaggcctccgcccttcctcattcggccctcgatagtacgtatgtttgtctgtttccgggagtttcagggaagtggccttgaggggtggggggatggtaggtgagaggcgggaggtggtcccactccagagtgcaataaaaacttttgcatacaagaggaaaaaagtttcgggcgctttgttggctaaattatggcccgcatatataatcgtactcacacgatccaatggatagtcgctgaagcccacatagacggaggtgaagagggtgcagagggcgtaggtgggccgggaggcggtgcagaagaactggccgcccacctgggtcagcgccgacgccgggagaagttcgtggaggccaagtttgttcagcagcagctgcacggagaaaatgccaccagttttagtttcagttgaactttgagctatgttatttgcaattaaaatcagaatcatgcttatcctttaaatctaaatgtaatatgtcctattttcctacagctttcaactgtcactttccactcttttttgctagtgtagcttagaactaagacaaatgctaatcttctctagcaaactgcgtacttcccgagtgacaagagcttatcacgcgcgcagcacgcgtcaagtatacgcaccgtggccatggagctgtcgctggccagcagccgcagtggcggactgctcaggtgctggaggaatgccaccggagccaacagggcggcattggcgaaccgcgcattgtactccggccgctgcgagagcagcaccaggagaacggtggtgccctgcgagtgcccgacgtagtgcagctggcggcgattcgtcctcgccagcacgtaatccacgatggcgggcaggtcgtagatgccaatctcgtgccagctgaatcgccagaagcgggcgtcacttgtctggagcgtgcggtgcccgcgggaatgggtggtgcccctggcgttcgccagccagacgtcaaagcagcgggcatgaagctccagcgccagggatctgccccttccgcccgacacgaagtccccggcggatccgaggaggccgtgcatcaggaggaaggggcgcagctgttgggggcaccaacggttttggggagcgggaatgcggtgcaggctcagccggtagccatcggcggtctctatgcggtgcacttggcactggagctgttggcgctgcaccgcctggcacactgagtctgactaaaccaggacagtggaccactatcaccaccaccaccactatctctgcgtagaactcccatccgcgactcatgctgctcgacgtggagggcaggctttaagacatgactgttgccacgagacgtgcgaacggatactgcggctttcggggcatcgcgttgggtttttgtgtttgcgtatacgcaacgtgggccgcgatgggaggtggggcaggtggggaaggcactctgaatggagctttaaataaacacatttccaccttttgttgactggcaatcgatgtgactgcgcaggtggcctagaaacgctaagatatgcagttttcgcagtagctactatttttcaacaactaaatcaattttttttttaaactttcggcttattaagctaatagcaagaagatatggctaagaaactggcgtacaattactaatttgatattaattacgtaatcaagacaactatagttagagtgattgagctgagctcaatcgaattatccagacctaattgaaatgaaactcaagctggatggtgttaattttgagcacttgatcaaattacctgcttgggattcccgtgccccaattagctggattaatttacttgcaactttccaccgatttgccgccatatatgtgcatatagtttccatgccagcgatgcgctgatgagggccaaaccgcaggctgctgcacaatgcatctgaatgcggagacgaaatcaaatatgcaccgacgtttgagaacatcatgtacatataatgagcgactgaccgactgactgtatgactgcatgactgcatgaccgaatgtttgagtgactggcagcggacagcagatgtggggcagcctatgccagttacaatccgaatggccaggacgtgttgaaaatgcaatcgtgctaattaaagcgaccgcgacacagggcgtgtgaaattattatgaagcgtagatgcagctgcgaagtccgtggaaatgatacggatagcatcgagtggtttctgtggccagaaattgcaatattagagcgaagaggtccactatttaaaagagggcagcgccattcgaactcttcagtctgcagctccttgatatgaacagcattcccaaac

SEQ ID NO: 23942 - DNA, 1651 bp, DROSOPHILA
caacagtcatgtcttaaagcctgccctccacgtcgagcagcatgagtcgcggatgggagttctacgcagagatagtggtggtggtggtgatagtggtccactgtcctggtttagtcagactcagtgtgccaggcggtgcagcgccaacagctccagtgccaagtgcaccgcatagagaccgccgatggctaccggctgagcctgcaccgcattcccgctccccaaaaccgttggtgcccccaacagctgcgccccttcctcctgatgcacggcctcctcggatccgccggggacttcgtgtcgggcggaaggggcagatccctggcgctggagcttcatgcccgctgctttgacgtctggctggcgaacgccaggggcaccacccattcccgcgggcaccgcacgctccagacaagtgacgcccgcttctggcgattcagctggcacgagattggcatctacgacctgcccgccatcgtggattacgtgctggcgaggacgaatcgccgccagctgcactacgtcgggcactcgcagggcaccaccgttctcctggtgctgctctcgcagcggccggagtacaatgcgcggttcgccaatgccgccctgttggctccggtggcattcctccagcacctgagcagtccgccactgcggctgctggccagcgacagctccatggccacggtgcgtatacttgacgcgtgctgcgcgcctgctgctgaacaaacttggcctccacgaacttctcccggcgtcggcgctgacccaggtgggcggccagttcttctgcaccgcctcccggcccacctacgccctctgcaccctcttcacctccgtctatgtgggcttcagcgactatccattggatcgtagcttcctggtggccagccggtccacaactattgtggatgcggataaaaggggattacgaaggggtgataaatgcccaactgagcgggttaattggcttaccatccgcatccgagctgagttagttggtgtgtttttgttggttggccggaatataggggggtcggattcggaatcggggtcggacctcggtgccaagtggcgcttatccggcagcggaaaattgttaagcaaatacatgaaagacgccgagcttgagcaaatggagcgaggcgatacttgcgacaactgccgaacatgccgcaccaccaccacagatggagcgattcggcggcagcttatgcctaacaaaatggcctgccttctcttccgttgccagagcatcttgccacgcatcctggaaacgacgccggcgggcatttcgcggggccagctgcagcacttcgggcagctcatcaatagcggcaaattccagcagtacgactaccgctccccccggctgaatacgctgcgatatggccggaccacgcccccctcgtatcagttggccaatgtacgcctgcagctgcagatcttccacggcagccgggacacgctgtccagcctggcggatgtgcagcgcctggtcagggagctgcggaacagcgtcacgcagatgtatcaggtgccgggctataatcacattgactttctgttcgcctcctcggcgccccaagtggtctttcagcgcattattcaacaggcctggcagctggacatggcattggcggcgctttaa

SEQ ID NO: 23943 - protein, 203 aa, DROSOPHILA
MHGLLGSAGDFVSGGRGRSLALELHARCFDVWLANARGTTHSRGHRTLQTSDARFWRFSWHEIGIYDLPAIVDYVLARTNRRQLHYVGHSQGTTVLLVLLSQRPEYNARFANAALLAPVAFLQHLSSPPLRLLASDSSMATVRILDACCAPAAEQTWPPRTSPGVGADPGGRPVLLHRLPAHLRPLHPLHLRLCGLQRLSIGS

SEQ ID NO: 23944 - DNA, 4270 bp, DROSOPHILA
aatgcgaaatgggcgttgggtctcctgcagctgaaacgttgtggttcgtgtccgaaatatcagctacgttcgaacgaacagtcccttccttcttcaagtctccactaagcatgtctccattggttgtggcgagtgtcgaaggtacggcgtttgtcatccagccgatccagtcaacaatgcgacaaacatcgacttctaaagcatttgggagtaagcaagttgaaaattacttttgcatttggagaagtagtgtctgctaggcttgttagccgtcaaagtcctgccttgtccgtttaacgaacactttaccttgccctccaaccttgccagcggacaggcacgcaacgaaagcgggccaattagtttggttggacaccagggagggttggcggagtctcgtcaactggcagctggccaaggcgcacgcactgtggcgtctccgtcgcccctggagcggggcatcaggtgacgtgggcggttggggaggggtcggaagatatagcacttttgttatagtgcgtcagaggcgacgacgacgatggcgcggaagtagctggccaccgcccttgcccctctcctactcgtatgccagcaacctgtggccttgacagcgcccgttttgatttatgcggcattttgcaaaagtcaacaaatgaaaatgacacagaaataatgccaagagagctgttttccactattccgatttcttttgccccaaggtcaggcgcacaaatagatgtcggcagtgccacccgctggacctccgccatggatacagattccatatgtactccctgcatcacaatggcatgctccttaccaattagaagcagtttcaagatatcacggattcgtttaaaacagcactgggatcagaattccgattgaggtgagttatcttcgtgtttgctgttagcagtacgtcttttaacttcaaaacgttcagaatacttgtaagtcccgaaacggaaactcatcgagtaattgaaaccaaaccggcatgggctcggtaggaagtcgtcagctcaaccccgtccaactgtgtgaccaccagcaggccacagggctgtccgcagagcagctagagcagctgcacacgcggttccgcagcctggatcgccaccagcgcggctatttgacgcccaccgacttgctgcgcattccgcagctatccctcaacccgcttcaccgccagatcatcgacggcttcttccccagccgtgaccccagcgcgcgtatcggtttcaagcagttcgtggacacttgctccaccattttggtgccacagtttggacgcggttcagtgaggcggcgcgacgggcgtgttcagaagcttcaactcctgtccaagatgtttgacacgaggcgcagcggctgcatcacacgctccgacttccgccagatcatgcgcagcattgtcaatctggcctggagtcagcaacaggatcaggaacgtcaggaggggctttccgagaaccgtttgcctgaggtggaggccgagttgcaacttttagagcatcaggcctttggcttctgctgcgaccatatctcatatggggagttcgagaagcgcctgtttagtgtggacgtcgacagacggctgtcgatcgccaagtggctggaggacgatgacgaggccgatgccgagatggtactgccagttggctcaggcccgtaaagcaccacacgccaaaacactcacatgttgtgtttgtgttttcaatataccattcacttccatccagtgagataggaatcagggaatcctcctttatcggtgtgggtactaggaaaattgtagtccaaattgagcaaatataatttaagtccttacatttaagttacaaaggaattaggtcacaaaatcgtatgcgttaagtaaaaatattatgaaccaccgaagtgctttcacatttgtacttttcgatgttgcctacttttctgcgagggacatttttatacatctggctgcacaatgcatacttttgggcagcagacagaaatcgtggccagaatggaaaatgttgccattaccgttctctaaataccaggcgaacagaatccatagcatgtaccagctggtaacacttcctaatcagctgatcctttttcaagatggctgcaccttacgtttttccagtaaacttattcgaccaataggaagcgatggagaagataccgttagtttagcttagaagtaaacaaaaacagctgttttttcacgcctttccagttgtcagcaggcaagtcagctttcttcctactgaaatttctgttcgcctagttataaagaacctgacaattcacatatttatgacaaaatttccgagttggcaacatttttcgcagtaaaacttgcgtctttacgagccccagacaccatgcgaacagaatccgaagcaagctgcagctggtagctcgaattaaagtgaaacaactgatcgtcctctaagattgctgctctttctatatttccataaccgttacttctgaactgagtgcagaccagtgataggcaaccgcgttgtttttaatatccacgtcacgatagtcacgaaaatgtcttgttttacttgggtgcgtggcgaatccttctgagcggaaatcctttggcacgatttggcgacggtgagatatcaattaaaaaaacaagacggaaactagcttcgttaattttcttcacaataaatgtttattataatttgttaatagttagggtgtaatttgcaatagatagctttctccgcaaatggggcgtggtctgtgcaaactcctaaagcgccttaaaatatatgtaagttcaatacgggttcgactctggatctcgtgctaaaaaaaaaatgaagaaacaaacaatatatgtaccttaattttgaacatgactgtatggcaggccggcgagctcttcttcgagcccttcggcgattccatgtgcggtgattatgctgctgtgtttgctcgattgcgctaagataaggatgcgtgagcaccgtgaaatcggcttgatatatgtatgtgtagatatagaagcatttatgccatatggttggttggccaaaaacaattttcaaggtacgctacacatgacgatccgtgttcgcttcgctgcgattcgatttcgattcgttcataacatttttagactttaaattacaattacatttcgattttgtaaataatttggtttcacgcttgcattagccgagctttacgtttagactatgtgctatatatgtatgtgtaggtatacataaatcgtagtgtacgcgtacgggtagtatataaataattacaaaagaaggtagtgtctttactatgtaagaaaaaaaaatactttcacgccatctggaaacatatacaccggggccaggtccagttgatcggtatctccaccccgtttttactggcgcctcacggtccgctcgcgctcacgcccactctcctccctttggaggctgccgtggcggggcggcgaggtgtgcccagtggaggatccgccgccgttaagcacgcgcgccttgcgcgaccgcttgaacttggccatgtcctcgccaaacacgtcgccggtcctcagggccgagatgagatcgtcaaactcgcccttgttgtcgccgccctttgccggggagtcaggatccccgttggaagagcctgacttgaggcccagattgcgagccacgctggtcattaggccggtcttgttcttgcgctctattgtgcgctttttgagctccgcctcctgcttggcacgcttctcctcttcctcctgtcgccgacggaagctctcgttgtcatgccgcgcctccgcgaaggcggcgaggaaggagtcaaagatgccaaagaactcgtccggctgcaaaaccgaaccatcctcgccgaagaggcgtacagcacggtcaaagcgcgtcttcatgtcctggaacttgtcctccagctcagcgaagcgcactgacgcctgggcgtggaactcgcgcattacgggcagaaagcggtcaccctgttgggccgggcccgaactgcggtggaactcgatttcgcgcgctacgtctgccagaccagtgcgcagcatctgaatgtccttgtccatctcgcccagcgacaccttggaggcttcgcgcacatgcgggatatcgtcctccaacttaagaaggtccttgaatttgcgttcaatcacctgcacgaggtagtgtagcagggtggtgcccttggcggcactggacttggtgtccgccagccggttgagtgacgccagtcggaatcccgatgcgtt

SEQ ID NO: 23945 - DNA, 1265 bp, DROSOPHILA
atgggctcggtaggaagtcgtcagctcaaccccgtccaactgtgtgaccaccagcaggccacagggctgtccgcagagcagctagagcagctgcacacgcggttccgcagcctggatcgccaccagcgcggctatttgacgcccaccgacttgctgcgcattccgcagctatccctcaacccgcttcaccgccagatcatcgacggcttcttccccagccgtgaccccagcgcgcgtatcggtttcaagcagttcgtggacacttgctccaccattttggtgccacagtttggacgcggttcagtgaggcggcgcgacgggcgtgttcagaagcttcaactcctgtccaagatgtttgacacgaggcgcagcggctgcatcacacgctccgacttccgccagatcatgcgcagcattgtcaatctggcctggagtcagcaacaggatcaggaacgtcaggaggggctttccgagaaccgtttgcctgaggtggaggccgagttgcaacttttagagcatcaggcctttggcttctgctgcgaccatatctcatatggggagttcgagaagcgcctgtttagtgtggacgtcgacagacggctgtcgatcgccaagtggctggaggacgatgacgaggccgatgccgagatggtactgccagttggctcaggcccgtaaaataaatgtttattataatttgttaatagttagggtgtaatttgcaatagatagctttctccgcaaatggggcgtggtctgtgcaaactcctaaagcgccttaaaatatatgtaagttcaatacgggttcgactctggatctcgtgctaaaaaaaaaatgaagaaacaaacaatatatgtaccttaattttgaacatgactgtatggcaggccggcgagctcttcttcgagcccttcggcgattccatgtgcggtgattatgctgctgtgtttgctcgattgcgctaagataaggatgcgtgagcaccgtgaaatcggcttgatatatgtatgtgtagatatagaagcatttatgccatatggttggttggccaaaaacaattttcaaggtacgctacacatgacgatccgtgttcgcttcgctgcgattcgatttcgattcgttcataacatttttagactttaaattacaattacatttcgattttgtaaataatttggtttcacgcttgcattagccgagctttacgtttagactatgtgctatatatgtatgtgtaggtatacataaatcgtagtgtacgcgt

SEQ ID NO: 23946 - protein, 225 aa, DROSOPHILA
MGSVGSRQLNPVQLCDHQQATGLSAEQLEQLHTRFRSLDRHQRGYLTPTDLLRIPQLSLNPLHRQIIDGFFPSRDPSARIGFKQFVDTCSTILVPQFGRGSVRRRDGRVQKLQLLSKMFDTRRSGCITRSDFRQIMRSIVNLAWSQQQDQERQEGLSENRLPEVEAELQLLEHQAFGFCCDHISYGEFEKRLFSVDVDRRLSIAKWLEDDDEADAEMVLPVGSGP

SEQ ID NO: 23947 - DNA, 5906 bp, DROSOPHILA
aaacacttcgcctcgctgtgggaccagcaaaccgtccccgacttctttacgcccggctgaccgtggtgacaccaacagacggtcctccgcccaccacgccctccactgcgccagccgcccacatccaactgcatcatgcaaatggatcgctctttcaaacgctagcaggggagcatggagcacgccatctgacatcgttgcgggtacgagatgagacgctgctagcatttatggagggatgctgccgtataagagtgcttatctaccgcggtgtgcagggattcgtggactttgtccgtttccccgcacctgcccaagaagctaagagcggagatggggaggtcttgcagttactatccctacgcttacctctcaatcggccacccggagccatgtacttattggcagtggttcaagctcgacgcgtcactttctacgaagtggtggtagccggattactagagccgtggctccagtgcccatgattgttaaattaaaatgtatatgtaaacttgtttagatggatgatagtgagttgcttataagatgtagttagttatctttagtgtgctgtttgttaactgtgtaatattattgtaattattcttcttgttgtgaataaacattggtttggtgatgtttaaaaagtatataaacgataagattgccattcatatttgaattagttgacttgctgtttcccaaaaagaattgacaatctttaactatatagatatatatttatttcaagaacttagttacacatatacatagcattaaccacgactttttgcttgccctcgcactcagtgattgactcttacatcctaggccggacttacgactatgagcccacggattgcggatcccttatccgcggggcacgcagattgagaggacagtgactacaataaatacacacacattacgataacgcttggaagaggacgacgaagttgggaggaaacatatgtacagttagcctgtccgaaggatcctcctacgagggaatcttaacgggcagaaataggcgcggatccccgatcttgggactgagtcgaaccaccacctggtcatcgccgtcacccacttcgaggaacgagttccagtcggccaggaagtaaaatccattcttcttcttgggcggcggtggctcctcgctgacaggatcaggtccaaatgagtctgccaagtcgtcgagagatccattccggggctcctcggtggtggtagtggtactagtgctgctgctgtcgtcctctccaactgctcctttggtgtctccatcgatgtcgtctaagcccagactcagactaatcttggtgggggactgggtggtcggtggcggatcatcgccatctttctgcttgccactctcggtggtgacattttccacgctctgacgcctttctttcagagtctcatcttggccactctgaagggactgcagataggcggcgtctggattgggccttggacttgatgtcgctgtggttacctggtccaagctcacattgagctgttgcagttcttggagattgctgatcaggcgctgcagctcgctgagattgcttttggagtcatcccttttttccttgggtgcctcgggctccggcttcgctagctggtaattaaactcactgaactctgccatgaggtcgccatcgagctcaccctccctctcgtcgccctcattcaaatcttctgcgtcgccctcatcgctgcgccgccggaagccactgcccacgcccagtcccttggccaattcactgggcagtccctgtttgggcgctagttcagtgcttacaccaatcctgttggccgctcgcttaatggccgcctcgataattttggtcgcactgaaaacgggcagctggaggctgctctccgtggtgggtttggcttccggaatcgggcgcaccctcggacggctagtggtgagcgaaaatacggccggcgaggaggtgtcatgcacttgagcgggagccggagtggtgctagtcgtggtggtggtggtggatgaagtggaggacgaggtagcctgcagctggctttcgagctgttgcgacagctcgtggggcagagcgacgcctagcttctgcaactgttgggtattgtagagcagtttctgcagctcctccagatccccctttcggggcccagagctgggcgtagtgggagccctccttgcgggcacgaaacgaggagcagccggcgtggtcggtggctggttctgcactgtcttatagatgggctgcatgtgctgatagctctgacgctcgcccgtgtcctccaggctaccgaaaaactgctggaactgaccaaagtctgctgaggatccgcgctgcggatgggcgggctgactcatggccagttcgcggagctcctcgctggaagattgggaaggcgtggccatggttacaggcttctcgtagacgggcaagtctagtttaagctctggttccagctccaccacctgatccctggctggctgagcatagacaatgtgagctccattgacagtttttacattaggactgcggatcgaggccgcggtgaccagctgcgaatggggatgggtcacgtgttccgttcggagttgtactctctctagctcctggactttgctcaacagcttttgcaactgcacgtagtcctgtggatgcacctcttcccgaagcagcccattggtcctttcaaattggcttaagggtctctgcttggtggtggaagcagccgtggagatctctacagttcctccacctggaaggagggaagctgaggtcggcgatagttcctgcaggtgggcataatcgttgctaggcaagctaattaccggcctggaaccagccacgtttcttgtgaggaaattaggctgcgttgtgggctgctgcagttgctccaactgctggacacgggtaatcagtgcctcaaactgagcatgatccactgagggcgtgggcctgggcgtcgtggttgtactcgtggttgatgtggtggaggaggtggttttcgggtgctgtttctttttgctgttcctggcctgctcgtataacttctccaactcccgatcgtcacttaagaggcgttgcagctgcagaagatcggcagcacctagagagttgccttgtcccactcccaagcccagagcctgatttctcaatggctttgcggtggtgctggttgtgctcgttgtggttctgctggattgatccaactgctggagctgtttaaggattcgctgcagctctcgtgcttcgttctgcgaaggcgagggggtggtggtggtggtggtcgtcgtgctggtgctcgtgctcgtggtggagaaacgactgctcaacgattgaacgcccggactggctgccttaataacattttctggattgatcttaagcttttcgagttcctggagattttgcaacaacttggacaactcatcggaacctgtaggtgtagcttgttggtttcccccgttggcaaagttaatgtctatgttcggatcgattcgcctgcgcggcttcttggcctcaatgagtagaggttccccgtgggtgatgagcggcactggagcaggtgtggtagtggtggtggtgctcgttgtggtagtagtggtgctggttgtggtgctctttggagtctttctcttaggctgcgattgaaggcgctcaagttcctgcagattttccaagagcttggccaactccgcgtttcccgtgggcggcaaacgggccgtcgccgtcgacagttccgtgtgagcaccagttggttcctccgtgggctttgcctccttctttagtgcctttggagccttccgtacaataccaaagcgggtcaggtaaccttcgacttcgggcttcacgcgcagctcttcgccaatattcaggggcttaaagtttgagtatgcctccggtcggattcgagccccatggagaccccgtagatccgccaccgctaccaccgacggctggggagcgctctccgcggggtaatagtcgtccaacgcatacctcttgtgggcagaatcgcttttaccgcccgacacaatgcccaggctttcgaggatgtccgccaccggcttcactgtactgctgagagagccacctcctccctcggagggctttggtttcctcaggaactgagcattctttgcactgtagtgggagctgaatcgggcggctgaaggtgcagcagcgggattagctgaaggctgagaagctgcagtgactggtttgaagtcctgataaaccaccggcggcggcgctggcggatggtaggttgtggcctgcggcatgggtctgaactgctgctggagaggattcgcctggccatgcagtaagctgtaggctggcttgtaggtcgtggctgccaccgcaggattgcctccaggcactgtacttcttggcagcgcactgggatccgcggttagaaacttcaccggatccggtggcgtgtaggcgtcgatgacgcgagtcaccggaggccgcgtgtacagctcctgcagattctcctccgtgttgttgtccgtgttgaagggcaggactagcatgagggctcgcatgctgtccgctcggctcatgtcgcctgcctccaagcttttctcgtattcctcgcgggttactttttcgtacagctcctcgatctcgccactgcgaagattggggttattagaatcgcaccttcattgaccagtcgcagctccaatgatcactcaccgcgtcagcctaggcaaggccggatcgttggctagtatcttttgcacctcgtcgatcgtctgctcgatctccggcggctggaagaaactcttgtccaactgctgccgcgcattaccgccctgtatagtgggcagggcccgcgtcacgccccccagctgcaggagggcgatcagcgccaggcactcacggagcatcctgggaaagcaggtcggggactgcaagaagaaacgtgagaaaattgggggcggatgtctactgtccttacgagtatatccctaaaatggcacatctcgttcaataactacacctatactgtacagactccttaatttctgatctaggatcccctttttgatcttccactaagatctttagataatgaacttgtccaaaactcacatatgacacctttcgctttcctactccctcttgtttggctttccgataactgactgactgattgacccaccgaccgaccgagcattcaaccatatcaaccatatcaaccacacattagccaacgagctactgaccactgccagttcggtagcttcatcaccgtccatcaacgatggtaataatcgggtggccgtgtgtgcggcttttttcacaatccgaatcgcagatcacagatcacagatcgcgactgccggagacaaagtttccgcccaggaaaaggagaatggggaaataatagacgactcacaaagaaatcaaatgaaatgcatgacaaattttcgtctaaagccgacagcgacaacgaaagtggaaaaaatttatgaaaatagtgctcaaagacggcgacaaatatgtggacaagtgtacaaatttattaaaccaacggagaccgaaaaacaagacgtaacccccaatcagaaaacacttgttaaagagtggagtgtgaatcaccatattttgctaagattttcgaggattgcgcaatcggagtggggtggtcgggtcctccgatcaggatgagagtgatgcaagagccgttggcgagggaaatggaaatgcaaatggattgacattaaaatggagttgcagcctgtggcgaagatcttgtccaaattatgacagtttcctcggattgccagtggttggaccgcggggagggaggacacttcggtactccatctatcgaacctatcggagcgtttaattttcacttaattgccgtagttaaatcataaa

SEQ ID NO: 23948 - DNA, 3840 bp, DROSOPHILA
atgctccgtgagtgcctggcgctgatcgccctcctgcagctggggggcgtgacgcgggccctgcccactatacagggcggtaatgcgcggcagcagttggacaagagtttcttccagccgccggagatcgagcagacgatcgacgaggtgcaaaagatactagccaacgatccggccttgcctaggctgacgcgtggcgagatcgaggagctgtacgaaaaagtaacccgcgaggaatacgagaaaagcttggaggcaggcgacatgagccgagcggacagcatgcgagccctcatgctagtcctgcccttcaacacggacaacaacacggaggagaatctgcaggagctgtacacgcggcctccggtgactcgcgtcatcgacgcctacacgccaccggatccggtgaagtttctaaccgcggatcccagtgcgctgccaagaagtacagtgcctggaggcaatcctgcggtggcagccacgacctacaagccagcctacagcttactgcatggccaggcgaatcctctccagcagcagttcagacccatgccgcaggccacaacctaccatccgccagcgccgccgccggtggtttatcaggacttcaaaccagtcactgcagcttctcagccttcagctaatcccgctgctgcaccttcagccgcccgattcagctcccactacagtgcaaagaatgctcagttcctgaggaaaccaaagccctccgagggaggaggtggctctctcagcagtacagtgaagccggtggcggacatcctcgaaagcctgggcattgtgtcgggcggtaaaagcgattctgcccacaagaggtatgcgttggacgactattaccccgcggagagcgctccccagccgtcggtggtagcggtggcggatctacggggtctccatggggctcgaatccgaccggaggcatactcaaactttaagcccctgaatattggcgaagagctgcgcgtgaagcccgaagtcgaaggttacctgacccgctttggtattgtacggaaggctccaaaggcactaaagaaggaggcaaagcccacggaggaaccaactggtgctcacacggaactgtcgacggcgacggcccgtttgccgcccacgggaaacgcggagttggccaagctcttggaaaatctgcaggaacttgagcgccttcaatcgcagcctaagagaaagactccaaagagcaccacaaccagcaccactactaccacaacgagcaccaccaccactaccacacctgctccagtgccgctcatcacccacggggaacctctactcattgaggccaagaagccgcgcaggcgaatcgatccgaacatagacattaactttgccaacgggggaaaccaacaagctacacctacaggttccgatgagttgtccaagttgttgcaaaatctccaggaactcgaaaagcttaagatcaatccagaaaatgttattaaggcagccagtccgggcgttcaatcgttgagcagtcgtttctccaccacgagcacgagcaccagcacgacgaccaccaccaccaccaccccctcgccttcgcagaacgaagcacgagagctgcagcgaatccttaaacagctccagcagttggatcaatccagcagaaccacaacgagcacaaccagcaccaccgcaaagccattgagaaatcaggctctgggcttgggagtgggacaaggcaactctctaggtgctgccgatcttctgcagctgcaacgcctcttaagtgacgatcgggagttggagaagttatacgagcaggccaggaacagcaaaaagaaacagcacccgaaaaccacctcctccaccacatcaaccacgagtacaaccacgacgcccaggcccacgccctcagtggatcatgctcagtttgaggcactgattacccgtgtccagcagttggagcaactgcagcagcccacaacgcagcctaatttcctcacaagaaacgtggctggttccaggccggtaattagcttgcctagcaacgattatgcccacctgcaggaactatcgccgacctcagcttccctccttccaggtggaggaactgtagagatctccacggctgcttccaccaccaagcagagacccttaagccaatttgaaaggaccaatgggctgcttcgggaagaggtgcatccacaggactacgtgcagttgcaaaagctgttgagcaaagtccaggagctagagagagtacaactccgaacggaacacgtgacccatccccattcgcagctggtcaccgcggcctcgatccgcagtcctaatgtaaaaactgtcaatggagctcacattgtctatgctcagccagccagggatcaggtggtggagctggaaccagagcttaaactagacttgcccgtctacgagaagcctgtaaccatggccacgccttcccaatcttccagcgaggagctccgcgaactggccatgagtcagcccgcccatccgcagcgcggatcctcagcagactttggtcagttccagcagtttttcggtagcctggaggacacgggcgagcgtcagagctatcagcacatgcagcccatctataagacagtgcagaaccagccaccgaccacgccggctgctcctcgtttcgtgcccgcaaggagggctcccactacgcccagctctgggccccgaaagggggatctggaggagctgcagaaactgctctacaatacccaacagttgcagaagctaggcgtcgctctgccccacgagctgtcgcaacagctcgaaagccagctgcaggctacctcgtcctccacttcatccaccaccaccaccacgactagcaccactccggctcccgctcaagtgcatgacacctcctcgccggccgtattttcgctcaccactagccgtccgagggtgcgcccgattccggaagccaaacccaccacggagagcagcctccagctgcccgttttcagtgcgaccaaaattatcgaggcggccattaagcgagcggccaacaggattggtgtaagcactgaactagcgcccaaacagggactgcccagtgaattggccaagggactgggcgtgggcagtggcttccggcggcgcagcgatgagggcgacgcagaagatttgaatgagggcgacgagagggagggtgagctcgatggcgacctcatggcagagttcagtgagtttaattaccagctagcgaagccggagcccgaggcacccaaggaaaaaagggatgactccaaaagcaatctcagcgagctgcagcgcctgatcagcaatctccaagaactgcaacagctcaatgtgagcttggaccaggtaaccacagcgacatcaagtccaaggcccaatccagacgccgcctatctgcagtcccttcagagtggccaagatgagactctgaaagaaaggcgtcagagcgtggaaaatgtcaccaccgagagtggcaagcagaaagatggcgatgatccgccaccgaccacccagtcccccaccaagattagtctgagtctgggcttagacgacatcgatggagacaccaaaggagcagttggagaggacgacagcagcagcactagtaccactaccaccaccgaggagccccggaatggatctctcgacgacttggcagactcatttggacctgatcctgtcagcgaggagccaccgccgcccaagaagaagaatggattttacttcctggccgactggaactcgttcctcgaagtgggtgacggcgatgaccaggtggtggttcgactcagtcccaagatcggggatccgcgcctatttctgcccgttaagattccctcgtag

SEQ ID NO: 23949 - protein, 1279 aa, DROSOPHILA
MLRECLALIALLQLGGVTRALPTIQGGNARQQLDKSFFQPPEIEQTIDEVQKILANDPALPRLTRGEIEELYEKVTREEYEKSLEAGDMSRADSMRALMLVLPFNTDNNTEENLQELYTRPPVTRVIDAYTPPDPVKFLTADPSALPRSTVPGGNPAVAATTYKPAYSLLHGQANPLQQQFRPMPQATTYHPPAPPPVVYQDFKPVTAASQPSANPAAAPSAARFSSHYSAKNAQFLRKPKPSEGGGGSLSSTVKPVADILESLGIVSGGKSDSAHKRYALDDYYPAESAPQPSVVAVADLRGLHGARIRPEAYSNFKPLNIGEELRVKPEVEGYLTRFGIVRKAPKALKKEAKPTEEPTGAHTELSTATARLPPTGNAELAKLLENLQELERLQSQPKRKTPKSTTTSTTTTTTSTTTTTTPAPVPLITHGEPLLIEAKKPRRRIDPNIDINFANGGNQQATPTGSDELSKLLQNLQELEKLKINPENVIKAASPGVQSLSSRFSTTSTSTSTTTTTTTTPSPSQNEARELQRILKQLQQLDQSSRTTTSTTSTTAKPLRNQALGLGVGQGNSLGAADLLQLQRLLSDDRELEKLYEQARNSKKKQHPKTTSSTTSTTSTTTTPRPTPSVDHAQFEALITRVQQLEQLQQPTTQPNFLTRNVAGSRPVISLPSNDYAHLQELSPTSASLLPGGGTVEISTAASTTKQRPLSQFERTNGLLREEVHPQDYVQLQKLLSKVQELERVQLRTEHVTHPHSQLVTAASIRSPNVKTVNGAHIVYAQPARDQVVELEPELKLDLPVYEKPVTMATPSQSSSEELRELAMSQPAHPQRGSSADFGQFQQFFGSLEDTGERQSYQHMQPIYKTVQNQPPTTPAAPRFVPARRAPTTPSSGPRKGDLEELQKLLYNTQQLQKLGVALPHELSQQLESQLQATSSSTSSTTTTTTSTTPAPAQVHDTSSPAVFSLTTSRPRVRPIPEAKPTTESSLQLPVFSATKIIEAAIKRAANRIGVSTELAPKQGLPSELAKGLGVGSGFRRRSDEGDAEDLNEGDEREGELDGDLMAEFSEFNYQLAKPEPEAPKEKRDDSKSNLSELQRLISNLQELQQLNVSLDQVTTATSSPRPNPDAAYLQSLQSGQDETLKERRQSVENVTTESGKQKDGDDPPPTTQSPTKISLSLGLDDIDGDTKGAVGEDDSSSTSTTTTTEEPRNGSLDDLADSFGPDPVSEEPPPPKKKNGFYFLADWNSFLEVGDGDDQVVVRLSPKIGDPRLFLPVKIPS

SEQ ID NO: 23950 - DNA, 8702 bp, DROSOPHILA
gacaataacagcgagctagccgagtttcattagcgttactttaaactaattaaacacgcgagcttagctaactcacgcaatttgttcgttttttgacaacaaaattaatagcagctgcgttgttatatttgttgttgttgttgatgcaggaacagttactagggaagcaagtgagagtgaggaagtgatggaaagagagagagcaacgtcagccggctgctggacacacacacacagaggcacacttgggcgcacgcacagggaattttattgatttttcacactcacaaacagtaacggtaaacaggagctgggcctagataacggtaatagtggccgaaaagcggacgcccagataatggaaattcgcagcacaatataaacacaaaagttgcattaatcgcaaccccggtaaaacgggaattgcttgcaggctctctgcgcctctttctctctctctcactccgtcccactctcacgttctccagcaactcctttttgctccctttttcaagcagcaatgattttggcacacgcccaaaaagcaaaacgccgcgcacttaaaaaaaaatagaagccaccaacttgcacaaaaaacacattcaccgttaaccccaaggactcacttttcttcagcaaaagcccatttccgaccggccgatcgctgtgggccaactcccccgttttgttgcactcgaccgtttttaagatgcgaaaacgcgcgccgcgcaatcgccttcacacagaaaacgcgtccggtcgcagcaaattcaaaacacgaatgaaaatgagggaagttgataaccagaccagaaaatgataaaggcaaggtgaccagatagccgaactgctccgctctggcagcacttttccggagcgtgtcgcgactaatttttctagcgatccggcagccccgttttaaaacggtaaacggtttaaagttttttcttcgcatatctgcctcacgtgtttggttttttgtcaattaactgtgtgcaaaatgctaatttggcacctgctgctctggccagcattaatagccagtgccccaccgcggcccctgaccgaccaaaaggccgaggtggccaagctgcgaagcgaactagaaaaagctctggaacacgacgatggaggagcaccagtgagtaaattagtgagcttggttttcgttttcaatcaacactcatagccgatcccagccaggagtggtggtggcacccacgtggacccagcaggcggggcaaatgccgcttggaaagacctccaaagtggtggtggaccatagctcgctgagcagcgcctccgccattcgccaggagattcagcaggcggtggctcaccagggacagaaccaagaggtcctccagctggaagctctgctgaaagcaagaggcagcagcaaggagagcacggctcaagtgtccacgtcccgtcaggaggtgctgggagcaactgtacaggaagccaatgtggtggagtcgcactcgacatcgcagaccgtggacctggaacaactacagcgcctggagctgtccaagaggcgcacccgcgacatgctcgtcctgggtcgcattgaagagttgctcaactacagcatgccgacggatgtggatcgctggctgaccctccaggccaatggaagcgttttccttgtgggtcagcagcaggagggcctcctggttctttcagaggaattcactccgttgcagtcttatgtccacccctttcccatcaccgccatgctgggaacagatcgctggaacagaagggtgcatatgcaggaaggtttgctggtgatggcttcccaggatcagcttatctggctgcgattggagcccagtcttgggctaaaacccatctggcactggacgattggctcgcatgtgaccaagattagagcattcaacatggagggacaagattacctcgctctcgtagcaaatcacacgcttaatatctacgtctatgatttggaagcggaggagttctggatcgcacaacgtgtgcaaatggcagagacgatctccaacctggccattctcgatacagggagggaactgctcttggcagtgggtcagtgggacgaggttctgatatacgcctgcacttcgaaggggcaaccgctgcacttgcgccaacaagttgctgcccccgaggtggccggcgtcactgccttccaaatgggcggacgcagctaccttgcgctgggtggaataatgccgcagatcctggtctacgtgcagggtcagcttgtgccacgcaccattcttggccagaactttggatttgtagaccactaccttccaatccccgtgcgcagctacagagacgacctacttctgctcgtccagcatcgagttgtctttgacacacattcactgctcgtcctggaggttttggtttggaacggtgaggcgtttgaggcgggcttgccgcctccttgtggtactgcctatggggcgggctgcatgttggatcaggatcgtgaggctggcatttcaggagctgtcctgctccgccgctcgacgaatcagccgccgctggttgtggtgcccaggaaagaagctcctacgggcatttttgtgctggaaactcaattgctggctaggaattcggagacacaggacctgctggagatccgacagttcatgcaggattgggtgcacgaacaggaagagctaatccagctggctgaagagctcttggcagagaagtcggagagtcagtacatcgaggagctatcaactccactggttgtaagcgagggcggaaccgttgaggaacttttcgttaatgaagctcgctggacgggagcggatgctgttgtggatgtaagctccctgcttcagcagatacttctgttggacggggaaatgagttctaggcgatctaaacgccagccagagacgctgttcaactttcactacgagcaactggaagtagaagccgttgactctgtggaacttaacttggagaagctcaaccatgagacgttctatatccgaaatggctcccttgacttgcatctgggaaccctcaatgttcagcaattggaacttctggaagctccgaaattggagctcgtcccagtccacggtgcagaatcatacaaaattctgaagatggctacggatttggacagcatttttattaacgaaatggagtgggacaagctgcttcaagatctggtgtggcgtcatcagcctcttaagctttcgcagttacatgtagagggagtaagtgggtccttcggcagagtttttaattgctaagtcaatctttgtcattctacagccggtcattttcgaagatgtactaagtttgcactctctgaacgacctaagctttccaggagactatctctggtcgcagggaaatgagacgagtgttgtccaggcgccaaaggagtttacgcaaacgctttgtgagtatcttaaacggaaaagaggaacttccttctaagattccttatcgtcaatagctgcaaatgctgtggacacgacgggaaccatcaacgccgtatacccgcatgatgtcattactctcagtgattcccaggaatggccgggattggtaaccttctcgcatttggaggtttctgaagaattggaggtttgtacttagaaagctattcactggctctcattactaagtccctatcaccaagcagctcaatggcagcgcccagggaaggcagtttgaggaggcacctttaaatcccactctgctggagtcacgtgttatcagtgccgactgccatttcgaacagcttcttgtgcgtggccctttgcggctgcttggaaaggtggataacgacagctttggctctctgctaggagatctcgttcagcgttcgccgaactctgcccaagaactacagataagtggacaaaagcgagttgaccagctgcttctgccagtggatgctcatatcgcagataatcagctcagtggaattttcctcaatgactttgttaccaagcacacgccacaaacgctgtcgaatctgagtcaactgggagggtatgtttactttcatcagctggagcttgggaaagagtcctcttacgacggagttcgcctagaggaactactctccaaaagtcttcgactagatagcccatttcccctgagttctccccacacacgccttcggtttgttggacatgccccaaatttcacccggctacaagttgaaaacaccttgaacaaggtgccgctgtcaagtggctaccagctgctccatgaaccgctccatctaggcagagctaactttagtcgtctgatggcagggcaagcgcaggttaactatgatgtctctggcaacgggctactcaatggacgaagcctgatccgtattctacaggagcaacctaggacttggtcgggtgaagtgcacgtgcaagagcttattcttccccagggtgtgcaggcgaaccagctgcagggcattaaggcagaccttctgctggattttctgcagcagctggacgagctcccgttgctgatccttcagggtcgcatccaagttgaacgcatcgccgtcaacggttcggtgcaagcagctgaaaccttgaacatgcaacccttccacgaacttcagaggcaagtcgtttggctggataggcagaacgaattagggacgcgttgggttctgaaagaatctccccagttccagcagaacctccaagttctgggcagctttaacgagcgcctgctcccagaattgctggatgacattgtgctgcgctccgacgcgcacgaggtgctgatcgagggcaccaaaagcttcttggctcctgttaacactaaagagcttcatctggctgcactgaatgggattcccttcaatcacatggccaacaaattatctccgctgcacctcactggaaatgtccgcattcagggacgcatctttgtggaggacctgcagctaaatggtcaagtaaacggagatccggacattcctgctgatctgcagaaactgctccgctgggatccaaatgcaggtggctttgtgcaccggggagtcgttgaacttccaaaaaaggagctagaacgcctagtggttttgggccacttgaaaaatcgcagccgtgagcccgttcaggaactctttgatcagctagtcttcaagcagcagcgtggcatacacttgcatggtcacaagactttcacaggccgtcttcgcattgaagatggagctcacatcaagttcttcaatggacgcaacctagaacagttcctagagaatttaatctacgtggattcgcagggagagatacgtttggaaacacctgttcgctttgcggctgatgttaaaatggatcatcttgaagcagatcgccttgtactgtcgggagagctgcttaacggatgcaatgtgagccagtggctccgggacactattcgtgtcgatcgcgatttccaacagcctgagagtgagtaaaagattcttcattttataattccattcaatcatattcgcatttcagttgcgtttgcaaagggatcgctggatggtaatttcttggaggttgaggagcttaacgaagttaatctctcactggttgtcacccgcttcacggagcaacagctaagcgatcccctagaggcagatgatttgctcctagatggccagctggtggtaaggggcactgttaatggttacaatctaccagaggagtatgccaacactttaatggtgagttaagtacgacaatttatactcaaaataacccccattactcatttgcatcctcagattaacccattgcgagagcagcaagtggatacgcctttattgttgtctaacatttttgtcaccggacccctggaggtaactgctccagttcatggtctaaacataagcgatgtggcaattttgggcgaagatccagtgctgctgcaatcgccgctatatttcgacactctgcatgctccgtttttgagagcgcaacagaacatcaatggatttgactttagggcttggtacggaggaagcttatgggcaagaggtcgggagcagcaggaaataagcgggaactggcgcgtaaagaaactgcaggtgaagcagggtgatgagctgcgaccacgtcgacaaactgcagaagagagctaccgggagttctgcgagggtttggtcaggattctcctgccttacaaggtccagaagctgcggcggagatttgatttaaatcaggaaagggatcaggagaatattcgccgagtatttgctttggaggcacccgggggcattagttatcttctgatcaacgagcgaggttgctggacccgcatccaccgctggaatggatctttattcgatcgatccggagccttcaagagcggacctgtggacgaggcagttgctttacgggtgggaaacacaagctctaaccaggactttgcctttatgaccagctacgagttgcaggatgatcagaacgagccaagcttgaattgcagtgcagtgaagcccattctgctgagctggaacctgaacaaaacaaagagcactactgagcacatggaactatcagcggacaccctaagaaatctcaaagatcaatatgagcagcttaaaaaccagccactccctaatcccagttaccagcaagcttttaagtatctgcagcgtcccagcatcaagtctcagctcggatcacagtggcaagagaataaacatgaactgagtccttcggagatggccagaatgcggagacgtctgctggacaccttggaattccggttgcaagcggaggtaaacattacccagttaagtattccagaaagcgacctattcgacgagcaccttgtggaggattttctggagttgatgcgccaattgcgaaccttgcgccggcgtctagatacagagactcttccactgccaaacacgccggcaagagttctggccgcacggagtgcccagctcatctggcccacgttgcaggagttgcgagaggtttcgagtggaaacgattctagcttccaggagcaagttctggagcaaacgctgctggatgtgctgatgctggctaatgaagaaaatggctcgggggatgatgaaaagctgcatgcggtgattcagagattgagaaaccttaaaggagagcttcaagggcaagaggaagacgacgagggacctgctgcctcctattcggacagaaatgagcagcgtttgccgctaccagaagtcgactggagacccattcaaacacttcgcctcgctgtgggaccagcaaaccgtccccgacttctttacgcccggctgaccgtggtgacaccaacagacggtcctccgcccaccacgccctccactgcgccagccgcccacatccaactgcatcatgcaaatggatcgctctttcaaacgctagcaggggagcatggagcacgccatctgacatcgttgcgggtacgagatgagacgctgctagcatttatggagggatgctgccgtataagagtgcttatctaccgcggtgtgcagggattcgtggactttgtccgtttccccgcacctgcccaagaagctaagagcggagatggggaggtcttgcagttactatccctacgcttacctctcaatcggccacccggagccatgtacttattggcagtggttcaagctcgacgcgtcactttctacgaagtggtggtagccggattactagagccgtggctccagtgcccatgattgttaaattaaaatgtatatgtaaacttgtttagatggatgatagtgagttgcttataagatgtagttagttatctttagtgtgctgtttgttaactgtgtaatattattgtaattattcttcttgttgtgaataaacattggtttggtgatgtttaaaaagtatataaacgataagattgccattcatatttgaattagttgacttgctgtttcccaaaaagaattgacaatctttaactatatagatatatatttatttcaagaacttagttacacatatacatagcattaaccacgactttttgcttgccctcgcactcagtgattgactcttacatcctaggccggacttacgactatgagcccacggattgcggatcccttatccgcggggcacgcagattgagaggacagtgactacaataaatacacacacattacgataacgcttggaagaggacgacgaagttgggaggaaacatatgtacagttagcctgtccgaaggatcctcctacgagggaatcttaacgggcagaaataggcgcggatccccgatcttgggactgagtcgaaccaccacctggtcatcgccgtcacccacttcgaggaacgagttccagtcggccaggaagtaaaatccattcttcttcttgggcggcggtggctcctcgctgacaggatcaggtccaaatgagtctgccaagtcgtcgagagatccattccggggctcctcggtggtggtagtggtactagtgctgctgctgtcgtcctctccaactgctcctttggtgtctccatcgatgtcgtctaagcccagactcagactaatcttggtgggggactgggtggtcggtggcggatcatcgccatctttctgcttgccactctcggtggtgacattttccacgctctgacgcctttctttcagagtctcatcttggccactctgaagggactgcagataggcggcgtctggattgggccttggacttgatg

SEQ ID NO: 23951 - DNA, 6357 bp, DROSOPHILA
atgctaatttggcacctgctgctctggccagcattaatagccagtgccccaccgcggcccctgaccgaccaaaaggccgaggtggccaagctgcgaagcgaactagaaaaagctctggaacacgacgatggaggagcaccaccaggagtggtggtggcacccacgtggacccagcaggcggggcaaatgccgcttggaaagacctccaaagtggtggtggaccatagctcgctgagcagcgcctccgccattcgccaggagattcagcaggcggtggctcaccagggacagaaccaagaggtcctccagctggaagctctgctgaaagcaagaggcagcagcaaggagagcacggctcaagtgtccacgtcccgtcaggaggtgctgggagcaactgtacaggaagccaatgtggtggagtcgcactcgacatcgcagaccgtggacctggaacaactacagcgcctggagctgtccaagaggcgcacccgcgacatgctcgtcctgggtcgcattgaagagttgctcaactacagcatgccgacggatgtggatcgctggctgaccctccaggccaatggaagcgttttccttgtgggtcagcagcaggagggcctcctggttctttcagaggaattcactccgttgcagtcttatgtccacccctttcccatcaccgccatgctgggaacagatcgctggaacagaagggtgcatatgcaggaaggtttgctggtgatggcttcccaggatcagcttatctggctgcgattggagcccagtcttgggctaaaacccatctggcactggacgattggctcgcatgtgaccaagattagagcattcaacatggagggacaagattacctcgctctcgtagcaaatcacacgcttaatatctacgtctatgatttggaagcggaggagttctggatcgcacaacgtgtgcaaatggcagagacgatctccaacctggccattctcgatacagggagggaactgctcttggcagtgggtcagtgggacgaggttctgatatacgcctgcacttcgaaggggcaaccgctgcacttgcgccaacaagttgctgcccccgaggtggccggcgtcactgccttccaaatgggcggacgcagctaccttgcgctgggtggaataatgccgcagatcctggtctacgtgcagggtcagcttgtgccacgcaccattcttggccagaactttggatttgtagaccactaccttccaatccccgtgcgcagctacagagacgacctacttctgctcgtccagcatcgagttgtctttgacacacattcactgctcgtcctggaggttttggtttggaacggtgaggcgtttgaggcgggcttgccgcctccttgtggtactgcctatggggcgggctgcatgttggatcaggatcgtgaggctggcatttcaggagctgtcctgctccgccgctcgacgaatcagccgccgctggttgtggtgcccaggaaagaagctcctacgggcatttttgtgctggaaactcaattgctggctaggaattcggagacacaggacctgctggagatccgacagttcatgcaggattgggtgcacgaacaggaagagctaatccagctggctgaagagctcttggcagagaagtcggagagtcagtacatcgaggagctatcaactccactggttgtaagcgagggcggaaccgttgaggaacttttcgttaatgaagctcgctggacgggagcggatgctgttgtggatgtaagctccctgcttcagcagatacttctgttggacggggaaatgagttctaggcgatctaaacgccagccagagacgctgttcaactttcactacgagcaactggaagtagaagccgttgactctgtggaacttaacttggagaagctcaaccatgagacgttctatatccgaaatggctcccttgacttgcatctgggaaccctcaatgttcagcaattggaacttctggaagctccgaaattggagctcgtcccagtccacggtgcagaatcatacaaaattctgaagatggctacggatttggacagcatttttattaacgaaatggagtgggacaagctgcttcaagatctggtgtggcgtcatcagcctcttaagctttcgcagttacatgtagagggaccggtcattttcgaagatgtactaagtttgcactctctgaacgacctaagctttccaggagactatctctggtcgcagggaaatgagacgagtgttgtccaggcgccaaaggagtttacgcaaacgctttctgcaaatgctgtggacacgacgggaaccatcaacgccgtatacccgcatgatgtcattactctcagtgattcccaggaatggccgggattggtaaccttctcgcatttggaggtttctgaagaattggagctcaatggcagcgcccagggaaggcagtttgaggaggcacctttaaatcccactctgctggagtcacgtgttatcagtgccgactgccatttcgaacagcttcttgtgcgtggccctttgcggctgcttggaaaggtggataacgacagctttggctctctgctaggagatctcgttcagcgttcgccgaactctgcccaagaactacagataagtggacaaaagcgagttgaccagctgcttctgccagtggatgctcatatcgcagataatcagctcagtggaattttcctcaatgactttgttaccaagcacacgccacaaacgctgtcgaatctgagtcaactgggagggtatgtttactttcatcagctggagcttgggaaagagtcctcttacgacggagttcgcctagaggaactactctccaaaagtcttcgactagatagcccatttcccctgagttctccccacacacgccttcggtttgttggacatgccccaaatttcacccggctacaagttgaaaacaccttgaacaaggtgccgctgtcaagtggctaccagctgctccatgaaccgctccatctaggcagagctaactttagtcgtctgatggcagggcaagcgcaggttaactatgatgtctctggcaacgggctactcaatggacgaagcctgatccgtattctacaggagcaacctaggacttggtcgggtgaagtgcacgtgcaagagcttattcttccccagggtgtgcaggcgaaccagctgcagggcattaaggcagaccttctgctggattttctgcagcagctggacgagctcccgttgctgatccttcagggtcgcatccaagttgaacgcatcgccgtcaacggttcggtgcaagcagctgaaaccttgaacatgcaacccttccacgaacttcagaggcaagtcgtttggctggataggcagaacgaattagggacgcgttgggttctgaaagaatctccccagttccagcagaacctccaagttctgggcagctttaacgagcgcctgctcccagaattgctggatgacattgtgctgcgctccgacgcgcacgaggtgctgatcgagggcaccaaaagcttcttggctcctgttaacactaaagagcttcatctggctgcactgaatgggattcccttcaatcacatggccaacaaattatctccgctgcacctcactggaaatgtccgcattcagggacgcatctttgtggaggacctgcagctaaatggtcaagtaaacggagatccggacattcctgctgatctgcagaaactgctccgctgggatccaaatgcaggtggctttgtgcaccggggagtcgttgaacttccaaaaaaggagctagaacgcctagtggttttgggccacttgaaaaatcgcagccgtgagcccgttcaggaactctttgatcagctagtcttcaagcagcagcgtggcatacacttgcatggtcacaagactttcacaggccgtcttcgcattgaagatggagctcacatcaagttcttcaatggacgcaacctagaacagttcctagagaatttaatctacgtggattcgcagggagagatacgtttggaaacacctgttcgctttgcggctgatgttaaaatggatcatcttgaagcagatcgccttgtactgtcgggagagctgcttaacggatgcaatgtgagccagtggctccgggacactattcgtgtcgatcgcgatttccaacagcctgagattgcgtttgcaaagggatcgctggatggtaatttcttggaggttgaggagcttaacgaagttaatctctcactggttgtcacccgcttcacggagcaacagctaagcgatcccctagaggcagatgatttgctcctagatggccagctggtggtaaggggcactgttaatggttacaatctaccagaggagtatgccaacactttaatgattaacccattgcgagagcagcaagtggatacgcctttattgttgtctaacatttttgtcaccggacccctggaggtaactgctccagttcatggtctaaacataagcgatgtggcaattttgggcgaagatccagtgctgctgcaatcgccgctatatttcgacactctgcatgctccgtttttgagagcgcaacagaacatcaatggatttgactttagggcttggtacggaggaagcttatgggcaagaggtcgggagcagcaggaaataagcgggaactggcgcgtaaagaaactgcaggtgaagcagggtgatgagctgcgaccacgtcgacaaactgcagaagagagctaccgggagttctgcgagggtttggtcaggattctcctgccttacaaggtccagaagctgcggcggagatttgatttaaatcaggaaagggatcaggagaatattcgccgagtatttgctttggaggcacccgggggcattagttatcttctgatcaacgagcgaggttgctggacccgcatccaccgctggaatggatctttattcgatcgatccggagccttcaagagcggacctgtggacgaggcagttgctttacgggtgggaaacacaagctctaaccaggactttgcctttatgaccagctacgagttgcaggatgatcagaacgagccaagcttgaattgcagtgcagtgaagcccattctgctgagctggaacctgaacaaaacaaagagcactactgagcacatggaactatcagcggacaccctaagaaatctcaaagatcaatatgagcagcttaaaaaccagccactccctaatcccagttaccagcaagcttttaagtatctgcagcgtcccagcatcaagtctcagctcggatcacagtggcaagagaataaacatgaactgagtccttcggagatggccagaatgcggagacgtctgctggacaccttggaattccggttgcaagcggaggtaaacattacccagttaagtattccagaaagcgacctattcgacgagcaccttgtggaggattttctggagttgatgcgccaattgcgaaccttgcgccggcgtctagatacagagactcttccactgccaaacacgccggcaagagttctggccgcacggagtgcccagctcatctggcccacgttgcaggagttgcgagaggtttcgagtggaaacgattctagcttccaggagcaagttctggagcaaacgctgctggatgtgctgatgctggctaatgaagaaaatggctcgggggatgatgaaaagctgcatgcggtgattcagagattgagaaaccttaaaggagagcttcaagggcaagaggaagacgacgagggacctgctgcctcctattcggacagaaatgagcagcgtttgccgctaccagaagtcgactggagacccattcaaacacttcgcctcgctgtgggaccagcaaaccgtccccgacttctttacgcccggctgaccgtggtgacaccaacagacggtcctccgcccaccacgccctccactgcgccagccgcccacatccaactgcatcatgcaaatggatcgctctttcaaacgctagcaggggagcatggagcacgccatctgacatcgttgcgggtacgagatgagacgctgctagcatttatggagggatgctgccgtataagagtgcttatctaccgcggtgtgcagggattcgtggactttgtccgtttccccgcacctgcccaagaagctaagagcggagatggggaggtcttgcagttactatccctacgcttacctctcaatcggccacccggagccatgtacttattggcagtggttcaagctcgacgcgtcactttctacgaagtggtggtagccggattactagagccgtggctccagtgcccatga

SEQ ID NO: 23952 - protein, 2118 aa, DROSOPHILA
MLIWHLLLWPALIASAPPRPLTDQKAEVAKLRSELEKALEHDDGGAPPGVVVAPTWTQQAGQMPLGKTSKVVVDHSSLSSASAIRQEIQQAVAHQGQNQEVLQLEALLKARGSSKESTAQVSTSRQEVLGATVQEANVVESHSTSQTVDLEQLQRLELSKRRTRDMLVLGRIEELLNYSMPTDVDRWLTLQANGSVFLVGQQQEGLLVLSEEFTPLQSYVHPFPITAMLGTDRWNRRVHMQEGLLVMASQDQLIWLRLEPSLGLKPIWHWTIGSHVTKIRAFNMEGQDYLALVANHTLNIYVYDLEAEEFWIAQRVQMAETISNLAILDTGRELLLAVGQWDEVLIYACTSKGQPLHLRQQVAAPEVAGVTAFQMGGRSYLALGGIMPQILVYVQGQLVPRTILGQNFGFVDHYLPIPVRSYRDDLLLLVQHRVVFDTHSLLVLEVLVWNGEAFEAGLPPPCGTAYGAGCMLDQDREAGISGAVLLRRSTNQPPLVVVPRKEAPTGIFVLETQLLARNSETQDLLEIRQFMQDWVHEQEELIQLAEELLAEKSESQYIEELSTPLVVSEGGTVEELFVNEARWTGADAVVDVSSLLQQILLLDGEMSSRRSKRQPETLFNFHYEQLEVEAVDSVELNLEKLNHETFYIRNGSLDLHLGTLNVQQLELLEAPKLELVPVHGAESYKILKMATDLDSIFINEMEWDKLLQDLVWRHQPLKLSQLHVEGPVIFEDVLSLHSLNDLSFPGDYLWSQGNETSVVQAPKEFTQTLSANAVDTTGTINAVYPHDVITLSDSQEWPGLVTFSHLEVSEELELNGSAQGRQFEEAPLNPTLLESRVISADCHFEQLLVRGPLRLLGKVDNDSFGSLLGDLVQRSPNSAQELQISGQKRVDQLLLPVDAHIADNQLSGIFLNDFVTKHTPQTLSNLSQLGGYVYFHQLELGKESSYDGVRLEELLSKSLRLDSPFPLSSPHTRLRFVGHAPNFTRLQVENTLNKVPLSSGYQLLHEPLHLGRANFSRLMAGQAQVNYDVSGNGLLNGRSLIRILQEQPRTWSGEVHVQELILPQGVQANQLQGIKADLLLDFLQQLDELPLLILQGRIQVERIAVNGSVQAAETLNMQPFHELQRQVVWLDRQNELGTRWVLKESPQFQQNLQVLGSFNERLLPELLDDIVLRSDAHEVLIEGTKSFLAPVNTKELHLAALNGIPFNHMANKLSPLHLTGNVRIQGRIFVEDLQLNGQVNGDPDIPADLQKLLRWDPNAGGFVHRGVVELPKKELERLVVLGHLKNRSREPVQELFDQLVFKQQRGIHLHGHKTFTGRLRIEDGAHIKFFNGRNLEQFLENLIYVDSQGEIRLETPVRFAADVKMDHLEADRLVLSGELLNGCNVSQWLRDTIRVDRDFQQPEIAFAKGSLDGNFLEVEELNEVNLSLVVTRFTEQQLSDPLEADDLLLDGQLVVRGTVNGYNLPEEYANTLMINPLREQQVDTPLLLSNIFVTGPLEVTAPVHGLNISDVAILGEDPVLLQSPLYFDTLHAPFLRAQQNINGFDFRAWYGGSLWARGREQQEISGNWRVKKLQVKQGDELRPRRQTAEESYREFCEGLVRILLPYKVQKLRRRFDLNQERDQENIRRVFALEAPGGISYLLINERGCWTRIHRWNGSLFDRSGAFKSGPVDEAVALRVGNTSSNQDFAFMTSYELQDDQNEPSLNCSAVKPILLSWNLNKTKSTTEHMELSADTLRNLKDQYEQLKNQPLPNPSYQQAFKYLQRPSIKSQLGSQWQENKHELSPSEMARMRRRLLDTLEFRLQAEVNITQLSIPESDLFDEHLVEDFLELMRQLRTLRRRLDTETLPLPNTPARVLAARSAQLIWPTLQELREVSSGNDSSFQEQVLEQTLLDVLMLANEENGSGDDEKLHAVIQRLRNLKGELQGQEEDDEGPAASYSDRNEQRLPLPEVDWRPIQTLRLAVGPANRPRLLYARLTVVTPTDGPPPTTPSTAPAAHIQLHHANGSLFQTLAGEHGARHLTSLRVRDETLLAFMEGCCRIRVLIYRGVQGFVDFVRFPAPAQEAKSGDGEVLQLLSLRLPLNRPPGAMYLLAVVQARRVTFYEVVVAGLLEPWLQCP

SEQ ID NO: 23953 - DNA, 3803 bp, DROSOPHILA
ttagtgacttatgtgacttatatgattcgagattgtaatttggttttattgcatttgatttagctgtaatttatggattttattttatggcgaatgctaatggcgcgaaaaggaaaccaaaagtaggcgaaggtcgcactgcagagttattaattagtacaactgaatttaactagtaacttaccaattgaagaacgtttttaatagtttggaaatcacaaaacaaaagagacaaaaaaataagcgcaggagaaaacacgcacgtacacacaaacacacacacgtatacttttaaatggcgagtgtaagtgaacatacgtttcgagcaatttattggacttccatccgttttcgggtaacatttcgatgctactcattgccacgacatgcacttaattataactaacacttcaaactgatttgcagcacttttttcaaacaaaagtcccgtaaatcaaaaatctttacgccgtaaaatagttgcttcttctttaagaagaaaaggaagaacaagaagagaactttgaaatgagcagcttcttcttcttattattgatcctcttttccgttatgtacagcacaccctcgcaaaaaggcacaagctgacgatctaatttggcaaaagtattgcaaatacaaataagttaacattccaaagtcagaaattaaatggcagctataaagaatataggtatgagaatattacgtttaaagattgtaataatattacaaagatcaaatctaatcaaatatcaaatatatgaacatttgcgatgtaaggtgcatgccaaatataaatttgataaaatcaacgtagttttagattttatttaatataatttttaaatattttcattaatcttagctgttaatttaatagtaataatatcaattgataattcgatagccgatagtcacagttggccggcgatgattgtatcgatagtatcgagtgccaatcgattgctgttacagctgttcgcgcatatgtgtgggtgggatttattcatagcaaggaaaattacgagttttgcggatataggattttacataagtttgccatgcacacgcactagcgccacaaatcgagatcggattgatcgatccggaactccgaatatcggaagcacaacaaagaggacggccgactgccccatgtgtgcgtgcgcgagtgtgtgagtatgtgcgtgagcgtgtgcgtgtgcgtgtgaatgaaaaaccatcaactgtgaaaatataaccaaaaataagtccgaggcacacggttgcaggcgaggattaccagtcctcccagataagccccggaggagcagcaggttccctcttagagccaattccgtcgcttttcagaatggcggatgcccaggcagcggcggccggaaagaagaagtacaagaacaaaaagaactcagcggagaagaaccccaatcacaatccaaattccagtggccaggtggaggcacagacacccagcaatggacacgttcagcaccaagaggaggaggcgacggaagaccaggagccagcgcaggaactcagaggcctgcttaaaaagatgcacctttgcaatggccatggtcacaaggagcaggaggctcggccgcttggggaggtcgtcaatggccatgcacatgggcacagcaacaacaatcacattcgctgcacaagcggcagcagcaacaacaacaacagcactcacaacaacaacagcgtggacagcagcaacaacaaccgcaagcagcgaagagaaggaggcgacggcggaggatcggattcgaactccctcaaaccggaggagaagcccataacagccacaagcaaaaccactgccaacatacacccaaccacaacgacggacccaaaaccaaaagtgtcggaggatgtagctgtggaacagggagtgcatgtggcgacggggagtggccacagtcgggagcaggagaggaagcaaccgccctccgactatgcagagggggccacgcccaccattacagcacagctccaactgccggaacctgccatttcagccgacgagatcgtatataaggaatacgaggctgaacaccaaatgcatgtgagtacctccaagtatgaccaagtgcgaactgtgcgcaacacttatctaattccccgcatatcgaacacgcaggacatcatgcgactgatccaggcggagctgtccgagccgtactcgatatacacgtatcgctacttcatctacaattggccaaaactctgcttcctcgcctcgcacgacaatcagtacgtgggcgccatcgtgtgcaagctggatatgcacatgaacgtgcggcgcggctacatcgccatgctggccgtgcgcaaggagtatcgcaagctcaaaatcggcaccacgctggtcaccaaggccatagaggtaggatgtctggggcatctttcccttgcaataagttataaatcgggttgcatgtaatcgatgctcgatatgtgtgttacggaacaattatgtgttgttaactatggatgaaattgccatcaaagctcaccaatggctcctcgagcctcgaggtatactttcgggcacattggcgagggatacataccaactacctctctttctgtgaaaacttatatcacactgcaattttcccatttgcaggcaatgctggccgacaatgccgacgaggtggtgcttgagacggagatgcgtaaccagccggctttgcggctctacgagaacttgggcttcgtgcgagataagcggctgttccgctactatcttaacggggtggacgcgctgcggctgaagctctggtttagatgagtggacccggcggctgccgttgaaattgttgtctaagtagccgccgaagatgtcgagatctgcgctctgcggaggaccagggcgctcccctcgtcctgggtcctggccagctggcagcttgtatcggcgccctcttttttgtacctatttaactaggaagcatcgtagcatcagtttattttctccccaactcacaccgtcccttgtctctctttcatttgtaaattattttattatgtagcagcagcagtacgagcaacatctgctacatatgcaggagcagcacgagcagcacacaacggacccgaaatttggttaattttacaggaggcaattttgtatgcaatacgtgatttacatgcataaaattaagcattaaagtcgtaagcaagcaattagttatgtacattaaacaatctacaaaaaccaatctagggaatagacaacaacatgaagcagcagcgcagcacacgctcatcgacgcccatttacaaagctataaacatagtatcaaattttgtaaaaagatcaatcaaagcgatgatcgcgcaagtcgaacgataaactcgatcatgtatatcaaaataaacgcaattggaaccaagagctgagaacagacacacaaaaatgcagcctcatatgcatacttgtatacaaaccttcaatgggtggatggcggtggtcctcgcggctaagaaaactcgccatctggtcttaagtaacctctctgtgctctccagaaacacgtaacacgtagcgataaggataaagatgtggtggatcccgagtaacattgaaagaacgcaataaaatcttcaacaaatgcgaaaatcctgccttctgttctttagtttagcacaacttggggaatagcgagcttgtttggaagtttgtgtggtgttttccaattgagaaactatatgccagtacggtattttcgttttattatcataaaaaacagaattataactactcgaactaggaaagtatgtcttacgga

SEQ ID NO: 23954 - DNA, 1503 bp, DROSOPHILA
atttattcatagcaaggaaaattacgagttttgcggatataggattttacataagtttgccatgcacacgcactagcgccacaaatcgagatcggattgatcgatccggaactccgaatatcggaagcacaacaaagaggacggccgactgccccatgtgtgcgtgcgcgagtgtgtgagtatgtgcgtgagcgtgtgcgtgtgcgtgtgaatgaaaaaccatcaactgtgaaaatataaccaaaaataagtccgaggcacacggttgcaggcgaggattaccagtcctcccagataagccccggaggagcagcaggttccctcttagagccaattccgtcgcttttcagaatggcggatgcccaggcagcggcggccggaaagaagaatggccaggtggaggcacagacacccagcaatggacacgttcagcaccaagaggaggaggcgacggaagaccaggagccagcgcaggaactcagaggcctgcttaaaaagatgcacctttgcaatggccatggtcacaaggagcaggaggctcggccgcttggggaggtcgtcaatggccatgcacatgggcacagcaacaacaatcacattcgctgcacaagcggcagcagcaacaacaacaacagcactcacaacaacaacagcgtggacagcagcaacaacaaccgcaagcagcgaagagaaggaggcgacggcggaggatcggattcgaactccctcaaaccggaggagaagcccataacagccacaagcaaaaccactgccaacatacacccaaccacaacgacggacccaaaaccaaaagtgtcggaggatgtagctgtggaacagggagtgcatgtggcgacggggagtggccacagtcgggagcaggagaggaagcaaccgccctccgactatgcagagggggccacgcccaccattacagcacagctccaactgccggaacctgccatttcagccgacgagatcgtatataaggaatacgaggctgaacaccaaatgcatgtgagtacctccaagtatgaccaagtgcgaactgtgcgcaacacttatctaattccccgcatatcgaacacgcaggacatcatgcgactgatccaggcggagctgtccgagccgtactcgatatacacgtatcgctacttcatctacaattggccaaaactctgcttcctcgcctcgcacgacaatcagtacgtgggcgccatcgtgtgcaagctggatatgcacatgaacgtgcggcgcggctacatcgccatgctggccgtgcgcaaggagtatcgcaagctcaaaatcggcaccacgctggtcaccaaggccatagaggcaatgctggccgacaatgccgacgaggtggtgcttgagacggagatgcgtaaccagccggctttgcggctctacgagaacttgggcttcgtgcgagataagcggctgttccgctactatcttaacggggtggacgcgctgcggctgaagctctggtttagatga

SEQ ID NO: 23955 - protein, 383 aa, DROSOPHILA
MADAQAAAAGKKNGQVEAQTPSNGHVQHQEEEATEDQEPAQELRGLLKKMHLCNGHGHKEQEARPLGEVVNGHAHGHSNNNHIRCTSGSSNNNNSTHNNNSVDSSNNNRKQRREGGDGGGSDSNSLKPEEKPITATSKTTANIHPTTTTDPKPKVSEDVAVEQGVHVATGSGHSREQERKQPPSDYAEGATPTITAQLQLPEPAISADEIVYKEYEAEHQMHVSTSKYDQVRTVRNTYLIPRISNTQDIMRLIQAELSEPYSIYTYRYFIYNWPKLCFLASHDNQYVGAIVCKLDMHMNVRRGYIAMLAVRKEYRKLKIGTTLVTKAIEAMLADNADEVVLETEMRNQPALRLYENLGFVRDKRLFRYYLNGVDALRLKLWFR

SEQ ID NO: 23956 - DNA, 2611 bp, DROSOPHILA
ttttctggtcaattcttcgggacagacgaacaccacatcgtcttccagctccccatcttccacgtcgtcatccacaatcaccacgctgttttgtgaatcgtctatcagtataacgctgttgtccatttctgtttaaaacggggttttctctgataattcagatttgcttgaaaatatttgttatttttctcccttattgcagggttgtcatgccaacgcaaagcaattgataatatatcgagcgctatcgatttctatttgcgatagctgcaatcgatattcggcgcctaaatttaaaaatcgttgcatatttattggtgtctcctgttttcattttttgtgttatatattctttcgaatggcttctaataaaaaaaattaacaataaaatgtagtgcaattatataaaccgatatattggatttttttttattaaaaaccatacttttcagctcgcatcatcttaagaaatatattaaatatatactatttaactttcctatacatatgtaagtaaaatatttccatcataagcaatttaattatgcaaacgggagttgaccatataaattctggagataacttcaaatttggcaatgtgtaatcatacttccgccttcggattcagaaattatgttaacttttctcagcacatctgacatgcgagtggaaccttgattctcgggagcagaagacgtcatgtcgcggctgatttgaatctcgcgagtcacctgctgaatgccaatcgcatcgatctcgaattaatgtggctcgcactcatggggaggaaaaccctgcttcaggggtaattgtgaattcaacttacaatcggggaattcttccgacagaacgcgtggaatgccgccgcctgccgtagaagatttcgtccaatttgaataaaagctcgccgagattgggccaccagttgcatgccaatgagcgcaagtcagcaccattcagcataaatagatgccatctttgatggggaggcacactcaccatggatcttctcaagaggcacctgctgctcctggtcatcggagcttgcctgtgtgtctgcgcccaggccacgatcaccatccagaaaaccaagccagcgctgccggatcccagccagttgctagccaagctaccgccaaagccggactttctcaaggatccctctaaattactagccaaaatcgcgcaatccaaaccagctctcccagatcccagccagctgctcgccaaactgccgcccaagcccgctatcctcaaggatcccagccagctgctctccaagttcgtgaaaccaaagccagtgatcataaagccggtgattgtgaagccggtggtggtggtcaagcccgtggcggttggcggaggtggcggtggtcacggccacggacatcatggacatcatggacaccatggcaagggcaagctataactttagatttctttatagagtaacagtaagagaaagagaaaggtgaaatataatttaagtaaatgtatacatctgtgacaagttcatcactcggctttaaaaacaatctataaaccacttcagtgtaaaatgcttatacttaataaaagcgtgtaagtaaagagtatgattatcagttaaaacgtgtcttccatatggtggccattgaacaacaagtgaaatagaaagtgaaaggggtttgctcgcccccagaaaatgtgacccagaaccttgagctctccataagcgcatatcgatgtgcataatgaatccatcactcgctaggctaacgatgtccctttgtgagcaaattgaaaggcgggactgcttttccagttgtcctgtcgccaacgcggcgtatgagcaattgcaatttgaggggcgcacggggcggatgcgcgatgctgggatgctcggcgtgggacggcacattagcacgcagcagcggaccaagtggcgataagagcgcgttttaatcaacgtaatcataatcatatgaccagaacagacattccgcggcggcacaatcgtataatttatacggttttcttggcttgagttcagtttgagttgtgttcgagtttgggttgtcttgcgtttatgtctcggggctctttgtaatcagccaatactaaccgcgcattatgcaaaaccatcggcaccaccaccagctccgacaccccgagcccttgcatctggatgctggatgctggatgcgagcggcgtataaaagcgacttggccagaagtttcgcaaacattttggcatcgcctgagttttgtgctagactcgtcgggaaagtgctcactaagttcattccgctcatccgtcaagccagcgaaaggtcctcagaatggtgagtgcagggaatatggtcttgtctgtcaggaagtggtatcacaaattaaaggaaagacagtgactcgaaagatcgtgtgaaattaataactatggatgctgctgttcaaggatctttgaagtgttttaatggccctgaaagcttcagaaaaaaagttcttactagttaattttttaaatattttgtttttcaatgctgacgttaactgcagttccggtaaagaagagatgaatcttcgagatcacgttagcacccagcggaaccagaaccatgtcccaaccaaa

SEQ ID NO: 23957 - DNA, 611 bp, DROSOPHILA
atggatcttctcaagaggcacctgctgctcctggtcatcggagcttgcctgtgtgtctgcgcccaggccacgatcaccatccagaaaaccaagccagcgctgccggatcccagccagttgctagccaagctaccgccaaagccggactttctcaaggatccctctaaattactagccaaaatcgcgcaatccaaaccagctctcccagatcccagccagctgctcgccaaactgccgcccaagcccgctatcctcaaggatcccagccagctgctctccaagttcgtgaaaccaaagccagtgatcataaagccggtgattgtgaagccggtggtggtggtcaagcccgtggcggttggcggaggtggcggtggtcacggccacggacatcatggacatcatggacaccatggcaagggcaagctataactttagatttctttatagagtaacagtaagagaaagagaaaggtgaaatataatttaagtaaatgtatacatctgtgacaagttcatcactcggctttaaaaacaatctataaaccacttcagtgtaaaatgcttatacttaataaaagcgtgtaagtaaagagtatgattatcagttaaaa

SEQ ID NO: 23958 - protein, 142 aa, DROSOPHILA
MDLLKRHLLLLVIGACLCVCAQATITIQKTKPALPDPSQLLAKLPPKPDFLKDPSKLLAKIAQSKPALPDPSQLLAKLPPKPAILKDPSQLLSKFVKPKPVIIKPVIVKPVVVVKPVAVGGGGGGHGHGHHGHHGHHGKGKL

SEQ ID NO: 23959 - DNA, 5149 bp, DROSOPHILA
tccgccatttccgacgcaagacaaatcggatcggctgatagtgctgataatgcgtcgagttaaataagcagagtccggtttgacctgttgcataaccattccggtaccgatcaactaattctaggtgcattaactgcaccgagtttgggtaacttgcaaatgcgcaagcaaagggttaagccgggtcacattcacatttggcccccaatgcgctactctactcactgaaatacaggctgtagctcggcgaattcttagcgcccttctcaacggtttcgtacagagccatctcgtgtgatttcgtgcgcttccgttctatctgaatatatctgcaattgctggcaagggccgctggtgacgttggaatcgagccggacaagcgaccaaccgcacgtgaagcgtaaaatgaactccttgtaattttcgccaacattttcttcagccctgagttgagtctatcgatagggcgataggacccgattttacagttaacagtgctgctcagaaaatgtatagctcgattccatttcatccattccaatggagaatgaacttcattttttcatacaattagaactattattataaatattattatatgaaaactataacattataattattattattaaatataaaatacaatattgtaattataattattatacaaatctatttacagtataaataagacaactatcaaaaccttaaagattatttagtttttgtcaaatcgtaaaaacttaaacaaaatatgctttgaatatgttcatacctgcagaagaagcacttagaaatattttaaaagtttcatataagtgattgaattttttataaattcgaagtcaataggttttacttgtactggttactgatcgttgcgaaattgtccgaattctggtcatgttaacttaacattaacaaagcttccaactgggaactatcggtgctatcggggatccgagcagtgtcatcgataacattggcaatcgagttttctaaattctgagttttcttttcgtctgtcgtgtgtgcgtgttgccttgctttcgagttggcgttgcaaaaattcccctttattttgctgacgagatattccaaaagagtaaacaaaccgggggatccaagaaaccccagcttttatccgaaagcagtcgttacacgtacattttcaagtgcccgtggcaacaagtaaattccccccctccattcactgcaaaatctctagtgaaatgcagaacggaaaaccgagatcttcggccaggccgtcgttccaccgccgtcccaaagacggagtggccaacaccaccactgataacgctgctgtcaagccggaggccttggagagctatacgggcaacgacgacaacgcctgcgtggtgtgcttcaaaaacgtggaaattttctccatcggcgactgtgatcatcccgtgtgctacgagtgctccactcggatgagggttctctgccagcagaacgagtgccccatctgccgccacgtcctgtccaaggtaagtcctgcgcttgtctagagaaccgaatctctatctaattctaaaacacttgcaggttttgttcacactggacaagctgccctatcgcgaactggaggcaaataaccgctctgatttatacagcaagaagtaccgcatcggcttctgcaccgcagagataagacagcaattcttcaaattgctcgaccatccctgcccgaagtgagtattctgcccgcacttgagttgcaccattgaggctcacccttctacgctaaattgcagatgcgatgcacctccataccgcacgttcgagggccttcgcaaccatgttcgcagcgagcataaacttctgtactgtgacctatgcgtcgagaccctcaatatcttcaccttcgaacggaggtgctacactcaggcggagctgcagctacacaacaccaagggcgatccggacaatcggtcgcatcgcggtcatccgttgtgcgaatactgcaataaacgctatgtggaccgtgatgagttgttccgtcatttgcgccgcgagcactacttctgccacttttgcgacgccgatggttgcaatgagttctacaatgactatgcggatctggcggaacatttccgggcggagcactttctctgcgaggagggtaagtgcgccaccgagcagtttgtcggcgcattccgcaacgaaatcgagtacaaggcgcacgtggccaacgtgcacggcaagtcgctcaacaagcagcaggccaagcagacgcgcaccttgcaggtggagatcactttggggcctcgtggccgtagtgggcagacggagcagggcataaccagcgtgagaaccaggtgagtgagcggccatccaatttgaagaaggcactcttagaatggtaaaccttacaggaatgacgagcacaacgactaccagaacgatttgccttcgatcacccagcgccatgtgagcattgatgctggcaacgaggaacagtttcccacattgagaggcgcttccacagctcccagcgtatccttggtgagaccgccaccgccctcgatgcgcaatcttagtggaacttctggtcttgctcggaccaaagaaaacttcccggctctgggaggaggaaatggaggtggtgttactgggcccactagcagcagcattgccgcccgggctgctcaatcgcagcaccccgtggcagctgtctttaagaaacccacaagcgcggcaggttctggcagtcgaagtgggcctcccggtaacggaatgctcctgcatgtgtcaaatcgatcagcagccgtgcccaaaaaggcagccacgccgcaggtagactttcctgcattaccgggtaaggggaacaagaagaatctgcgcaacctggaggaggatatgctgcctagcggatcgccagtgccgatggcgaacatctccgctaagcatcggtctctagccgatgactacgtgtcagtggctagcccgagcacctttcaaaagcttcaaatggtacaaaaggaggaggacgaggccaaagcgcgccaggaggctttgaagaagagtgctcccaaactcactgcggcggaattccctagcctcggaccgagtgccagcgccagctcaagcaggacgactgctccaaagcccagcagtggatctccttcattgaactggtcgaaaccagctaatgagaagaagcagcgtgagctggagaatcgcaaggccaaagtggcgccggccccggttctgccgagtccaacatcgaaacctgctcccaaggcaagcaacaacaatgttcaagagcagcaggcaaataaaaaggataaaaagcagaaggataaaaagagcaaccaggagaatcagcctaagacggccaaaccgaaggagagaaataataacaacgaacaaaaaaccaatggggctccgtctacgccaatacgtgctcctcccggcttaaaacctggcggaccgctaaagccaccaccaggattcgtgtccaacgtgactgttaactcggtggccaagctgcccaacaatctcacgttcaccaattcgctgggcgagtcgtatgacattgtacccagcccctatacgtacaccgatccaccagataccgaggtcaggaatcaggtaagctaacgtcgtttgccaattagttagaaaacattaacttaaaaagcatttgtcttgcgtccagaaattggttgatgaggttatgtccctgctcaagaccccagaggcgttgaacgaattccgcttgctttcgtctaagttccgcgacggatcctgttctggccaagcctattacgagcactgccagtgcgccatgttgagctcattttacaacctgttcccggagctgctggccatgctgccggacataagtaagcaacaggtaagacccgtttgcaaaaccacataatagtaaataaagagtaactccattatttgcgccatttccaggaactttacctagtgcacaaacaacacctgaacagcttgccgcccgccgagcgcaaatccgtgcccgcgcttgaagtttgcaaggtgtgcaaacagatcctcatcaccgccgacttaaagagccaccagcaggcgcatgagctgaccaaaaacttccccgtactcggaagctcagcctctaacacgcaccgcaattgaggtggtcggattgtaggacaacaaaagctttatccctgtatattttctatgtacatatataccgtgtcaaccatctaggaaccatgtccccagatcatgttgtgagtggaaacccgaaaaagaactagccgaacccatcagtccatgtagcgcgacccacgaagccatctgttcaatgtgacttagtccggacagaagcttatcttggatgcgtttctaatatttacgagtgagcttgtgtctagcaaatgcccgcaacctaataaagttcaaatcaatcacaattattagtcgtaatcacctggtatgtttgcctaacctgtcgccctatctaatgtccacatatggtggtcgcaaattggttatcaccaaatggaaattggttgtagttgttgggtcgtatggagcagatttattatcggacatatggagctcttctgctcttatctacgtggtttgctagctggggagcgatgcttggtagttgagttttctgatttgaggaaaagtagagcttttgtcgaatatgaaattcgagaaaagctcattctccatttttctacatagaattattatgaaggtagaaatctataaaggcgcgcagactcgcgttagtacatttttaaataaatcaaatttaactaacactgttttgtattaagtttttattacgtaacacataaatgtctgaatccatattaattactggttataatgttactataattatttatatgaaaatgcattactgaagattattttttttggatagacctacggtcacactaaagtcgcaaacaacaataacaatggaccggcgagaggatgctctgctacaggtaatgttattaattaccatatatgaatggagaaactggggtaattactttatggaaccctgtacgacaggccctccaaacgaacgccagcgagacagagcgctgggaagccttcaagcgcgataatgagagcaccatccggaacttggacaagttcgcaa

SEQ ID NO: 23960 - DNA, 2836 bp, DROSOPHILA
aaattctgagttttcttttcgtctgtcgtgtgtgcgtgttgccttgctttcgagttggcgttgcaaaaattcccctttattttgctgacgagatattccaaaagagtaaacaaaccgggggatccaagaaaccccagcttttatccgaaagcagtcgttacacgtacattttcaagtgcccgtggcaacaagtaaattccccccctccattcactgcaaaatctctagtgaaatgcagaacggaaaaccgagatcttcggccaggccgtcgttccaccgccgtcccaaagacggagtggccaacaccaccactgataacgctgctgtcaagccggaggccttggagagctatacgggcaacgacgacaacgcctgcgtggtgtgcttcaaaaacgtggaaattttctccatcggcgactgtgatcatcccgtgtgctacgagtgctccactcggatgagggttctctgccagcagaacgagtgccccatctgccgccacgtcctgtccaaggttttgttcacactggacaagctgccctatcgcgaactggaggcaaataaccgctctgatttatacagcaagaagtaccgcatcggcttctgcaccgcagagataagacagcaattcttcaaattgctcgaccatccctgcccgaaatgcgatgcacctccataccgcacgttcgagggccttcgcaaccatgttcgcagcgagcataaacttctgtactgtgacctatgcgtcgagaccctcaatatcttcaccttcgaacggaggtgctacactcaggcggagctgcagctacacaacaccaagggcgatccggacaatcggtcgcatcgcggtcatccgttgtgcgaatactgcaataaacgctatgtggaccgtgatgagttgttccgtcatttgcgccgcgagcactacttctgccacttttgcgacgccgatggttgcaatgagttctacaatgactatgcggatctggcggaacatttccgggcggagcactttctctgcgaggagggtaagtgcgccaccgagcagtttgtcggcgcattccgcaacgaaatcgagtacaaggcgcacgtggccaacgtgcacggcaagtcgctcaacaagcagcaggccaagcagacgcgcaccttgcaggtggagatcactttggggcctcgtggccgtagtgggcagacggagcagggcataaccagcgtgagaaccaggaatgacgagcacaacgactaccagaacgatttgccttcgatcacccagcgccatgtgagcattgatgctggcaacgaggaacagtttcccacattgagaggcgcttccacagctcccagcgtatccttggtgagaccgccaccgccctcgatgcgcaatcttagtggaacttctggtcttgctcggaccaaagaaaacttcccggctctgggaggaggaaatggaggtggtgttactgggcccactagcagcagcattgccgcccgggctgctcaatcgcagcaccccgtggcagctgtctttaagaaacccacaagcgcggcaggttctggcagtcgaagtgggcctcccggtaacggaatgctcctgcatgtgtcaaatcgatcagcagccgtgcccaaaaaggcagccacgccgcaggtagactttcctgcattaccgggtaaggggaacaagaagaatctgcgcaacctggaggaggatatgctgcctagcggatcgccagtgccgatggcgaacatctccgctaagcatcggtctctagccgatgactacgtgtcagtggctagcccgagcacctttcaaaagcttcaaatggtacaaaaggaggaggacgaggccaaagcgcgccaggaggctttgaagaagagtgctcccaaactcactgcggcggaattccctagcctcggaccgagtgccagcgccagctcaagcaggacgactgctccaaagcccagcagtggatctccttcattgaactggtcgaaaccagctaatgagaagaagcagcgtgagctggagaatcgcaaggccaaagtggcgccggccccggttctgccgagtccaacatcgaaacctgctcccaaggcaagcaacaacaatgttcaagagcagcaggcaaataaaaaggataaaaagcagaaggataaaaagagcaaccaggagaatcagcctaagacggccaaaccgaaggagagaaataataacaacgaacaaaaaaccaatggggctccgtctacgccaatacgtgctcctcccggcttaaaacctggcggaccgctaaagccaccaccaggattcgtgtccaacgtgactgttaactcggtggccaagctgcccaacaatctcacgttcaccaattcgctgggcgagtcgtatgacattgtacccagcccctatacgtacaccgatccaccagataccgaggtcaggaatcagaaattggttgatgaggttatgtccctgctcaagaccccagaggcgttgaacgaattccgcttgctttcgtctaagttccgcgacggatcctgttctggccaagcctattacgagcactgccagtgcgccatgttgagctcattttacaacctgttcccggagctgctggccatgctgccggacataagtaagcaacaggaactttacctagtgcacaaacaacacctgaacagcttgccgcccgccgagcgcaaatccgtgcccgcgcttgaagtttgcaaggtgtgcaaacagatcctcatcaccgccgacttaaagagccaccagcaggcgcatgagctgaccaaaaacttccccgtactcggaagctcagcctctaacacgcaccgcaattga

SEQ ID NO: 23961 - protein, 867 aa, DROSOPHILA
MQNGKPRSSARPSFHRRPKDGVANTTTDNAAVKPEALESYTGNDDNACVVCFKNVEIFSIGDCDHPVCYECSTRMRVLCQQNECPICRHVLSKVLFTLDKLPYRELEANNRSDLYSKKYRIGFCTAEIRQQFFKLLDHPCPKCDAPPYRTFEGLRNHVRSEHKLLYCDLCVETLNIFTFERRCYTQAELQLHNTKGDPDNRSHRGHPLCEYCNKRYVDRDELFRHLRREHYFCHFCDADGCNEFYNDYADLAEHFRAEHFLCEEGKCATEQFVGAFRNEIEYKAHVANVHGKSLNKQQAKQTRTLQVEITLGPRGRSGQTEQGITSVRTRNDEHNDYQNDLPSITQRHVSIDAGNEEQFPTLRGASTAPSVSLVRPPPPSMRNLSGTSGLARTKENFPALGGGNGGGVTGPTSSSIAARAAQSQHPVAAVFKKPTSAAGSGSRSGPPGNGMLLHVSNRSAAVPKKAATPQVDFPALPGKGNKKNLRNLEEDMLPSGSPVPMANISAKHRSLADDYVSVASPSTFQKLQMVQKEEDEAKARQEALKKSAPKLTAAEFPSLGPSASASSSRTTAPKPSSGSPSLNWSKPANEKKQRELENRKAKVAPAPVLPSPTSKPAPKASNNNVQEQQANKKDKKQKDKKSNQENQPKTAKPKERNNNNEQKTNGAPSTPIRAPPGLKPGGPLKPPPGFVSNVTVNSVAKLPNNLTFTNSLGESYDIVPSPYTYTDPPDTEVRNQKLVDEVMSLLKTPEALNEFRLLSSKFRDGSCSGQAYYEHCQCAMLSSFYNLFPELLAMLPDISKQQELYLVHKQHLNSLPPAERKSVPALEVCKVCKQILITADLKSHQQAHELTKNFPVLGSSASNTHRN

SEQ ID NO: 23962 - DNA, 3417 bp, DROSOPHILA
ccgcacctcgatgcgcagtcgttcacactcctccaggctaacatttttgctcacatttagcaactgctccagtgggtttacgatgtacatggccgagtgatccggcttggacagcggctttccctcgttcaaagatatcgcacggttgtggaagtcgaactgcgagtagaactcgaagaactgcagcaacaactcgctcagcgagctttggtttcgactcctgaagcccagacgatccacattccgggtgaaggtgcagttgatcccgtcctcggtgacccgcgagtcccctggctccgccgccttggccagcgctccaattgtgggaaggatgggctggcgcagctgctgcaggaagaacatgaccaggcaggtgagcgagaagttgctgatccagcgaccaggcgagggattcgtgaggccgcaggtctgcgcccagcgccgaatggtaaaggtcaacggccgtacgcgcggatccatttcaccgaacatgtaaagcagttccgacatataaaagccagtgctggaagagggattgcgtttaaaaccatcttcttaaaacatatttaatgccaacatgcaatactgatcgccccaaaggcgggaaggtaaaaacgggcgtggcctcgtttaatgagacaaccagcggtgtgtagcccgctgacccccaccaatggccggatatgcgtgcagcgggtacttatcaggggcggatgaatgggatgtgaatcatggccatcggcacgccagggaagtcagtgccgcggagagaactgattcacctgctcacctgcgggagagcagcgtaccatttacacatatacacgacatttggcaatcgccacctgccgctatcttatcttatcgagctgatgaagctttcttatctaaggccgctctccctcccctgcctgactgtacggccccactagcctggatgttgtcaccgccgcgtatctcagccgagccgcaagtctggtcaaaacgatttcaacgaacgagcccaacggacatctgtttctagtccgccactgagctagctatttttttcttccgaccccacgagaatcgacccaagcaaggtgaatcctagtaaaaagtgcctacaaattcccatttctacgaaatgataaatggatggtccattttttttaagtgctattgaagaagtgttgaatttcggtatgggtaccacacccaaaagacagtttcccaatggataaacgtatctacacaaaacgtcttacaaaagttgattttaagtgatgcttggaggatgttactcaggtgcacagggatacgcccgcagctccagtacctggcccatttcaatactcttgaatagtttggtgttgcaattgctcgtattaatcatctagtgcgtggctgataacgctatttgctaaacacagctccgataaggccaacgatgatacagtgaacggcgggaaagggcggggagaatcaaccataaatgccaagcaacatcgtgattaataggcgcgaccagggcgagcttttggtatgtgactcaatggagctcctcgaaaatgagcaaggatcaatgcaccgtctaaatagtgcttctatcaagtagcgcctcctttgtcctgggttttcagatcacgcacttgtcatcatccacctaatgatccttctcttgccttgcagcttccgaaacgatgggcatcggctatggagcctccgacgagcagctggagaagcaaattggctgcgtgaaatacacgctattttgcttcaacatcgtggcctggatgatatccacagcgctgttcgccctaaccgtctggttgagggctgagcccggcttcaacgactggctgcgcatcctggaggcacagtccttctacatcggcgtgtacgtgctcatcggcatcagcattgtaatgatggccgtcagcttcctcggctgcctgagcgcgctcatggagaacaccctggctctgtttgtgttcgtgggcacccaggtctttgggttcatcgccattgtggccgggtcggcggtcctattgcagttcagcactatcaactcgagcctgcagccgctgctgaatgtatcgctgcgcggctttgtggccacatcggagtatacgtactcgaactacgtgctgaccatgattcaggagaacataggttgttgcggggccaccgggccatgggattatctcgacctgcgccagccactgccaagctcctgccgcgacaccgtcagcggcaacgccttcttcaacggatgcgtggacgagctgacctggttcttcgagggcaaaaccggctggattgtggctctggccatgacgctcggcctgctcaacgtcatctgcgcggtgatgagctttgtgcttgtgcaggcggtcaaaaaggaggaggaacaggccagcaactaccgccgctgaagaccagcctcgttaatttagttagtagcgacaagtgacccttcgatagatctaagaattcatacccagttcgaacaataagtacaataaagattgcgaccctcacaaggaaaggtgtctcagcggacgggaatcacagattgcttgccaacagacagacgaatggtggtataagcaggcacacagcacttagcacatagcacttacaggttactcatggagaggtccacctccaggtccagatgctcatggtggtacttgatgatgggcaccctcgcctgcaaaatacgtctcacatggcacacgccgggcaggaacagatgcagcatatctccaaaacattccatgtgcctttgcgtctgcgagcgtccgttgctcaggttctccttggtgtggtacacgagtcgcgagggcaccgccgcctccagtgggatcttagctcccatatcgctgtcaaagcgcaggatgaggtccaggtcgcagcccattcgcccaaatccgttgaccgacgagccaaagggctgtgcctgggcggcgggaaacatgccggcaatggcctgctgcacctgtagggcggctagaaagcgcatacggattcccagctcattcaggcgcgtgtgctcgtacagctgctgcacctgctcttcgatgtccgctgcaccacgtaagagccccagtaggtggcgctgatccacctgccgggtgccgtccaaggatagcagtgcgggcgctgtattggcaactagcttggggctccgtctgcctcctcccgctgcccggaaccacagaaagggagatcgcacgggcacgccgctcagctcgccattggtaacgcccgctccgatggcagccgccgcctcgtccgacgtggcgtactccagcaggatgtagtgcagggtctcgtcctgccgcacgcagtagtggtgggcacccatgatcgagccgaagctgctgcagtagttatacaactcctcatacgacttttcggagctcacctgga

SEQ ID NO: 23963 - DNA, 828 bp, DROSOPHILA
agcccaacggacatctgtttctagtccgccactgagctagctatttttttcttccgaccccacgagaatcgacccaagcaagcttccgaaacgatgggcatcggctatggagcctccgacgagcagctggagaagcaaattggctgcgtgaaatacacgctattttgcttcaacatcgtggcctggatgatatccacagcgctgttcgccctaaccgtctggttgagggctgagcccggcttcaacgactggctgcgcatcctggaggcacagtccttctacatcggcgtgtacgtgctcatcggcatcagcattgtaatgatggccgtcagcttcctcggctgcctgagcgcgctcatggagaacaccctggctctgtttgtgttcgtgggcacccaggtctttgggttcatcgccattgtggccgggtcggcggtcctattgcagttcagcactatcaactcgagcctgcagccgctgctgaatgtatcgctgcgcggctttgtggccacatcggagtatacgtactcgaactacgtgctgaccatgattcaggagaacataggttgttgcggggccaccgggccatgggattatctcgacctgcgccagccactgccaagctcctgccgcgacaccgtcagcggcaacgccttcttcaacggatgcgtggacgagctgacctggttcttcgagggcaaaaccggctggattgtggctctggccatgacgctcggcctgctcaacgtcatctgcgcggtgatgagctttgtgcttgtgcaggcggtcaaaaaggaggaggaacaggccagcaactaccgccgctga

SEQ ID NO: 23964 - protein, 244 aa, DROSOPHILA
MGIGYGASDEQLEKQIGCVKYTLFCFNIVAWMISTALFALTVWLRAEPGFNDWLRILEAQSFYIGVYVLIGISIVMMAVSFLGCLSALMENTLALFVFVGTQVFGFIAIVAGSAVLLQFSTINSSLQPLLNVSLRGFVATSEYTYSNYVLTMIQENIGCCGATGPWDYLDLRQPLPSSCRDTVSGNAFFNGCVDELTWFFEGKTGWIVALAMTLGLLNVICAVMSFVLVQAVKKEEEQASNYRR

SEQ ID NO: 23965 - DNA, 4376 bp, DROSOPHILA
ttacctagtgcacaaacaacacctgaacagcttgccgcccgccgagcgcaaatccgtgcccgcgcttgaagtttgcaaggtgtgcaaacagatcctcatcaccgccgacttaaagagccaccagcaggcgcatgagctgaccaaaaacttccccgtactcggaagctcagcctctaacacgcaccgcaattgaggtggtcggattgtaggacaacaaaagctttatccctgtatattttctatgtacatatataccgtgtcaaccatctaggaaccatgtccccagatcatgttgtgagtggaaacccgaaaaagaactagccgaacccatcagtccatgtagcgcgacccacgaagccatctgttcaatgtgacttagtccggacagaagcttatcttggatgcgtttctaatatttacgagtgagcttgtgtctagcaaatgcccgcaacctaataaagttcaaatcaatcacaattattagtcgtaatcacctggtatgtttgcctaacctgtcgccctatctaatgtccacatatggtggtcgcaaattggttatcaccaaatggaaattggttgtagttgttgggtcgtatggagcagatttattatcggacatatggagctcttctgctcttatctacgtggtttgctagctggggagcgatgcttggtagttgagttttctgatttgaggaaaagtagagcttttgtcgaatatgaaattcgagaaaagctcattctccatttttctacatagaattattatgaaggtagaaatctataaaggcgcgcagactcgcgttagtacatttttaaataaatcaaatttaactaacactgttttgtattaagtttttattacgtaacacataaatgtctgaatccatattaattactggttataatgttactataattatttatatgaaaatgcattactgaagattattttttttggatagacctacggtcacactaaagtcgcaaacaacaataacaatggaccggcgagaggatgctctgctacaggtaatgttattaattaccatatatgaatggagaaactggggtaattactttatggaaccctgtacgacaggccctccaaacgaacgccagcgagacagagcgctgggaagccttcaagcgcgataatgagagcaccatccggaacttggacaagttcgcaaagaatctcagcgtggaggttatggtgcccattggacggaaggcgctgatgcccggcgagctgatccacaccaacgagcttctggtgggtcattacgagggctacttctccgcctgctcctcccacaaggccaaggagatctgccagtaccgcctgaagctggccgaggagcagctgaagaagctggccgtggagaacgatctgtggcagtaagtgtatcagtaaatagaagtagggaagagtaatgtttacgctcctccaacaggaaaaaactccacactccatttgcggagggggcggttcccagtggcgaccaagtagaaattgtggaggatttcaacgaggagtctcacaacaagtggttggcggagcacagaaagcgaatgcgacagcaaaagcagaaggagcgcctcgaacgggaggcggaacctgtgaagaaagataatgaagtgctgcggaagctagaagagcgagaaatgatggaggaacttggtctagatccagataatatcgacgaggatcagctgcacgatatgctgaatcaagaacctctgaaatccaccaacgaaagtagtcctaaatccttaacccaggaagaggaggatgagctgtggaagaagctggaagccgaggagcagaacgaagccgatgagctcagctcagaagcagaagaaagccttaaaacaacggataacctagtgcgccagctcatgtccggagaaacagaaactccatcttccaaaaaacgcactgcaggaaccaatagaaacgtggaaatacaggatcccatatcggaagatgatggtgatgatgatgatgagggtgaccaggaggaagaggtgcgaaccatacgggagcagatgtcgctgctacccaacgaagatcgtgagccgttcctcagagctcaactgcatgtacttaaagcaaaaatgaggaagatacaaaaggtcaactttataagcgatgagctgattcacttgatgaatgtggtggtcatgctagaggacgacctacaggacttggtatttgagcaggaactggaggccagcgaggaagaggaggaggttgtcgaaaacaatcatcttccagatgagccaagcaaagagctttcgactgtatctgaatccagcacaaataaacgtcgcatttcgtttgccctcgacgacgaaaaacttgaattcagaagggaggagaccgttgccgaaatgttgcccaatgcgaaaaagaactcgagggatatcatcaagctaaatgcacctcttaaaccggcaggagatccacaacccgcatccattaaaacaaaacgtcaaacaacccaggatatcttgcaaaaagtagaacgaaacattgagtttgtcaaggaaaaccagagtgtccaggacttcgatttactcaatcgaattatggaagagtctacgggactcataaacactttacacataagtttcacacattccggtgccataccttcgcccagtagtgatcaaagcgatggcatacctggaaagccctctgatttctatgtgaggtatgagaaggaccgggcgcggcctaatgattcgtttcctatctatgtgaacggctttgaaggcgaggagcacgttaaagttcccataatgagcgaagctgcacgtggatcagcctatgaagatcccagaagtcaggtaagatcatgttagttcgatcagatcataagctaacgtcctggccttgcagttctccaagcccaattcttcggaaatatgtttcacacattccggctccataactccgaccagtaatgatcaaagtgatgatatacctggaaatccatttgatttctatgagaagtatgagaaggaccgagcgaagttctccaagtccaattcctcggagggcgacgctactgaccctgaatcagcgaccaaatcgatcctacgaaacaaatctgctgtggacctggagccgcataatgtcaaccagcagcccaagaagggcaggaaggtccggaatcaaaagaagaaggagcgcaccctagacgatgacctgcgcgacatgagcgcctaccaaaaggtcatgcatgatcttgtggagaaggagccgactgcaccggagcctctgccaccgggcaagttcatcgactcgcatgcgccaaagaagcgggttagccgcttcaaggagcagcgagcccttaacaaaacgtagcgaagagtaaaacttcagctggatattactagtatatttgttcaagtttaatgtgaatttgtattacaaacacaacgcaaacaataaacaactactggtgtggtgtacattcgttttaaaattaaacactaggtactagtccgctgaaacggaatttatttttaaaacatttacatttacagtaggcttcaatttacattagatcagaatgagagtttttgattcaagaatgtacgcgattgaaggacctggccgcccgcacgtgtgcgctatcttacaggctattctaaagtacatattaacagctaatacatacagtacgaaccctaagcataagtgtagttggacgctctactcaaggacacagcccattccattgtgttcaatcatggtctaccgagaatcaaatatgtcttgagtgtctggccagcaggatgcagggatgcctccaacgcggggtctcatggccctgtctggtgttcacagatgctacagaatttctacatgtcaaagtcctccaggccgaggaactccctttctagagcggcgcccatcatgttccattcgccgtcgtcctcgtcctccggttccttctcgctgttggactcggatccaagctccaggtcggaaggcaggtcttcccctggaacattgatgcaaatattaaaaggttaacacaagttttgtgcggacgggctacctcgcctaaacttggcgctgggcatctcatcgtcatcgtcctccttctcgttattgtcatcggcctcctcgttcgagctaatgtccacctccacgaggtttggcgctccaatcattatatcatcgcttcgcgtgaaaaagtcgtgagctctgttggaattatcatcttcgcgctttctcttcaacagcttcttgtccattggtggattttcttgagttattaaagacgtattcgattaaacgtggatacagacacatggattaataagtaaaatacctaccaaaatttacaggaccctcg

SEQ ID NO: 23966 - DNA, 2198 bp, DROSOPHILA
caatggaccggcgagaggatgctctgctacaggccctccaaacgaacgccagcgagacagagcgctgggaagccttcaagcgcgataatgagagcaccatccggaacttggacaagttcgcaaagaatctcagcgtggaggttatggtgcccattggacggaaggcgctgatgcccggcgagctgatccacaccaacgagcttctggtgggtcattacgagggctacttctccgcctgctcctcccacaaggccaaggagatctgccagtaccgcctgaagctggccgaggagcagctgaagaagctggccgtggagaacgatctgtggcagaaaaaactccacactccatttgcggagggggcggttcccagtggcgaccaagtagaaattgtggaggatttcaacgaggagtctcacaacaagtggttggcggagcacagaaagcgaatgcgacagcaaaagcagaaggagcgcctcgaacgggaggcggaacctgtgaagaaagataatgaagtgctgcggaagctagaagagcgagaaatgatggaggaacttggtctagatccagataatatcgacgaggatcagctgcacgatatgctgaatcaagaacctctgaaatccaccaacgaaagtagtcctaaatccttaacccaggaagaggaggatgagctgtggaagaagctggaagccgaggagcagaacgaagccgatgagctcagctcagaagcagaagaaagccttaaaacaacggataacctagtgcgccagctcatgtccggagaaacagaaactccatcttccaaaaaacgcactgcaggaaccaatagaaacgtggaaatacaggatcccatatcggaagatgatggtgatgatgatgatgagggtgaccaggaggaagaggtgcgaaccatacgggagcagatgtcgctgctacccaacgaagatcgtgagccgttcctcagagctcaactgcatgtacttaaagcaaaaatgaggaagatacaaaaggtcaactttataagcgatgagctgattcacttgatgaatgtggtggtcatgctagaggacgacctacaggacttggtatttgagcaggaactggaggccagcgaggaagaggaggaggttgtcgaaaacaatcatcttccagatgagccaagcaaagagctttcgactgtatctgaatccagcacaaataaacgtcgcatttcgtttgccctcgacgacgaaaaacttgaattcagaagggaggagaccgttgccgaaatgttgcccaatgcgaaaaagaactcgagggatatcatcaagctaaatgcacctcttaaaccggcaggagatccacaacccgcatccattaaaacaaaacgtcaaacaacccaggatatcttgcaaaaagtagaacgaaacattgagtttgtcaaggaaaaccagagtgtccaggacttcgatttactcaatcgaattatggaagagtctacgggactcataaacactttacacataagtttcacacattccggtgccataccttcgcccagtagtgatcaaagcgatggcatacctggaaagccctctgatttctatgtgaggtatgagaaggaccgggcgcggcctaatgattcgtttcctatctatgtgaacggctttgaaggcgaggagcacgttaaagttcccataatgagcgaagctgcacgtggatcagcctatgaagatcccagaagtcagttctccaagcccaattcttcggaaatatgtttcacacattccggctccataactccgaccagtaatgatcaaagtgatgatatacctggaaatccatttgatttctatgagaagtatgagaaggaccgagcgaagttctccaagtccaattcctcggagggcgacgctactgaccctgaatcagcgaccaaatcgatcctacgaaacaaatctgctgtggacctggagccgcataatgtcaaccagcagcccaagaagggcaggaaggtccggaatcaaaagaagaaggagcgcaccctagacgatgacctgcgcgacatgagcgcctaccaaaaggtcatgcatgatcttgtggagaaggagccgactgcaccggagcctctgccaccgggcaagttcatcgactcgcatgcgccaaagaagcgggttagccgcttcaaggagcagcgagcccttaacaaaacgtag

SEQ ID NO: 23967 - protein, 731 aa, DROSOPHILA
MDRREDALLQALQTNASETERWEAFKRDNESTIRNLDKFAKNLSVEVMVPIGRKALMPGELIHTNELLVGHYEGYFSACSSHKAKEICQYRLKLAEEQLKKLAVENDLWQKKLHTPFAEGAVPSGDQVEIVEDFNEESHNKWLAEHRKRMRQQKQKERLEREAEPVKKDNEVLRKLEEREMMEELGLDPDNIDEDQLHDMLNQEPLKSTNESSPKSLTQEEEDELWKKLEAEEQNEADELSSEAEESLKTTDNLVRQLMSGETETPSSKKRTAGTNRNVEIQDPISEDDGDDDDEGDQEEEVRTIREQMSLLPNEDREPFLRAQLHVLKAKMRKIQKVNFISDELIHLMNVVVMLEDDLQDLVFEQELEASEEEEEVVENNHLPDEPSKELSTVSESSTNKRRISFALDDEKLEFRREETVAEMLPNAKKNSRDIIKLNAPLKPAGDPQPASIKTKRQTTQDILQKVERNIEFVKENQSVQDFDLLNRIMEESTGLINTLHISFTHSGAIPSPSSDQSDGIPGKPSDFYVRYEKDRARPNDSFPIYVNGFEGEEHVKVPIMSEAARGSAYEDPRSQFSKPNSSEICFTHSGSITPTSNDQSDDIPGNPFDFYEKYEKDRAKFSKSNSSEGDATDPESATKSILRNKSAVDLEPHNVNQQPKKGRKVRNQKKKERTLDDDLRDMSAYQKVMHDLVEKEPTAPEPLPPGKFIDSHAPKKRVSRFKEQRALNKT

SEQ ID NO: 23968 - DNA, 4363 bp, DROSOPHILA
cagcaccgcgttcagaatgcctgcctgtgcgacgatccatccggatcgcaggaacacgatcactccaaacacgttgattaggcaggaggtgaacactccgtcccaggtgccgaatagcacgggctgggagatgaagaagttcgagcgccacctgttgagtaagaggcttaggatcctggccagaagggttgcctgattcacttaccacggcttgtcgccctgctcgcccgcaaagatctcgttggccccggacgcatggtggccaccagccgcgtacgtgtactcgttacctaaatccacaaatccgccggtgttgttgttggtccgctggcgaaagctggtcaccgccacatccccgtcctcgtcgccgccaagtccaaatctctgccagtcgacagtgcgtcggccgccgttgccattgccctcagagctattagtcatctccgctccgcttcgcaccgcacactccgctccaccccgcttttcccgtaccgcttttggcagttgtttgctggccttgttgttgctgctgctcccgtggagttgagcagtttttgcgttgtgctgttctcgcgggttatctgacgactactcgggcgtaatcgcggcaattaactgattgctatttcttggcgttgcgctcccactgctacacccaaacatccaaacgtccaagtgcgagcacatccacgcaggcagccagtggagaatcctctgaagatcgcagatccgatggaggtgctgcaggcgctggattcgagtcactggcgaccgaagcgggaaacggcgggcatcgtcttggtcgcacttgagtaactgtaaccgcactcaataaacgctcaaaaagctaaataaaaacacttgcttattggtaaactacaagaagtcgtcatcgatgacttttcggtgggctgcgatatgcgttagacgataggccgcctatctgtttctaagttctatcgctaccatccgatatcgataaccaaaccggtgtgacgcgccgcacgtgcttacgttttgtttgtattttactgggctcctcgggaaatgggcaagaagaaggacaagtccgggaagctggacaagcagacgacgaagaaggaggcaccgagctcgtcgcaggccaacatggggaaggcagctggagccaatgattcggagaacggaatttggcaggactctcggttccagcacctgctgaccgatccccgatttcgcggcgttccaaaagtgcagcgaaaggtcaagatcgacaagcgtttccagggcatgttcacggacgacaagttcaaggtgaagtacaccgtggacaagtacggccgcccggtcaacaagagcaacgccgaggacctcagaaagttctacgaactggacgagaacgagagcagcagcggcgaggagcctgccaaaaaggaatccgatcttgactccgaggcggaggcagagcaacaagagcggcgcgccgaggagcgagccatagccaacttggagaaggaggagagcaacgatactctggaaagcgatagttccgaggtgtcacagagtcttcgtcagcgcctgaccaacccagagatagactacgcccgcggagaaggccgcctgtataccgactcctcctcagacgaggacagcgatgatgaggacgagggtccagaactgcagatagaccacgtgtggggcgaactggacaacgatgccgagcacaccgaggagagcacccgccggctggctgtttgcaacatggactgggaccgcatccgggccgaggatctaatggtcatgctcagctccttcctgccgcccggcggtagcattctcagcgtcaagatatacccctcagagttcgggaaagcgcgcatggccgaggaggaagtgcacggcccaaaggaactggtggagcgcgtggagccagaagacgactccgatgaggagctcgtacgccagcaggacagcgatgccgaagagggggaggactaccacatggagaagctgcgtcagtaccagctaaaccgacttcgctactactatgctgtcgtcgagtgcgacagcatagacacggccgacaaggtatacaaggagtgcgatggtatcgagtacgagagctccgccacgcgcgtggacttgcgcttcatcccggacgacacctcgttcgaggaggacacgccgtcggacgaatgcttcgagctgccggatgccagcagctataagccgcgacagttcaccaccacggcgttgcagcaggccaaggtggatctaacctgggacgagacggcgctggaccgtcgtgagctgggtgacaagctctccagcgggcaggttgacaagctcacggacaaggagctgcgccagatagtagcgtacagtagtgaggaagaggattctgaggcagaggaatccccggcggaggaggctgctcaaaaggcggtttcagaggacccacagaagagcaagcccaaaaagacttctaagcaggaacgcattgccacctacaaaaacttgctggccgacatcctggagcaggaaaagaaggagaaggagcagaagtacgaaatggaaatgacctggaacgtggagccccagcacgaagaggcacagccggagcagcaagcccaggccgagctcacgcccatcgagaaggtgatccagaaacgcagcgagaagaacaggcagcgcaaggaacagcgccgccagcgccagatcgaagccagaggaggcgatgccggtgaggacagcgatgagtccatggtgcccgatggcatcgatttgaatgacgcctatttcgccgaggagttcgctaatggagactacgctccccctaaaacgaagcaggacaagaagaaaaagaaaaagaagggaaaggacgatggagaggaggacgtcgaggcgaagcggcaagagaaggagcttgagctactgctggacgatggcgacgggcgcgacgagaagcaacacttcagtctgaccaaaatcctcaagaaggaggagcaagaagcgagcggttcaaagcgaaagcgtcgtcagaagttaaagaaatcgaaaaatcagccgcagaatgcggagaagctggacgacgacttccaggtaaacctgaatgataatcgcttcagtgccgtttacaagtcgcacgagtacaacatcgatcccacccactcccattacaagcccaccaagggcatgcagcagatcatcggcgagaagttaaagcgcagaaaggagcagggggagggcggcgctgcaaacggcgatgcggatggggatgagcaggtagcccccaagaggagtaagcagcagctggagcagaacgccctggtaaagagtctgaagcgtaagatccagctgcagcagcagggccagaagctttagaggattaatgttactgtacaataggtgaacaaatgtaaattaaagactacgttaatgacattgagcgagactgttttggaatatacattatatactgtttatagctgacagatcccctggcaaaagcacaggcgcacacaaagcacagcacacaccttaatttatcgcttaagctagcctagttcttaagtacaatgaaatatttgttgaggtctcctcgtgctggtgagctgaccattggcttccgttagtagctgtagctgaagtaatgcttgtagagggtcacagtcatgccggcgtcgaggtggaagatgtctggtaggcagatgcggcgctcctgctcgtaaacgaccatcagctcgcaaacttgcgcccacacgggatcgtagagacgccggatgagctggcagtcgagccgggggcggaccagcgcctggactacggtgtgcagtagggcaggggtggcgttcttgtcgagaaacgcggcgaaggggctgcgtccgaggcacagctcgtagaggactagccccagtgaccacacgtccgacttgaaatccaccttgccctggctggacatcgcctccggggccatgtacatgggcgtgcccatgcccgcctgcagttgagtgctgggcgcatgaacgttcgcgatcccaaagtcggcgatcttgacgcggtcgttggcgtcgaggagcatgttctcgggcttgatgtctcggtggatgacgcagcggatgtgcaggtactcgagtcccactaccatgtcgcggaagtagcccatcagccgctcctgattgactcccccggtgcctgacggcagctgctggatgacatccctcaaggtgccgttgggcacgtactccatcacgatgttcacagtgcccgcgtggctaaaggagcgcaggaactcaacgatgtgcgggtggcgcagctgcgagatgatgtacacctcctccttgatcaatcccaactctgtcttcggattccggacgatgatccg

SEQ ID NO: 23969 - DNA, 2363 bp, DROSOPHILA
ccgcacgtgcttacgttttgtttgtattttactgggctcctcgggaaatgggcaagaagaaggacaagtccgggaagctggacaagcagacgacgaagaaggaggcaccgagctcgtcgcaggccaacatggggaaggcagctggagccaatgattcggagaacggaatttggcaggactctcggttccagcacctgctgaccgatccccgatttcgcggcgttccaaaagtgcagcgaaaggtcaagatcgacaagcgtttccagggcatgttcacggacgacaagttcaaggtgaagtacaccgtggacaagtacggccgcccggtcaacaagagcaacgccgaggacctcagaaagttctacgaactggacgagaacgagagcagcagcggcgaggagcctgccaaaaaggaatccgatcttgactccgaggcggaggcagagcaacaagagcggcgcgccgaggagcgagccatagccaacttggagaaggaggagagcaacgatactctggaaagcgatagttccgaggtgtcacagagtcttcgtcagcgcctgaccaacccagagatagactacgcccgcggagaaggccgcctgtataccgactcctcctcagacgaggacagcgatgatgaggacgagggtccagaactgcagatagaccacgtgtggggcgaactggacaacgatgccgagcacaccgaggagagcacccgccggctggctgtttgcaacatggactgggaccgcatccgggccgaggatctaatggtcatgctcagctccttcctgccgcccggcggtagcattctcagcgtcaagatatacccctcagagttcgggaaagcgcgcatggccgaggaggaagtgcacggcccaaaggaactggtggagcgcgtggagccagaagacgactccgatgaggagctcgtacgccagcaggacagcgatgccgaagagggggaggactaccacatggagaagctgcgtcagtaccagctaaaccgacttcgctactactatgctgtcgtcgagtgcgacagcatagacacggccgacaaggtatacaaggagtgcgatggtatcgagtacgagagctccgccacgcgcgtggacttgcgcttcatcccggacgacacctcgttcgaggaggacacgccgtcggacgaatgcttcgagctgccggatgccagcagctataagccgcgacagttcaccaccacggcgttgcagcaggccaaggtggatctaacctgggacgagacggcgctggaccgtcgtgagctgggtgacaagctctccagcgggcaggttgacaagctcacggacaaggagctgcgccagatagtagcgtacagtagtgaggaagaggattctgaggcagaggaatccccggcggaggaggctgctcaaaaggcggtttcagaggacccacagaagagcaagcccaaaaagacttctaagcaggaacgcattgccacctacaaaaacttgctggccgacatcctggagcaggaaaagaaggagaaggagcagaagtacgaaatggaaatgacctggaacgtggagccccagcacgaagaggcacagccggagcagcaagcccaggccgagctcacgcccatcgagaaggtgatccagaaacgcagcgagaagaacaggcagcgcaaggaacagcgccgccagcgccagatcgaagccagaggaggcgatgccggtgaggacagcgatgagtccatggtgcccgatggcatcgatttgaatgacgcctatttcgccgaggagttcgctaatggagactacgctccccctaaaacgaagcaggacaagaagaaaaagaaaaagaagggaaaggacgatggagaggaggacgtcgaggcgaagcggcaagagaaggagcttgagctactgctggacgatggcgacgggcgcgacgagaagcaacacttcagtctgaccaaaatcctcaagaaggaggagcaagaagcgagcggttcaaagcgaaagcgtcgtcagaagttaaagaaatcgaaaaatcagccgcagaatgcggagaagctggacgacgacttccaggtaaacctgaatgataatcgcttcagtgccgtttacaagtcgcacgagtacaacatcgatcccacccactcccattacaagcccaccaagggcatgcagcagatcatcggcgagaagttaaagcgcagaaaggagcagggggagggcggcgctgcaaacggcgatgcggatggggatgagcaggtagcccccaagaggagtaagcagcagctggagcagaacgccctggtaaagagtctgaagcgtaagatccagctgcagcagcagggccagaagctttag

SEQ ID NO: 23970 - protein, 771 aa, DROSOPHILA
MGKKKDKSGKLDKQTTKKEAPSSSQANMGKAAGANDSENGIWQDSRFQHLLTDPRFRGVPKVQRKVKIDKRFQGMFTDDKFKVKYTVDKYGRPVNKSNAEDLRKFYELDENESSSGEEPAKKESDLDSEAEAEQQERRAEERAIANLEKEESNDTLESDSSEVSQSLRQRLTNPEIDYARGEGRLYTDSSSDEDSDDEDEGPELQIDHVWGELDNDAEHTEESTRRLAVCNMDWDRIRAEDLMVMLSSFLPPGGSILSVKIYPSEFGKARMAEEEVHGPKELVERVEPEDDSDEELVRQQDSDAEEGEDYHMEKLRQYQLNRLRYYYAVVECDSIDTADKVYKECDGIEYESSATRVDLRFIPDDTSFEEDTPSDECFELPDASSYKPRQFTTTALQQAKVDLTWDETALDRRELGDKLSSGQVDKLTDKELRQIVAYSSEEEDSEAEESPAEEAAQKAVSEDPQKSKPKKTSKQERIATYKNLLADILEQEKKEKEQKYEMEMTWNVEPQHEEAQPEQQAQAELTPIEKVIQKRSEKNRQRKEQRRQRQIEARGGDAGEDSDESMVPDGIDLNDAYFAEEFANGDYAPPKTKQDKKKKKKKGKDDGEEDVEAKRQEKELELLLDDGDGRDEKQHFSLTKILKKEEQEASGSKRKRRQKLKKSKNQPQNAEKLDDDFQVNLNDNRFSAVYKSHEYNIDPTHSHYKPTKGMQQIIGEKLKRRKEQGEGGAANGDADGDEQVAPKRSKQQLEQNALVKSLKRKIQLQQQGQKL

SEQ ID NO: 23971 - DNA, 6006 bp, DROSOPHILA
aacggacccgaaatttggttaattttacaggaggcaattttgtatgcaatacgtgatttacatgcataaaattaagcattaaagtcgtaagcaagcaattagttatgtacattaaacaatctacaaaaaccaatctagggaatagacaacaacatgaagcagcagcgcagcacacgctcatcgacgcccatttacaaagctataaacatagtatcaaattttgtaaaaagatcaatcaaagcgatgatcgcgcaagtcgaacgataaactcgatcatgtatatcaaaataaacgcaattggaaccaagagctgagaacagacacacaaaaatgcagcctcatatgcatacttgtatacaaaccttcaatgggtggatggcggtggtcctcgcggctaagaaaactcgccatctggtcttaagtaacctctctgtgctctccagaaacacgtaacacgtagcgataaggataaagatgtggtggatcccgagtaacattgaaagaacgcaataaaatcttcaacaaatgcgaaaatcctgccttctgttctttagtttagcacaacttggggaatagcgagcttgtttggaagtttgtgtggtgttttccaattgagaaactatatgccagtacggtattttcgttttattatcataaaaaacagaattataactactcgaactaggaaagtatgtcttacggataactactcatccacaaagtcaaataatgactgcttccttcggctctttttgacgtgccccaccgatctttccctgccctgccacacttggtcgcattcgtcaacaacaatcggtttcaatactcaaagtcggatcgatcatggacttatcctaactagcaggaggttttaaagtatgaacaacattcaattcagccaacggcggctgccctaaccttaagctggactcaccatgaatgtgaagttgtggcttatcctaagtatgtatgtacatgggcggtgtcagtctcggaaacatcacctgcttcgccgtcgattattgggactgctcgtcggaactgagctgcctgatccgcgcagctgctttagttcggagcgcgtagcagccttgatgctctgcacctgctgccgcacagaggcactcttgtaggttatggctggtgtgggaggagttgagctggacgttgctcccgcctccttctgttcgaagagatcgctcacttcgaccatgcgcggcttgaagaacatgttcggccggatgacggccttttcgggatgcttaaacaggttcaacaggccgcaggagagctcctggccgtcgccctccggaacggaggcattctccacctccgactccagaacccaagccgcgttccgcacctcgatgcgcagtcgttcacactcctccaggctaacatttttgctcacatttagcaactgctccagtgggtttacgatgtacatggccgagtgatccggcttggacagcggctttccctcgttcaaagatatcgcacggttgtggaagtcgaactgcgagtagaactcgaagaactgcagcaacaactcgctcagcgagctttggtttcgactcctgaagcccagacgatccacattccgggtgaaggtgcagttgatcccgtcctcggtgacccgcgagtcccctggctccgccgccttggccagcgctccaattgtgggaaggatgggctggcgcagctgctgcaggaagaacatgaccaggcaggtgagcgagaagttgctgatccagcgaccaggcgagggattcgtgaggccgcaggtctgcgcccagcgccgaatggtaaaggtcaacggccgtacgcgcggatccatttcaccgaacatgtaaagcagttccgacatataaaagccagtgctggaagagggattgcgtttaaaaccatcttcttaaaacatatttaatgccaacatgcaatactgatcgccccaaaggcgggaaggtaaaaacgggcgtggcctcgtttaatgagacaaccagcggtgtgtagcccgctgacccccaccaatggccggatatgcgtgcagcgggtacttatcaggggcggatgaatgggatgtgaatcatggccatcggcacgccagggaagtcagtgccgcggagagaactgattcacctgctcacctgcgggagagcagcgtaccatttacacatatacacgacatttggcaatcgccacctgccgctatcttatcttatcgagctgatgaagctttcttatctaaggccgctctccctcccctgcctgactgtacggccccactagcctggatgttgtcaccgccgcgtatctcagccgagccgcaagtctggtcaaaacgatttcaacgaacgagcccaacggacatctgtttctagtccgccactgagctagctatttttttcttccgaccccacgagaatcgacccaagcaaggtgaatcctagtaaaaagtgcctacaaattcccatttctacgaaatgataaatggatggtccattttttttaagtgctattgaagaagtgttgaatttcggtatgggtaccacacccaaaagacagtttcccaatggataaacgtatctacacaaaacgtcttacaaaagttgattttaagtgatgcttggaggatgttactcaggtgcacagggatacgcccgcagctccagtacctggcccatttcaatactcttgaatagtttggtgttgcaattgctcgtattaatcatctagtgcgtggctgataacgctatttgctaaacacagctccgataaggccaacgatgatacagtgaacggcgggaaagggcggggagaatcaaccataaatgccaagcaacatcgtgattaataggcgcgaccagggcgagcttttggtatgtgactcaatggagctcctcgaaaatgagcaaggatcaatgcaccgtctaaatagtgcttctatcaagtagcgcctcctttgtcctgggttttcagatcacgcacttgtcatcatccacctaatgatccttctcttgccttgcagcttccgaaacgatgggcatcggctatggagcctccgacgagcagctggagaagcaaattggctgcgtgaaatacacgctattttgcttcaacatcgtggcctggatgatatccacagcgctgttcgccctaaccgtctggttgagggctgagcccggcttcaacgactggctgcgcatcctggaggcacagtccttctacatcggcgtgtacgtgctcatcggcatcagcattgtaatgatggccgtcagcttcctcggctgcctgagcgcgctcatggagaacaccctggctctgtttgtgttcgtgggcacccaggtctttgggttcatcgccattgtggccgggtcggcggtcctattgcagttcagcactatcaactcgagcctgcagccgctgctgaatgtatcgctgcgcggctttgtggccacatcggagtatacgtactcgaactacgtgctgaccatgattcaggagaacataggttgttgcggggccaccgggccatgggattatctcgacctgcgccagccactgccaagctcctgccgcgacaccgtcagcggcaacgccttcttcaacggatgcgtggacgagctgacctggttcttcgagggcaaaaccggctggattgtggctctggccatgacgctcggcctgctcaacgtcatctgcgcggtgatgagctttgtgcttgtgcaggcggtcaaaaaggaggaggaacaggccagcaactaccgccgctgaagaccagcctcgttaatttagttagtagcgacaagtgacccttcgatagatctaagaattcatacccagttcgaacaataagtacaataaagattgcgaccctcacaaggaaaggtgtctcagcggacgggaatcacagattgcttgccaacagacagacgaatggtggtataagcaggcacacagcacttagcacatagcacttacaggttactcatggagaggtccacctccaggtccagatgctcatggtggtacttgatgatgggcaccctcgcctgcaaaatacgtctcacatggcacacgccgggcaggaacagatgcagcatatctccaaaacattccatgtgcctttgcgtctgcgagcgtccgttgctcaggttctccttggtgtggtacacgagtcgcgagggcaccgccgcctccagtgggatcttagctcccatatcgctgtcaaagcgcaggatgaggtccaggtcgcagcccattcgcccaaatccgttgaccgacgagccaaagggctgtgcctgggcggcgggaaacatgccggcaatggcctgctgcacctgtagggcggctagaaagcgcatacggattcccagctcattcaggcgcgtgtgctcgtacagctgctgcacctgctcttcgatgtccgctgcaccacgtaagagccccagtaggtggcgctgatccacctgccgggtgccgtccaaggatagcagtgcgggcgctgtattggcaactagcttggggctccgtctgcctcctcccgctgcccggaaccacagaaagggagatcgcacgggcacgccgctcagctcgccattggtaacgcccgctccgatggcagccgccgcctcgtccgacgtggcgtactccagcaggatgtagtgcagggtctcgtcctgccgcacgcagtagtggtgggcacccatgatcgagccgaagctgctgcagtagttatacaactcctcatacgacttttcggagctcacctggaccacaatgctgcactgggcctgtcgctgatgacggccaatgaactcctcgtagttgggcctgcctgttggcgaacatggacagtggtagtaatattaaacagaacagatctcggccagaatcggctcacctgcgttccgtccgggagaagccgcctctgaagcattgtgctttatgcaatatgtacgccagaggctcagctgctgggcgctgcgtcgcactaagctgttcatggcgggcttggggtgtgggcaggtcaagtcctaggcccacttggtgtgggtgatttcggatctggaatttaaccgaatattgttgggctgtatttttgaggttaggtcgagttggttatcggtcgcgttcgctgggtgtgcagccctggtcccaaaaccgtggcttattttagcattcttaagagttagatgataacaaaacatatcattttgccatcctaagcacattatagctccactttcatttaggcaatcaccattagtgcagaggtttttgcaatgccaatcttccaaaagaagcttatgcatccctgaaaatctatcgattactctaggtggcgccaaactcaaaagtttgtaatttcataaactttttatttcacgtcccagttattgtgttattattgttattattacatgcgggttttgccgtgggatgaacgggcttcgtaaaactaggtttaattagactaaacacgtacaaaagggacacgattgggtatattttttaaatatacgttagttagtcatcttcctaacactcctggatcggttacattagtcaatcaacgtgaggtgtatatatcggatatatgcgagtgatatatatacatatattgggtgtatatagagtgcggttattgctgatatcgtatgccgagtgagtgtacgcgggtacaggtttatatatattatcaattaggactgttattgtccaccgacatggtaatacaggattatagcttagcttaggtgttgtttgtgttatgtggctcattcttgtgttctgtaacaatttcattgtgctctgtgtgctgtgtgtgttgtcgtcttaaatgcaaggcgccaaatcatcgagtttgatttctggttttggtttcacttattatctcagtatcacatatgtctcctcgaaatgcgttctgttttgtgtgcggaacactggaaacatatccatttagcaacaacttattcgctctcaactaaggagtaatcgttg

SEQ ID NO: 23972 - DNA, 1839 bp, DROSOPHILA
atgaacagcttagtgcgacgcagcgcccagcagctgagcctctggcgtacatattgcataaagcacaatgcttcagaggcggcttctcccggacggaacgcaggcaggcccaactacgaggagttcattggccgtcatcagcgacaggcccagtgcagcattgtggtccaggtgagctccgaaaagtcgtatgaggagttgtataactactgcagcagcttcggctcgatcatgggtgcccaccactactgcgtgcggcaggacgagaccctgcactacatcctgctggagtacgccacgtcggacgaggcggcggctgccatcggagcgggcgttaccaatggcgagctgagcggcgtgcccgtgcgatctccctttctgtggttccgggcagcgggaggaggcagacggagccccaagctagttgccaatacagcgcccgcactgctatccttggacggcacccggcaggtggatcagcgccacctactggggctcttacgtggtgcagcggacatcgaagagcaggtgcagcagctgtacgagcacacgcgcctgaatgagctgggaatccgtatgcgctttctagccgccctacaggtgcagcaggccattgccggcatgtttcccgccgcccaggcacagccctttggctcgtcggtcaacggatttgggcgaatgggctgcgacctggacctcatcctgcgctttgacagcgatatgggagctaagatcccactggaggcggcggtgccctcgcgactcgtgtaccacaccaaggagaacctgagcaacggacgctcgcagacgcaaaggcacatggaatgttttggagatatgctgcatctgttcctgcccggcgtgtgccatgtgagacgtattttgcaggcgagggtgcccatcatcaagtaccaccatgagcatctggacctggaggtggacctctccatgagtaacctcactggcttttatatgtcggaactgctttacatgttcggtgaaatggatccgcgcgtacggccgttgacctttaccattcggcgctgggcgcagacctgcggcctcacgaatccctcgcctggtcgctggatcagcaacttctcgctcacctgcctggtcatgttcttcctgcagcagctgcgccagcccatccttcccacaattggagcgctggccaaggcggcggagccaggggactcgcgggtcaccgaggacgggatcaactgcaccttcacccggaatgtggatcgtctgggcttcaggagtcgaaaccaaagctcgctgagcgagttgttgctgcagttcttcgagttctactcgcagttcgacttccacaaccgtgcgatatctttgaacgagggaaagccgctgtccaagccggatcactcggccatgtacatcgtaaacccactggagcagttgctaaatgtgagcaaaaatgttagcctggaggagtgtgaacgactgcgcatcgaggtgcggaacgcggcttgggttctggagtcggaggtggagaatgcctccgttccggagggcgacggccaggagctctcctgcggcctgttgaacctgtttaagcatcccgaaaaggccgtcatccggccgaacatgttcttcaagccgcgcatggtcgaagtgagcgatctcttcgaacagaaggaggcgggagcaacgtccagctcaactcctcccacaccagccataacctacaagagtgcctctgtgcggcagcaggtgcagagcatcaaggctgctacgcgctccgaactaaagcagctgcgcggatcaggcagctcagttccgacgagcagtcccaataatcgacggcgaagcaggtga

SEQ ID NO: 23973 - protein, 612 aa, DROSOPHILA
MNSLVRRSAQQLSLWRTYCIKHNASEAASPGRNAGRPNYEEFIGRHQRQAQCSIVVQVSSEKSYEELYNYCSSFGSIMGAHHYCVRQDETLHYILLEYATSDEAAAAIGAGVTNGELSGVPVRSPFLWFRAAGGGRRSPKLVANTAPALLSLDGTRQVDQRHLLGLLRGAADIEEQVQQLYEHTRLNELGIRMRFLAALQVQQAIAGMFPAAQAQPFGSSVNGFGRMGCDLDLILRFDSDMGAKIPLEAAVPSRLVYHTKENLSNGRSQTQRHMECFGDMLHLFLPGVCHVRRILQARVPIIKYHHEHLDLEVDLSMSNLTGFYMSELLYMFGEMDPRVRPLTFTIRRWAQTCGLTNPSPGRWISNFSLTCLVMFFLQQLRQPILPTIGALAKAAEPGDSRVTEDGINCTFTRNVDRLGFRSRNQSSLSELLLQFFEFYSQFDFHNRAISLNEGKPLSKPDHSAMYIVNPLEQLLNVSKNVSLEECERLRIEVRNAAWVLESEVENASVPEGDGQELSCGLLNLFKHPEKAVIRPNMFFKPRMVEVSDLFEQKEAGATSSSTPPTPAITYKSASVRQQVQSIKAATRSELKQLRGSGSSVPTSSPNNRRRSR

SEQ ID NO: 23974 - DNA, 3136 bp, DROSOPHILA
gataaaataaatatgtatatgtatgtgcgtgtcggcgcagttgtgcccttggcgcaattcgctccggaataatgaatattaatgagatctaaacattattatataaaatgtaataaagttattgaacatgattatttaacaaagtcttagttggttttattgcaagttagctttagttactctactggttatcttaagggaggtagtctctctacatttggaaatcgtcacgcatgtcgttgtagcggagtacatgctccttgatcttggagccatccacccaggtgacaaagtcctcgaggtttctggagaccagaaaagcaggatccttaatcatttccggaccaacacgcacatgaccatgctctatgaggtctgtggccgctttcaggtgctccgacattcgaactgccaacggaaaatggttatatgaaaatgaagtgcttattaagggatggtactcacgtttcaccatgatcacgggtagacgacgtcggcaaaagtggctggcagatatcttggccgccgtttccaaagtaagctgatcattggaaactcccatggcgtgcagcttgtttaggagcatggtggtggcctccgtcttgaaaggttctgaagcatccagcttagctatcctctctgccagttcccgtatctccctggacaacttgttatacctaaaaattaacaaatttaatggggatttaaatacgtgagcaatttggtctcttacttggtgtagtcctcccttttttgaatgtgaaagcgcctaaggattttgttctccttgccgccgttgtccactttccaggtgatgaagtccacctttttaagcagcttctgctcatgaaatttgagtttacgaaccatttttatttatattattttgcaaattaattttttgttgacgaactactcgcacatgtgctgcgcagtgtgaccagagcacgcacaactgcagcaccataaaaacaaacagctgatttgtgcgtcttcaagcggcttctgtataataaaatttagatagttttttaaaatcgtaattgctgcaatggcagcctcaatggatgaggatataaccgccaacccgcccccaagcagcgaagaggaccccctggccgaggagcgcctaggctttgtgcgggaagtgggcgcgcaggctgtttggagcctctcctcctgcaagccgggtaacttttggtgtaactacgtgatccttacatattctacaattttctttggccttcaggatttggtgtagagcgtttgcgagacaacatcatggatacttattggcagtcggacggtcagcttccccacctggtcaacattcaattccacaagcgtacgaacatcagtcagatttacatatacacggattacaagctggacgagagttacacgccatcaaggatctccatacgatctggaacgaacttcaacgacttgcaggagctgcaggtgatggacctgaccgaacccaccggctgggtgcagatacccattaaggatgggaacgtcaagtccatacgcaccttcatgcttcagattgctgtgatctcgaaccaccagaatggcagggacacccacatgcgccagatccgcatccatgcgcccgtcgagggcaagcactatcctctggaactgtttggcaagtttggaacggtcgactttcagaagttcgccaccattcgttagggaaaactttgggatttatcgaagtcttttatttttatgtatttttcggggtatataactgctaaaatacaacatttaaaacattactttagtaattttatgcatatttttggtgtttctaattaaatgcccgtcacttgtatatatataattcgaatgcaaataaatatataccgtcgtctaagcttaagtacaaattaacaaacacagtggaagtgtaagagttattattgttactgttttatcgcgatacaaatgcaaaatgtgaaaatggaacgccaacgaaagagtgcgagaattattgcatcgttttgtattgtattgcactatctcgaggattgtcgttaatgattggtgattatgtgttcgatttccttgcagctttcaacgtcttgtagtgatccttctcctcgccggtctcgggtggctcgctttcgtaggaggccttcatcaaaagatcctcgctcagcacctccgccttcaacaggtaggacaccacactaggcaactgctcgtatggacagtccaatcgctgccatttgccaaaattccgcagctgggtgcccaaatgaaggcacttctcaaagtttatgtatccgttggccaatctgcaaacggatttgaattcggttaatctcgaaacagagctcatttatgcacaaacaaactcactttgtttcatggctctcgttaatggcatgcaaatctttgaggaacagcgagaagaatgggatgatggcacgctcaatttcgttggccatttccctttccgaacgccaaacagctgccttcatggtggatctgtagttaagaaagttcgaactgggatccatttgatgctccaaaccctcgaactttgtcgtctgcactttggcccactataaaaaatagtagtaaaatcagacttcactcgttttacttaacgaaaactcaccgttttctttaggcgagctatggcagtaagattcaatgctgttagaatggccatcaagctgttgaagttgcctgtgttaaagcattccagagctgtttccacccagaagtcgatcatttgtgctctctgggactttttgcccaactaggaacgaacgaatcatattttttatttgattaatggttaattttttttttagtactcacctttaatatttccgttgcagtcaagtagcttagctggttgaaccactgcacgtaactgtcgattgtcacctggctgatgcaattcgaacccaaggtgcccgccttggtttggcttatgcaggtcttcagctcatccttttcgaggatttccacaaactcctcaagacgtatttgtgacagataggcgtactcgatggcataaagttggtgagccaactcgaaggcactgctgcagttgtttagcacattgtctgttttgtagacattggcggcaaagcgtttcagcgacttaatactg

SEQ ID NO: 23975 - DNA, 1077 bp, DROSOPHILA
ggcttctgtataataaaatttagatagttttttaaaatcgtaattgctgcaatggcagcctcaatggatgaggatataaccgccaacccgcccccaagcagcgaagaggaccccctggccgaggagcgcctaggctttgtgcgggaagtgggcgcgcaggctgtttggagcctctcctcctgcaagccgggatttggtgtagagcgtttgcgagacaacatcatggatacttattggcagtcggacggtcagcttccccacctggtcaacattcaattccacaagcgtacgaacatcagtcagatttacatatacacggattacaagctggacgagagttacacgccatcaaggatctccatacgatctggaacgaacttcaacgacttgcaggagctgcaggtgatggacctgaccgaacccaccggctgggtgcagatacccattaaggatgggaacgtcaagtccatacgcaccttcatgcttcagattgctgtgatctcgaaccaccagaatggcagggacacccacatgcgccagatccgcatccatgcgcccgtcgagggcaagcactatcctctggaactgtttggcaagtttggaacggtcgactttcagaagttcgccaccattcgttagggaaaactttgggatttatcgaagtcttttatttttatgtatttttcggggtatataactgctaaaatacaacatttaaaacattactttagtaattttatgcatatttttggtgtttctaattaaatgcccgtcacttgtatatatataattcgaatgcaaataaatatataccgtcgtctaagcttaagtacaaattaacaaacacagtggaagtgtaagagttattattgttactgttttatcgcgatacaaatgcaaaatgtgaaaatggaacgccaacgaaagagtgcgagaattattgcatcgttttgtattgtattgcactatctcgaggattgtcgttaatgattggtgattatgtgttcgatttccttgcagctttcaacgtcttgtagtgatccttctcctcgccggtctcgggtggctcgctttcgt

SEQ ID NO: 23976 - protein, 191 aa, DROSOPHILA
MDEDITANPPPSSEEDPLAEERLGFVREVGAQAVWSLSSCKPGFGVERLRDNIMDTYWQSDGQLPHLVNIQFHKRTNISQIYIYTDYKLDESYTPSRISIRSGTNFNDLQELQVMDLTEPTGWVQIPIKDGNVKSIRTFMLQIAVISNHQNGRDTHMRQIRIHAPVEGKHYPLELFGKFGTVDFQKFATIR

SEQ ID NO: 23977 - DNA, 3444 bp, DROSOPHILA
ttcagaccggaatagagcgttcttggcaggctctgcgagagaagtacaccaacaacctgcggatgatgcgaaagaacggaacactgagtgacgaggaggcaaagactgacaatgcatcagattcggtgcagaatttgtccatttcgggagtttcttcgctggctgcagctgctgataatgaagaaagtgagtaaaggatggcaggatcaaaagcatgaacgtggtagttgacaagatgtaccttaatagtcttaccatgataggttcttctacagcaatatttcagtgctttatctctaataaactctaaaaacatcttgcaggtagtacctatttcgaatcggaattgaaccgaaaaagcctcagaagcgcctctaccgaagtcaagctcgtgccgaataactcaagctactcagttgacagaccaaactactcagctctgaatgtaaatgaagagtcagtcgatgtgagctcagaagaggatgccacgaataccctgaaggatgaaaaagtcgttctgatcaggctgcaacaggagtactatcgatgcgaaaacgcccgggcagccgagaagcacaagcttgagatggagaagcagaaatacgagctggagcagcgaaaggtggagctgcgcaatatgcgcctgaaaaacgaacttctcgaagcggaaatactcgaaaaacgacgcaaagtcgcgcaaagcaaggcttcatcctaaggaattgctagctaggataagttaatttattcttgtcttcataatgtcagtgctcttcagtaattactatagtcctagttaaacaaaagattatcgaaagaaactcatgtacactccttgatttttgaaaccagaagcaaacaattacatcttcaaaagatttaataatgtctgtcaaacttctaaagattcgtctacattttaacaagtaagctggatttaggctgctggatttaagcccttcacatttattcctcctcagttcgaatgaattgctcgtttatgctcggtcgttctgtttggttgtatttattaatttacatcgatccattcactatgcagttgggggcttaaacgataacagctcctctagccgaccacgagaagaccctcgttggggaactcgtgggtgggcacctccaagttgaggggcgcgggtcccttgcggatccttccggaggcgtcgtagtgggagccgtggcaggggcagtagtagccaccccagtcgccggcgttcgcgatgggcacacagcccagatgcgtgcacactccgatgaccaccagccactcgggcttgatcacacgttgctaaagaggaaatgggtaacagcattagcgaatcgacccactccacggtacctacatcatcagcctccggatcgcgcagcgtggatgtgggcacatttcgctcggtctcgatttccgcggccgtgcggtggcggatgaacaggggctttccgcgccacttgaaagtaaccgacttgccctccgggatgtcggacagcttgatctcgatcttggccatggccagcacttcggcggaggcgctcatcgatccgatgaaggtgttaaccaggcccttggccgcataggcaccgcccacggctccggcgccgaccatcaagtaggagaaggccttgcgctcctcggcggtgtcgttgcgacgacgactgtccttcacggactcccggcggtatgccgagaagtctggcacctgcaggtcggtgtgtgcctggcgattggctgaaaggaaggagggaatcattaattatccattgatcgaagtgcagaggttctatagatccttgtgcttgtttgcagagcagtgttgctgatataatcataaattttttgtgtggtgggcagtgaagagtgtaaacaacattgttttggggttgtcaaggctgaaggtatatttcttatagccgacacagggcatcttgggccaacttggcataacttggcgtcccttgcagacagaggtgccaaacttcgcatgatgatattcctggtcccagaggtagtaaatcccacgtttggcagaaatcgattgagtatatcccacagatccgatgtaaattgcaggtgtgcttgtgagccagtgattgttgttattgtacgaggttatgttgaaattacgtaaggaaatttgacaaatcgccttaaagccgagtgcaaatcacgtcctggtggcatttccaagcttttattcaactttttccgcctatttcccgatccattcattatgtaatggctgtgttttcagctggcagctcgatgaattcgcctcgcagagccttacccatcgagttgacggccacgccgctcgccttcaatcccgtggagaggacctgggctccgcctctgacgtaagcacgcgacacggcgttcatcattttgtatgtttccctatcaaattaaatgatcacgaaaatttcgacgtttgtcgttttcgtctgagaaccagtgtgaccgcactcaagtgggtgagaaataccaggtaacctgcaaaaaataccacaatatactagtatatattagtgtatagtgctgccagctatttgcattctcagagttgccactacgattgctcactgtcaggagctggccgctattacagcccagtaacggttttttaaataggtgaatagaatttcaaataatttttggaacaaatgatattgtagctcgttaaaccaccccgcagtgcataaaagcttttactttaatttaaattgatatgcatttcatgttgaaatgataatcctgcgtcgaattaaattgcatttgtttcaccttgccgttcaatccttcatcccctttcgttttccttcgaaaggtgaaaaggaggctcagtttccacccttcgaccttttcattcaagtgaaaactacctttcttttcaattggaaactgcagtggcatagatttagcccggatgaaaaggggtttccatggcaaaccggttggtcaacgcaccaccgagtggagaacaaaagacgaggtccaaccaccggactttcactatccagtttttccactgcacttttccattttcccccgggcagcatcattatgatgtcattgattggactttgctggatgttgcctattttcttcggggtagtttctctcagcttaattaataagcgtagctcctgaattggagatatgcctcggctgatctcatccaacgcataaaatggcaataaaaactgcataaaaaacagccgatgtaggggaatttgttatgcgcataaaagtttgccgcccgaaatttggccaaactttaaaaccaaaaaagcggccgtggcagcggggaaaactctcccgcagccggctgaaatgtaattcctctggcgccagtcctgtgattatcgaaagtagttctttttgatgtcgaaactttgctgccacccactcccctcctcctttcactggctagg

SEQ ID NO: 23978 - DNA, 885 bp, DROSOPHILA
caaacgtcgaaattttcgtgatcatttaatttgatagggaaacatacaaaatgatgaacgccgtgtcgcgtgcttacgtcagaggcggagcccaggtcctctccacgggattgaaggcgagcggcgtggccgtcaactcgatggccaatcgccaggcacacaccgacctgcaggtgccagacttctcggcataccgccgggagtccgtgaaggacagtcgtcgtcgcaacgacaccgccgaggagcgcaaggccttctcctacttgatggtcggcgccggagccgtgggcggtgcctatgcggccaagggcctggttaacaccttcatcggatcgatgagcgcctccgccgaagtgctggccatggccaagatcgagatcaagctgtccgacatcccggagggcaagtcggttactttcaagtggcgcggaaagcccctgttcatccgccaccgcacggccgcggaaatcgagaccgagcgaaatgtgcccacatccacgctgcgcgatccggaggctgatgatgtaggtaccgtggagtgggtcgattcgctaatgctgttacccatttcctctttagcaacgtgtgatcaagcccgagtggctggtggtcatcggagtgtgcacgcatctgggctgtgtgcccatcgcgaacgccggcgactggggtggctactactgcccctgccacggctcccactacgacgcctccggaaggatccgcaagggacccgcgcccctcaacttggaggtgcccacccacgagttccccaacgagggtcttctcgtggtcggctagaggagctgttatcgtttaagcccccaactgcatagtgaatggatcgatgtaaattaataaatacaaccaaacagaacgaccgagcat

SEQ ID NO: 23979 - protein, 260 aa, DROSOPHILA
MMNAVSRAYVRGGAQVLSTGLKASGVAVNSMANRQAHTDLQVPDFSAYRRESVKDSRRRNDTAEERKAFSYLMVGAGAVGGAYAAKGLVNTFIGSMSASAEVLAMAKIEIKLSDIPEGKSVTFKWRGKPLFIRHRTAAEIETERNVPTSTLRDPEADDVGTVEWVDSLMLLPISSLATCDQARVAGGHRSVHASGLCAHRERRRLGWLLLPLPRLPLRRLRKDPQGTRAPQLGGAHPRVPQRGSSRGRLEELLSFKPPTA

SEQ ID NO: 23980 - DNA, 5198 bp, DROSOPHILA
agactaaacacgtacaaaagggacacgattgggtatattttttaaatatacgttagttagtcatcttcctaacactcctggatcggttacattagtcaatcaacgtgaggtgtatatatcggatatatgcgagtgatatatatacatatattgggtgtatatagagtgcggttattgctgatatcgtatgccgagtgagtgtacgcgggtacaggtttatatatattatcaattaggactgttattgtccaccgacatggtaatacaggattatagcttagcttaggtgttgtttgtgttatgtggctcattcttgtgttctgtaacaatttcattgtgctctgtgtgctgtgtgtgttgtcgtcttaaatgcaaggcgccaaatcatcgagtttgatttctggttttggtttcacttattatctcagtatcacatatgtctcctcgaaatgcgttctgttttgtgtgcggaacactggaaacatatccatttagcaacaacttattcgctctcaactaaggagtaatcgttgaagaactacgagagcaaggaacacatcgaaagaatgcgaagcttaagaattaatacattagaattaataattagaaagtgctctgagttgttgtgtgagtgtcctctgaagttgggtgtgtgcgtgtgggcgaggcgtggacacggggatggacacggtggtaaacgctggactggacagctgtggtcagaatggagcctccgcaactgaaatgtgctctgatttggctgacctccgaacgttttaacaactagtaaaaagctaaaaatcaatacactatcaacattttcttatctaagcactacatcgtgggagagtcccagttaaaatgcgtcacagactccaaattttgttaaagcaaaacgaactaagaccgagtttggaatactaccatcgtgacctcagctgtcgctatcctaactatacatcaaatacattcgtacagatttacaaacacacatagggttaagtttagttcggctgcctcgccggctctacttcactttagttaaacgtagtactgcttagcggtagagaaatgcactcgactattgctttccacagccacgccgcctgccccgttgcccggcccgcatacaggtgaacctgtgctctagaccctggactcggtctagatgtcatctatgaggcgaccctcgataacggacgagtggtggtagttgggccgcggacggaagtcctcgttctgctcgttgagctgcgtgggtgagagatcaacgcctgggcacgagggtgtcacgactatctgctcgtactcgttcatccgtttgctgtgcatcaaatggagcgagatggcagttagttggatacttcagaagcgccaagcaaactcacccgaagcaccggaatatgacgctcttcagccaggcgaagaagttaaactccgcagtgagacccggcttcacggccggattggctgtgcccacatagaaccatacgacgaacaccaccaagaagcaggtgagggcgtagtaccagttgactagcagcataaccagcagtttagtgaaggcctgtgtgaaagtcataaatgagtaagctttccggagaagcgtcgtctcctttatgcagacgtacccccagcagagaggcccagcgattacagtagccggagtaccagtttttcgtcttggagtggatgggcggacggatcggggctatcggttcggcctcgtcgccctggtcctgttcgacgccggcctgcgcgactgcctgctccacggccagtgtggtgtccgcctcgtgccccgttctccgttccgaagactgggcctggttggaggtgctgggaccctcgttgtcaaactccaggggcactgtttggtgcagcggtgagttctgcggactctgcaggttcttgtggcgcacccgatcagggaacaggaggtccaggtcgttgcccgtgtccgaaacactgccgtaacggcgcgtctcgtagctgggactcgacgcctggatgcggaaacgctcctcgcgctgctcctgaatgtcgaaggtctgggccagcgcaaagtaggcgtagtcgatacaggcatatgtgagcaggaagggcatggtcacgatcggcgccaagaagttgatgtctcccacgataatgaaggtgacagtgactagggccacgatggccattgcgtataaaggcactttgttgggaccacgctagcaaagatttcgaaaagttgtgattacgttattttccttatcttattgttcaactggtacttacaccctttcccaggatatcgatgcccggaatgacgctctctttggcgatgctctgaaggacgcgcggagtgccgtacatggcgcccaggcaggaggacatgctggacacataaatgccggccaacagcaggaaatgcacggcagacaccttgacagagatcatgtagtcagtatacaggaagcttcgttggcaggtggcccccaaaaacaggacgaacaccaagtacaggaacgtgctgcaaagaaatcagatgtcaagagctactgatttcccggcgacgtgtaaaccttacgaggtgccaaaggcggccagggtgccattgggaatgtccgtggacggcgcgcgcaagtcgccgctcatgttaatgcccgacagcactccggtgacggtgggaaagaagacgccgaacacacggaaccaggagtagccgtcgtcgtactttggccataggttctccacgaagtttccgctcgcccagccattaaagccgccacctgcaaataaaaccagattaatagcttgttggcataaaatctttgcaacttcttttgaatcatattccaactaaattcaacagattatttaaaaatgccataatctacttaggaagcgattagtcactggacatggctaacaatcgcatatgaataatgtactcactggcctcactagtgaagctgcccaccatgaagtccagcgccgagatcagcagtatcatgagcagtataaactgaagcttgatgacccacttgacgccggccacgttgatgcagcccaacaggagcaccgctgccgtagcgaacccgcggatggcccacttgctgccctcgagtcccactagtccagccattgattcgccaaatcccattacgttaagggcgcatcccaccgcctggccaaagcagtagagcaaacccaaggcgcctccgaatcgggaaccaagcgtgtgggctatgagaaagtacacgccaccgctttccacacggcaccgctcgcagataccgattgccgagaggacgctgacgagagctatgaccaccgtgcaaaagatgatcagcaccgcgttcagaatgcctgcctgtgcgacgatccatccggatcgcaggaacacgatcactccaaacacgttgattaggcaggaggtgaacactccgtcccaggtgccgaatagcacgggctgggagatgaagaagttcgagcgccacctgttgagtaagaggcttaggatcctggccagaagggttgcctgattcacttaccacggcttgtcgccctgctcgcccgcaaagatctcgttggccccggacgcatggtggccaccagccgcgtacgtgtactcgttacctaaatccacaaatccgccggtgttgttgttggtccgctggcgaaagctggtcaccgccacatccccgtcctcgtcgccgccaagtccaaatctctgccagtcgacagtgcgtcggccgccgttgccattgccctcagagctattagtcatctccgctccgcttcgcaccgcacactccgctccaccccgcttttcccgtaccgcttttggcagttgtttgctggccttgttgttgctgctgctcccgtggagttgagcagtttttgcgttgtgctgttctcgcgggttatctgacgactactcgggcgtaatcgcggcaattaactgattgctatttcttggcgttgcgctcccactgctacacccaaacatccaaacgtccaagtgcgagcacatccacgcaggcagccagtggagaatcctctgaagatcgcagatccgatggaggtgctgcaggcgctggattcgagtcactggcgaccgaagcgggaaacggcgggcatcgtcttggtcgcacttgagtaactgtaaccgcactcaataaacgctcaaaaagctaaataaaaacacttgcttattggtaaactacaagaagtcgtcatcgatgacttttcggtgggctgcgatatgcgttagacgataggccgcctatctgtttctaagttctatcgctaccatccgatatcgataaccaaaccggtgtgacgcgccgcacgtgcttacgttttgtttgtattttactgggctcctcgggaaatgggcaagaagaaggacaagtccgggaagctggacaagcagacgacgaagaaggaggcaccgagctcgtcgcaggccaacatggggaaggcagctggagccaatgattcggagaacggaatttggcaggactctcggttccagcacctgctgaccgatccccgatttcgcggcgttccaaaagtgcagcgaaaggtcaagatcgacaagcgtttccagggcatgttcacggacgacaagttcaaggtgaagtacaccgtggacaagtacggccgcccggtcaacaagagcaacgccgaggacctcagaaagttctacgaactggacgagaacgagagcagcagcggcgaggagcctgccaaaaaggaatccgatcttgactccgaggcggaggcagagcaacaagagcggcgcgccgaggagcgagccatagccaacttggagaaggaggagagcaacgatactctggaaagcgatagttccgaggtgtcacagagtcttcgtcagcgcctgaccaacccagagatagactacgcccgcggagaaggccgcctgtataccgactcctcctcagacgaggacagcgatgatgaggacgagggtccagaactgcagatagaccacgtgtggggcgaactggacaacgatgccgagcacaccgaggagagcacccgccggctggctgtttgcaacatggactgggaccgcatccgggccgaggatctaatggtcatgctcagctccttcctgccgcccggcggtagcattctcagcgtcaagatatacccctcagagttcgggaaagcgcgcatggccg

SEQ ID NO: 23981 - DNA, 2726 bp, DROSOPHILA
caagtgtttttatttagctttttgagcgtttattgagtgcggttacagttactcaagtgcgaccaagacgatgcccgccgtttcccgcttcggtcgccagtgactcgaatccagcgcctgcagcacctccatcggatctgcgatcttcagaggattctccactggctgcctgcgtggatgtgctcgcacttggacgtttggatgtttgggtgtagcagtgggagcgcaacgccaagaaatagcaatcagttaattgccgcgattacgcccgagtagtcgtcagataacccgcgagaacagcacaacgcaaaaactgctcaactccacgggagcagcagcaacaacaaggccagcaaacaactgccaaaagcggtacgggaaaagcggggtggagcggagtgtgcggtgcgaagcggagcggagatgactaatagctctgagggcaatggcaacggcggccgacgcactgtcgactggcagagatttggacttggcggcgacgaggacggggatgtggcggtgaccagctttcgccagcggaccaacaacaacaccggcggatttgtggatttaggtaacgagtacacgtacgcggctggtggccaccatgcgtccggggccaacgagatctttgcgggcgagcagggcgacaagccgtggtggcgctcgaacttcttcatctcccagcccgtgctattcggcacctgggacggagtgttcacctcctgcctaatcaacgtgtttggagtgatcgtgttcctgcgatccggatggatcgtcgcacaggcaggcattctgaacgcggtgctgatcatcttttgcacggtggtcatagctctcgtcagcgtcctctcggcaatcggtatctgcgagcggtgccgtgtggaaagcggtggcgtgtactttctcatagcccacacgcttggttcccgattcggaggcgccttgggtttgctctactgctttggccaggcggtgggatgcgcccttaacgtaatgggatttggcgaatcaatggctggactagtgggactcgagggcagcaagtgggccatccgcgggttcgctacggcagcggtgctcctgttgggctgcatcaacgtggccggcgtcaagtgggtcatcaagcttcagtttatactgctcatgatactgctgatctcggcgctggacttcatggtgggcagcttcactagtgaggccagtggcggctttaatggctgggcgagcggaaacttcgtggagaacctatggccaaagtacgacgacggctactcctggttccgtgtgttcggcgtcttctttcccaccgtcaccggagtgctgtcgggcattaacatgagcggcgacttgcgcgcgccgtccacggacattcccaatggcaccctggccgcctttggcacctccacgttcctgtacttggtgttcgtcctgtttttgggggccacctgccaacgaagcttcctgtatactgactacatgatctctgtcaaggtgtctgccgtgcatttcctgctgttggccggcatttatgtgtccagcatgtcctcctgcctgggcgccatgtacggcactccgcgcgtccttcagagcatcgccaaagagagcgtcattccgggcatcgatatcctgggaaagggtcgtggtcccaacaaagtgcctttatacgcaatggccatcgtggccctagtcactgtcaccttcattatcgtgggagacatcaacttcttggcgccgatcgtgaccatgcccttcctgctcacatatgcctgtatcgactacgcctactttgcgctggcccagaccttcgacattcaggagcagcgcgaggagcgtttccgcatccaggcgtcgagtcccagctacgagacgcgccgttacggcagtgtttcggacacgggcaacgacctggacctcctgttccctgatcgggtgcgccacaagaacctgcagagtccgcagaactcaccgctgcaccaaacagtgcccctggagtttgacaacgagggtcccagcacctccaaccaggcccagtcttcggaacggagaacggggcacgaggcggacaccacactggccgtggagcaggcagtcgcgcaggccggcgtcgaacaggaccagggcgacgaggccgaaccgatagccccgatccgtccgcccatccactccaagacgaaaaactggtactccggctactgtaatcgctgggcctctctgctgggggccttcactaaactgctggttatgctgctagtcaactggtactacgccctcacctgcttcttggtggtgttcgtcgtatggttctatgtgggcacagccaatccggccgtgaagccgggtctcactgcggagtttaacttcttcgcctggctgaagagcgtcatattccggtgcttcggcaaacggatgaacgagtacgagcagatagtcgtgacaccctcgtgcccaggcgttgatctctcacccacgcagctcaacgagcagaacgaggacttccgtccgcggcccaactaccaccactcgtccgttatcgagggtcgcctcatagatgacatctagaccgagtccagggtctagagcacaggttcacctgtatgcgggccgggcaacggggcaggcggcgtggctgtggaaagcaatagtcgagtgcatttctctaccgctaagcagtactacgtttaactaaagtgaagtagagccggcgaggcagccgaactaaactt

SEQ ID NO: 23982 - protein, 712 aa, DROSOPHILA
MTNSSEGNGNGGRRTVDWQRFGLGGDEDGDVAVTSFRQRTNNNTGGFVDLGNEYTYAAGGHHASGANEIFAGEQGDKPWWRSNFFISQPVLFGTWDGVFTSCLINVFGVIVFLRSGWIVAQAGILNAVLIIFCTVVIALVSVLSAIGICERCRVESGGVYFLIAHTLGSRFGGALGLLYCFGQAVGCALNVMGFGESMAGLVGLEGSKWAIRGFATAAVLLLGCINVAGVKWVIKLQFILLMILLISALDFMVGSFTSEASGGFNGWASGNFVENLWPKYDDGYSWFRVFGVFFPTVTGVLSGINMSGDLRAPSTDIPNGTLAAFGTSTFLYLVFVLFLGATCQRSFLYTDYMISVKVSAVHFLLLAGIYVSSMSSCLGAMYGTPRVLQSIAKESVIPGIDILGKGRGPNKVPLYAMAIVALVTVTFIIVGDINFLAPIVTMPFLLTYACIDYAYFALAQTFDIQEQREERFRIQASSPSYETRRYGSVSDTGNDLDLLFPDRVRHKNLQSPQNSPLHQTVPLEFDNEGPSTSNQAQSSERRTGHEADTTLAVEQAVAQAGVEQDQGDEAEPIAPIRPPIHSKTKNWYSGYCNRWASLLGAFTKLLVMLLVNWYYALTCFLVVFVVWFYVGTANPAVKPGLTAEFNFFAWLKSVIFRCFGKRMNEYEQIVVTPSCPGVDLSPTQLNEQNEDFRPRPNYHHSSVIEGRLIDDI

SEQ ID NO: 23983 - DNA, 2876 bp, DROSOPHILA
caggccgagctcacgcccatcgagaaggtgatccagaaacgcagcgagaagaacaggcagcgcaaggaacagcgccgccagcgccagatcgaagccagaggaggcgatgccggtgaggacagcgatgagtccatggtgcccgatggcatcgatttgaatgacgcctatttcgccgaggagttcgctaatggagactacgctccccctaaaacgaagcaggacaagaagaaaaagaaaaagaagggaaaggacgatggagaggaggacgtcgaggcgaagcggcaagagaaggagcttgagctactgctggacgatggcgacgggcgcgacgagaagcaacacttcagtctgaccaaaatcctcaagaaggaggagcaagaagcgagcggttcaaagcgaaagcgtcgtcagaagttaaagaaatcgaaaaatcagccgcagaatgcggagaagctggacgacgacttccaggtaaacctgaatgataatcgcttcagtgccgtttacaagtcgcacgagtacaacatcgatcccacccactcccattacaagcccaccaagggcatgcagcagatcatcggcgagaagttaaagcgcagaaaggagcagggggagggcggcgctgcaaacggcgatgcggatggggatgagcaggtagcccccaagaggagtaagcagcagctggagcagaacgccctggtaaagagtctgaagcgtaagatccagctgcagcagcagggccagaagctttagaggattaatgttactgtacaataggtgaacaaatgtaaattaaagactacgttaatgacattgagcgagactgttttggaatatacattatatactgtttatagctgacagatcccctggcaaaagcacaggcgcacacaaagcacagcacacaccttaatttatcgcttaagctagcctagttcttaagtacaatgaaatatttgttgaggtctcctcgtgctggtgagctgaccattggcttccgttagtagctgtagctgaagtaatgcttgtagagggtcacagtcatgccggcgtcgaggtggaagatgtctggtaggcagatgcggcgctcctgctcgtaaacgaccatcagctcgcaaacttgcgcccacacgggatcgtagagacgccggatgagctggcagtcgagccgggggcggaccagcgcctggactacggtgtgcagtagggcaggggtggcgttcttgtcgagaaacgcggcgaaggggctgcgtccgaggcacagctcgtagaggactagccccagtgaccacacgtccgacttgaaatccaccttgccctggctggacatcgcctccggggccatgtacatgggcgtgcccatgcccgcctgcagttgagtgctgggcgcatgaacgttcgcgatcccaaagtcggcgatcttgacgcggtcgttggcgtcgaggagcatgttctcgggcttgatgtctcggtggatgacgcagcggatgtgcaggtactcgagtcccactaccatgtcgcggaagtagcccatcagccgctcctgattgactcccccggtgcctgacggcagctgctggatgacatccctcaaggtgccgttgggcacgtactccatcacgatgttcacagtgcccgcgtggctaaaggagcgcaggaactcaacgatgtgcgggtggcgcagctgcgagatgatgtacacctcctccttgatcaatcccaactctgtcttcggattccggacgatgatccgcttcacgcacaccttcctctccggctgtccgcgcacctcgttttggtggcagaggaagacccggccaaaggtgccctggcccagcacccttaccgcacgcagcttagagtcacccagttccatctcgagtgcgcagagttccgaaagcgtaatccgcgatcccgccttgatgtacagttagccagcaaaagcgcaagcgcgccatctatcgattgcttcgaaacaagagatgcacagttccatcggaaaaagccgaaaactcggaacttcggaaaccccatatgaaaattgctcatctggccagcagcaacagtgctcaatgaaagtaagttattagagtctggttaattaatcaaactaacgcatcgtgaactaaccccattcaaaaagtccatccatgtgaaaagtatgactatcctaaatttttatttattttatttaacaaaattaaatatagtatacaatactaaacctaattaaatttaatgagtactagctacgggggccttcgactcgagacttatgggttaattgctttatataataaacttagctttttggacaaatttgtaaatttttgagatattttcacaggatgggatacttaaacaattcgagagactatgtgtaccaaataagtgagatctaattgagtgcaattgactgcaggcgttgagaatatggtcaacggtgagctcgtccccgcatagttggcatgttggtcgcgccgatctcatcagtaagtgttgatgtgtggattgggtgtgcccgatgcgtagacggataaaggtcgcgcattcccgtttatgtacgttcgttggtggcttgaacatgatgcaattcggattgatagactggtacctgtgcatgaagagtgcccattcggagagtttcttttctttgaggtataacttgattcgactttttaggtccttggagttaaacggagtgaacaggattgatggtgtaagcctcatctcttgggcggctttgtcagcaagttcattcccatgaataccttgatgactgggaaccccagagtaaggtgattttttttgggtgagaacttagaatgtgcctaacttcttgtgttgtggggtcattatggttccagttgcgtata

SEQ ID NO: 23984 - DNA, 876 bp, DROSOPHILA
atggaactgggtgactctaagctgcgtgcggtaagggtgctgggccagggcacctttggccgggtcttcctctgccaccaaaacgaggtgcgcggacagccggagaggaaggtgtgcgtgaagcggatcatcgtccggaatccgaagacagagttgggattgatcaaggaggaggtgtacatcatctcgcagctgcgccacccgcacatcgttgagttcctgcgctcctttagccacgcgggcactgtgaacatcgtgatggagtacgtgcccaacggcaccttgagggatgtcatccagcagctgccgtcaggcaccgggggagtcaatcaggagcggctgatgggctacttccgcgacatggtagtgggactcgagtacctgcacatccgctgcgtcatccaccgagacatcaagcccgagaacatgctcctcgacgccaacgaccgcgtcaagatcgccgactttgggatcgcgaacgttcatgcgcccagcactcaactgcaggcgggcatgggcacgcccatgtacatggccccggaggcgatgtccagccagggcaaggtggatttcaagtcggacgtgtggtcactggggctagtcctctacgagctgtgcctcggacgcagccccttcgccgcgtttctcgacaagaacgccacccctgccctactgcacaccgtagtccaggcgctggtccgcccccggctcgactgccagctcatccggcgtctctacgatcccgtgtgggcgcaagtttgcgagctgatggtcgtttacgagcaggagcgccgcatctgcctaccagacatcttccacctcgacgccggcatgactgtgaccctctacaagcattacttcagctacagctactaa

SEQ ID NO: 23985 - protein, 291 aa, DROSOPHILA
MELGDSKLRAVRVLGQGTFGRVFLCHQNEVRGQPERKVCVKRIIVRNPKTELGLIKEEVYIISQLRHPHIVEFLRSFSHAGTVNIVMEYVPNGTLRDVIQQLPSGTGGVNQERLMGYFRDMVVGLEYLHIRCVIHRDIKPENMLLDANDRVKIADFGIANVHAPSTQLQAGMGTPMYMAPEAMSSQGKVDFKSDVWSLGLVLYELCLGRSPFAAFLDKNATPALLHTVVQALVRPRLDCQLIRRLYDPVWAQVCELMVVYEQERRICLPDIFHLDAGMTVTLYKHYFSYSY

SEQ ID NO: 23986 - DNA, 3632 bp, DROSOPHILA
tgcaggccttcttccatcagctggtgaggatgccatcaatcctttgttggactcgcccaggtaattcgagaagggcacattgcaacttcttcatcgcctgtcgtcgacgggcagctgttgattgattttatgcaagaaagaacatacgacgggtgggggaaaacatactggtaggtaaacagcagagcaactgtaaagccctctatatggaagttaaaggtgtgtttacgtttcctatgcactttgatttctttgattcgtaacatgccttgaaactagaaaaatatctacgagcattagcgcatgtttgattcaccacaagatatatagtacatatacatattcatttgtcgtttatccaacagtcctattcccataagaacattcccttgaggcacatttttttttttgaatctgccttgtataaaaataaatatttttgtacaaagaaaattgtgatattagattgattgcacaagaatgctgaaaacgcgctgggcggtttagaattaataatagaacttggcgattaaaacaaattttgagcaacaccagaaacgataaagtggaccatgatttggtcgtggattaacaatagctgccattgcattcaagtaaacgccgcccaccagcccagttgcataatcccaatctccgagttcgcgcgaggcacagctcctcactcgcttcacgcctgagctgcctgaaaagtgagaaagaagaattaagaaagccaaaggggggattggcgaccgacagactagccgccgacttttgggccaacacggctatgtgttcaaccccctttggtttaacgctacgtggcacaatttcgtagcccagtcgacaaggcgaggaagttaacgattggctgcactttcactcggacggaagccggtagtcagagtcagcggagcttgaattcagccgcatgccacggctgctgttcgaactacacatgcacataaaaaacgggcggttttgatgcaactggcacgctttattctggacaaggagtcaccgtttgacaagggaaacgttcggcttcgagtgcttcagctttagcttggtcctcggccgcccgcttcttgatcctctcctcgatgaccggtcggaagttccggatgagtccttggggcggccaagcagcaccatcggccagggcacaaatggtatgtccctcgatctgcttcgtcagttcgaacagcatatcgatctctgcaatttgcgcctgtcctgtcacaaatctatgcatgatcatgttcacccagtggagaccctcgcggcaaggagtgcactggccgcagctctcgtgcttatagaaagccgataatcgggcaatggccttgataatgtccgtatccttattcataacaattaaggcacccgttcccatggacgaacgcactgccatcagcccatcgtagtcgtgaatcgcactcgaggcgtgctccttggtaatgcagggagtggaggagccacccggaatgatggccagtagattgtcccagcccccgatcactccgccagcatggcgttcgataagctctctggttggcatggacatctcctcctcgacggtacaagggttgcaaacatgaccagagatattaaacagcttggtgccagagtttcgggtacgtccaaagctggcaaaccaattgccaccacgccggcaaatagtgggagacacggccaccgtttccacattggtcaccgtagacggacagccaaagacgccgatatcagccggaaagggaggcttgttccttggcttacccgccttgccctccagggattcaatcagagaggtttcctcaccgcaaatataggctcctgctccacgttgcacataaagatcgaaatcgaacccagaaccgcaggcattctttcccaggtagccagccttataggcctcaataatggcatactgaagattgcaagcttcgttgtaaaactctccgcgaatgtaaataaaaccagtgttggcacccatagcccgtccagcaatgagacatccctctaccagtttgtgtggatcatggcgcattatctcacgatccttgcaagtaccgggctctccttcatccgcattgaccaccagaaacttgggtcttccatcaggcggtttatgcataaatgaccacttaagtccactgggaaatccggcgccaccgcgtcctcgcagtccagatgtcttaatctcgttgactatccacttgtcacccttggctatgatctccttcgtcttgtaccagtcaccgcgcttcattgctgccttcaatcgccaatcgtgccgtccgtataaattggtaaagattcgatcagcatcagcaagtggtccaaaagtagttttcgtctgcggtggtggagttccgggcggtggcccctttgggggtggtggagcgccgcttttggcaggcggagaaccgcccgtcggcggtgcagaaacatttttaggtggaggagagcctgccggggtggccggcccagatcctttcggtggagttgattccttggcatccacagtcacaatagttcttccttgtagagcagcataattccagcctataaaattatccctcagctcgtcaactttctcatctagtcgagatttctttcttttagccatatctttaagcctttttaacaaattggcctcgagttctctttggtcggctggatctaaaaccttcttggcattttcattaataggaaatttcgttgtgggcggaagtttctcagctggaaattttgggcaatctacttcggatttttttatgctttccctttttttggctctttgctcagaggacagcaaatcgtcgttacaatcggtttgagatccttctctcataatcagcacaggtttggctggccgcaataagagtggaataacgctttcagcgtcacttagttggttcttcttcacattttgtatgctagaagttcggtatatgtttaccagcttgatatttccagttttattaccaggtcgtaaggcattttgaaggctttttacttctgttaaggctctatatgcacgagttagtcctaatgaaatcttgtaagcatcacaagctcggcgttttaacagaaacgatatcatgctttcgtctatattctttatctgattaactgaactctttggcaagtgtgttgaatcaaaggaaaattcaaagcatactacttccacatttttcgaacttgatatgttaaaaaagtttacattactcacaataacgaatatcggaaagtcccattatggattttccctataatgaccgtaagccccgctgggttcaactaaaatcttatcacaaagaatcgataaaatatgaagaaccaactactagtgtacaatgtatatggtagtagagggaaaatagcaaatgaatgcgccatattctgtagtcaaccacggaattcaagcattagcattaataaacaattcatttgaagtgacaccagcggccacagacccattttcggaaacccaaatatccccctattggaatctcacggataaggaacatcgaatgttttttttttttttttagtagcacattgaacaatgcgtggcgcgtgatttaagtgcaaccaagtgtacaaaaatggacaagaagtggaaa

SEQ ID NO: 23987 - DNA, 1632 bp, DROSOPHILA
atggctaaaagaaagaaatctcgactagatgagaaagttgacgagctgagggataattttataggctggaattatgctgctctacaaggaagaactattgtgactgtggatgccaaggaatcaactccaccgaaaggatctgggccggccaccccggcaggctctcctccacctaaaaatgtttctgcaccgccgacgggcggttctccgcctgccaaaagcggcgctccaccacccccaaaggggccaccgcccggaactccaccaccgcagacgaaaactacttttggaccacttgctgatgctgatcgaatctttaccaatttatacggacggcacgattggcgattgaaggcagcaatgaagcgcggtgactggtacaagacgaaggagatcatagccaagggtgacaagtggatagtcaacgagattaagacatctggactgcgaggacgcggtggcgccggatttcccagtggacttaagtggtcatttatgcataaaccgcctgatggaagacccaagtttctggtggtcaatgcggatgaaggagagcccggtacttgcaaggatcgtgagataatgcgccatgatccacacaaactggtagagggatgtctcattgctggacgggctatgggtgccaacactggttttatttacattcgcggagagttttacaacgaagcttgcaatcttcagtatgccattattgaggcctataaggctggctacctgggaaagaatgcctgcggttctgggttcgatttcgatctttatgtgcaacgtggagcaggagcctatatttgcggtgaggaaacctctctgattgaatccctggagggcaaggcgggtaagccaaggaacaagcctccctttccggctgatatcggcgtctttggctgtccgtctacggtgaccaatgtggaaacggtggccgtgtctcccactatttgccggcgtggtggcaattggtttgccagctttggacgtacccgaaactctggcaccaagctgtttaatatctctggtcatgtttgcaacccttgtaccgtcgaggaggagatgtccatgccaaccagagagcttatcgaacgccatgctggcggagtgatcgggggctgggacaatctactggccatcattccgggtggctcctccactccctgcattaccaaggagcacgcctcgagtgcgattcacgactacgatgggctgatggcagtgcgttcgtccatgggaacgggtgccttaattgttatgaataaggatacggacattatcaaggccattgcccgattatcggctttctataagcacgagagctgcggccagtgcactccttgccgcgagggtctccactgggtgaacatgatcatgcatagatttgtgacaggacaggcgcaaattgcagagatcgatatgctgttcgaactgacgaagcagatcgagggacataccatttgtgccctggccgatggtgctgcttggccgccccaaggactcatccggaacttccgaccggtcatcgaggagaggatcaagaagcgggcggccgaggaccaagctaaagctgaagcactcgaagccgaacgtttcccttgtcaaacggtgactccttgtccagaataa

SEQ ID NO: 23988 - protein, 543 aa, DROSOPHILA
MAKRKKSRLDEKVDELRDNFIGWNYAALQGRTIVTVDAKESTPPKGSGPATPAGSPPPKNVSAPPTGGSPPAKSGAPPPPKGPPPGTPPPQTKTTFGPLADADRIFTNLYGRHDWRLKAAMKRGDWYKTKEIIAKGDKWIVNEIKTSGLRGRGGAGFPSGLKWSFMHKPPDGRPKFLVVNADEGEPGTCKDREIMRHDPHKLVEGCLIAGRAMGANTGFIYIRGEFYNEACNLQYAIIEAYKAGYLGKNACGSGFDFDLYVQRGAGAYICGEETSLIESLEGKAGKPRNKPPFPADIGVFGCPSTVTNVETVAVSPTICRRGGNWFASFGRTRNSGTKLFNISGHVCNPCTVEEEMSMPTRELIERHAGGVIGGWDNLLAIIPGGSSTPCITKEHASSAIHDYDGLMAVRSSMGTGALIVMNKDTDIIKAIARLSAFYKHESCGQCTPCREGLHWVNMIMHRFVTGQAQIAEIDMLFELTKQIEGHTICALADGAAWPPQGLIRNFRPVIEERIKKRAAEDQAKAEALEAERFPCQTVTPCPE

SEQ ID NO: 23989 - DNA, 9887 bp, DROSOPHILA
gatttctttaataagtattactttttatagacttgaaatggtcaacaagcaagttctatgaaattttgaaattaatgatgaaaattctgtgtgttgtacaatattatattttcttataaataataggatatatttttcctttcagaatattgagccaaccttattttaattctttaaaatattagtaaaaatgatgcgagatttgcgcttttggtagatttcaaaaaatttgtattaattgaaaatgttaaataaaccacaaatggggtgagtctttgctaaatgctcaacacagaaagttgttttatgcttatatttgttaaggtatatttactaatctccgcacagactacgttttggtaggctaggaaatttaagacatttccgaatattaggagtacggaccgacgacgagatacatttaaagttcgtttcagcagaatcttaaatattaaaaacttagcgggcaagtaaatacaccgcgttcagctgattatcgatagctaggaaatttaagacatttccgaatattaggagtacggaccgacgacgagatatatttaaagttcgtttcagcagaatcttaaatattaaaaacttagcgggcaagtaaatacaccgcgttcagctgattatcgatagcaaccaggtggtcactctaatagacgttttcatgcgagcccgctgcggtcacaccaacttctcgaccgatttttcccctccatctagggtcactctaattttggacgaggttaggtaagacacgcgcggatgccgcgctgcgtaggataaatccgtcattagcataaccgcattgaagctaagtcttcgggaaaatgcttaagcttgtgcaatacatagccccccgggtgggcggcgccacgccccgaccgactgcctgcggctggggcaacttgctattgatttccccgagaagtggcgcgagctccgagaaatgtataacgcaacgtcgccattttcttttctcctccgccagcagcagcggcactttcgcttcttcttcttcgctctgcaccgaacaacgacaacagttccacgggagtcgcaggaatcgtgagacaatactgttcccaagcacatatagtagtctccaagctcagtcgcagcgtgcgtttcgagacagctcgaaaccagattcagacgactacgtagattccatcccgaaagcagagcagcggacgaggacgaggaaatcgcttttcaacgatcccgacgaaagaactgaggaaatcaaaattgaaggagtaatgtgagtacagccgcaagatttcatatgaaatgcgttggttttttccactcactgtcgccattttatcacccttcgtgccattcctctttttttttttttttttctgtacacctacgaagcgaggtgatgagtaattagtgtgagcgaaagagagagtttggggagagagagaaaaacacatggtttgctaaattttgtcagtcggaggtgaggttttcagccatttgttgtttttttctttgtgtttgcccccgcacatccgcaaaggagtagcaaaagcaacaagaacgacagcgcacgtcataaaaagaatttgcctgatttgtgaaacgtgttcttgcttcgtttgctattttatagcgttttaatttgtctgtatgccccgaacatgaacacgcgcactcacacagcggcacatacggacttgcttgtatgcgtgaatgcctgttgacggcggcattttctcgtgctcgtagaacagttcgaacagtgtgtgcgagcgtataacagtcggcggctgtcactgactagcgccgtcctgctcactcgccagcatgcctttccatcacattctttccatggctcacacgaggttttgtagagatatcgcgatgtttttggtattggcaattttataatttgatgtaaccatcccgacatagatttatacttactatgcttaatttgggaagtgaatggggttaatggtttgcttcgtttggttatctaatgcgtacattgaaatatataatttcagtataattctgtatactgaggacaattttagggaaaagtagggttattctcttaaaattttctctacactataagtaaaggttccatgcaaacacatttaacttacagattatcaaaaatgcattttatcgatcattttatctattttgctacgctctttttgtgtttacttatcatgaaccatgcttgttatgcaataaaaattatttattagaaagttatactatagtattgataaaaactcaagtaacaaccaaatattaaatggtaatagtaacccagttcgtgaactacgccatcacataaacggccccattagtctaaaatgtcaaatgacgccaattgattatgagctccccctttggcgagcgcgcgattcgtcttttcgcatgtcaaaaagcgacaggtagacacacagaaagtcaaaggtgcccccagggactgtcccctcctcccctcgggtgtttgcccaccgttgaaactaggggcaagacatttggctgtctcataaatgttcagagcgttccgcttcgctagttgggcacaaacgttagcgtgccagtgggtcctacaaatagacgtttagggcggtacggtgttccaaattgacagagtaatagacaaaaaaaaacgtgggcctggatcgtgggtgatttgcatggtgcaccccatagtgatgcccactaggatcacgaaaatggagcttacatacgaagtaaagcgaatataaagtggaaatttatagaagttagttcgtaacacaataaacataatttatgttgtaaattttgttttatacaactttaccatccaacttaatcttgcactatatttattaccacattgtatatacactccgcagagttaatattatttttccctaattattgcaaagtgctaacatatataggtcggtaccttcgccagttctgactggaactagaactgcgccaggttgattaatgccagagcaataaacgcagggctttgtacatggggctgtttagtttagttgagcatttaggggctgataaactggggtgaaaaattggtgggagggtgggctgtgaatagaaaccctgctcgaattgcatgttgttgtcaatcaaatttgccttactgtttgcattattcgaaatttatttaatttccctaacacgcaattagtttttatttaagtttattgcggttgtagcacagcacaactcccatgtcagctgtttagcagcgtcgaaagaaatcgaaaagcgaagacttaccttccaagccaagtcgcagttgaaatccaagtcccaactggcagacgtctagaaacggcagcatgcgagcaaagtaagccaagtcactcgtttctttttttcctcaattttctgtcaaagaaatacttaagaaaagaaagtgcagctgtctacgccgagccggaaaaaatgattccagttaagcatggtttaattctcgaaggtcccttttatcaagggaaaatttatgacacacagtttctgggtaatgtgtgtgcagcgcaaaattattttagatggcagataaggaggaattgattatacaaatgtacaacgcgaaattaaaaagtttgtgagaaaactatcaaactatatcaacttcagcgaaattcggttacaaagctcaaagtgggatattttcttaaagattccactgaattcacggcagcgaaataacaagtcgtgaagtcgttcaatttccatgaataaggaaaaggcccttgatacttgacactaagtaaacttcggcaatgcaagataagcatattagaattaaattactttaatctcatttgcctttaccaaagccaattaccatcgcaaccattaattttgccaaagttatctagaataaattacaatacaaaaaggcacacagggtacgcgtgaatttttaatttatcaagttaatgggaaaaacacttgtaatgccactaatttaattttttttatctcgaataaaacagcatcaagataaattggtggtcaaagatcaaaccagtacaagaaactgcaaactactaccttaagttcaaataagctgcaagatgatgatgatgtgagatttcttttcttgagcattccgtttctattttgcatacttagatactcatcgatcttcctttattatttcccagggcaccacacgatcgcgactttggtcacagtggacgtggcggtcgcggaggcgatcgaggcggcgatgatcggcgaggaggcggcggcggaggcaatcgcttcggtggcggcggtggcggtggcgattaccacggcataaggaatggacgcgtcgagaagcgacgcgatgaccgcggaggcggcaaccgatttggaggtggtggtggattcggggatcgccgaggaggaggtggcggcggcagccaagacctccccatgcgtccggtcgacttctccaacctggctcccttcaagaagaacttttaccaggagcaccctaacgtagcaaaccgatcgccctacgaagttcagaggtatcgcgaagagcaggagatcaccgtgcgcggacaggtgccgaaccccatccaggacttctccgaggtccatctgcccgactacgtcatgaaggagatccgccgacagggctacaaggcccccaccgctatccaagcgcagggctggcctatcgccatgagtggctcgaacttcgtcggcattgccaagacgggatccggaaagaccctgggctacatcctgcccgctattgtccacatcaacaaccagcagccgctgcagaggggcgacggacctatcgccctcgtgctggcccccactcgggagctggcccaacagatccagcaggtggccaccgaattcggttcctcgtcgtatgttcgcaacacctgcgtcttcggcggcgccccgaagggcggccaaatgcgggatctgcagcgcggctgcgagatcgtcattgccacacccggacgtcttattgatttcctctccgccggctctactaacctgaagcgttgcacctacttggtgctggacgaggccgatcgcatgttagacatgggcttcgagccccagatcagaaagatcgtctcacagatccggcccgaccgacagacgctcatgtggagcgctacctggcccaaggaggtcaagcagcttgccgaggactttttgggcaactacatccagatcaacattggatcgctggagctgtccgccaatcacaacatccgccaggtggtggacgtttgtgacgagttcagcaaggaggagaagtaagtggaccttaattctaattgtaattgtctagttgatactagaatttagagaagttcctcttataaaatttcttaatttaatatttcctcctatcaatacagattgaagaccctcctgtcagacatctacgacaccagcgagagccccggcaagattatcatattcgtggagacaaagcgacgcgtggacaacctggtgcgcttcatccgcagcttcggagtccgttgtggagctattcacggtgacaagtcgcaatcagaacgagactttgtgctccgtgagttccgctcgggcaagtccaacattctggtggccaccgatgtggcggcccgtggactaggtaagtttgctctcgcagcggcgtagaatatacaccgtagtttgcggccgaaagatttggatgggcctgtttagcgataaggtcacacttgctagggccattgcttacaacataccatcactaccagaggacaccgcacctaacgatcacccagcatcattacacgcacccactacatgcgagcagaacctaatcctacccgtaaaccaacctacccaccatccgaacttcctaaccacacctaatgatatatcccggtatctacccacatctagcgagcgcgccaactcagaaacagttttttttagacatacgccaaatgccgaaatcgaataatcaacttgaacttttaccccaccccctgaccctgacctgcaacccgcccccacctgcaacacccggcccaacccctgctaaaataatgtatgaaatgcgtaatgatcgtatatgatccatatgcactgcggtgtacctgttactacgcaacttttgtctttgtgcgtgtctctgcctctttctctctctcccccccccctctctctctctctctttcttgtttctttctcgtttacagaggccgattttggtagtatgatggggaggataatgaatgagcggcgaccactgcgaacactcgtgacttgagcgacttttgccaacatcagaatcagatctgttatgatatatgatgatagcacatcctgtgtgatatcttgcgcaaaaggaccgatgaaagttctcagattcagacggtcgagagacacgaatatcgaatatccccaacatcatgcatcatatgtggcctctgcagtccccgactttttgttgagaaagagtgaaataatatgatatgagacgtttttgcgaccaaagactaccatctaccaaccaaaaaccatctaccaatcaaccaaataagatccaacaacaacaactgaaccgaaccatcagagagccagctttttcctcagcagtggatggcggaaggcggcgtgcaaagtattgacggggtggcctggcccttgagaaagcactagaattggacatgcaccaagtcgacagcaaaagccaaagcaaagcaagcaagcaaaaacaagcacattgacaccaccacccccacaacacaaaccacactcacaaataagaacacctgacatttgctttaaccagagtgaggacgagaagatccatccggagatggatgatgtgtgtgctttcgaggatccagacgaagatgctgctgctgggtgctgcgtcctcccaaaagctcactaccaccacccactgaccgcgtttgccgccgcatcagttaagcccactgctcctggacgaaaaggcggcccgcttgttgttgttaaccctcccaaaaagttcaatctttatataatggtcgtgtctcctctcggtggtcacctccaaaatggtccatgtgagaagagagcttagtcagaggcgcacgcggctcaatgcaacaaactctccgcttcgccgtgcgatcgagatcgctaccttgctgtttctggggagagtttggaccacgagctgcgcgccgccaatcagagattttgattgagagaaaattgagtgaaacaatttatagcaccaagaaggtaacgtacattttgaaacattttctttttttctcttaaaaaaaaatacaaacaacccacaaatcaaaataccatagactcaatagtatgcaaaagtataaaaaaaaaaatttaaaaaaaaaaaagaaaagacaagtgtgttcaaagtgttcaagacatctcggaaaaacgctaaaaattgttgcaagcgagcgcgcatagcggaaaaatcatttggcaatttgaaaactgttcgtcaaataaataatacaccccaattaagtaagaacacagccaggagctcgaaactaatctatgcgccttctcttttccccggacacctgtagacgtggacggcatcaagtatgtcatcaactttgactacccgcaaaacagcgaggactacatccatcgcatcggtcgcacaggacgatccaacacaaagggcacctctttcgccttcttcaccaagaacaatgccaagcaagccaaggcgctggtcgacgtactccgagaagctaatcaggtgagttcatagcgtggtatcaggttacaacaccatttgggcagtcaaatctagtttgggtaaatctacatctaggtcttatattccaaatcttagaattagcatgcagatcccttaaccacatcgatttactgctctttttgatactgacccttagaggtaaacacaattctgatggtttcttatttctttatcaggaaatcaatcctgccctggaaaatctggcccgcaactcgcgctacgacggtggcggcggacgctcccgttatggaggcggtggcggcggcggtcgcttcggcggcggcggcttcaagaagggcagcctgagcaacggacgaggcttcggaggaggcggcggcggcggcggcgaaggcagacactcgcgcttcgactagatcgcggacaattagatgagcagtaaaagaagctataggaacaggagatttcagtagctaaactaaaccgcactaggtcctaagttaaattaagttcatagcttaagttaagatttcgtactactttcaccaaaccgctgacggttatttttagacttaaattcagactccctgattaatgaaacactacaaaatgcgagctatttgaacatagcgaatttatgtttaaatgatttgtaagttatttgacgctggccgcgaggtcggtacaacacaatccaattgagaacatcaaaaacactttacttaaacgcaaaaaccaattttcaaatatcatgtgataatttcttaatttaacgcaacgtatcactaaactaaaagcaaaggaaatcgtagcgcgaggagtacgttgatgtagtggaggaaaaggaggaagtaaggatcattcccgtctgtcccgttttgatgacaatgaacaaaggctgacctgacgagcgacctttgtttgataaataaattcttcaaattacttttggaaaattaacttttggataccttttatggctcaacacgagaacaagaatgtgtaaagcaaacaaagcaaacgggaaatcacattaactactgacactaaatacaaaagaaaaacaaactgtatgtacaagatgagaagttctctttcaatttaatttttcggaaaaaaataaagtttgtgtatacctattacaacctaaaccaacaacaaagcttctgttttatgcattcagctcaactgaatcgtaagcgactgggtcccacaaaggaatgccatttcccatgaaaggttgcgggtgtaaaataatcgtgatggcagcaatattttcgcagacatcattaagtgcgagacctggtcgctcgtggcagtgtcatcagcgatgccctcaccccttcaaaaatgccagataagacatggtgtcctccagggtgggaataccagagttcccaaccaagttgtctgctagccaagattcactcagcgactgcaaatggcataggcttcttggcattactagtgaatttcgtgaatttgaaataaataatcgaaataactgattcatatttaagatttccgcttttaaatcgttttcgaaatcgtttagactgagggatgtacattcacttcaattactctgatttgaagtcttaactacgttccaggaatcgatagttggcaacattcagtgaaataagcacggcggaccgtcttctgacaccacattcagacgcaatgaagccaatttacgttcgacttggcctgcttcgttgcgcgggttaaacgacctttctttgtccagggtcctcatccgagatgcttatgacaagttagctgtgttcttgggaccagatcaatccacttaccccgtttgcaggacggcgatttccgaggaccgataatgacgctgctggggacgtgaatgtggtcggattggagttcctgccattcgctggctacgttgggacgtcgcgctccggccgttgcggcgaagttgagaaggaagtcatttgtctaattgcttgaattgggctgtgcgcttgcaggacgaaaaggatgagcgggggagttttgattggtgatacgtaaagccaaagcaactttggcaaatttgttatcaagttttgaggcaaaagtttgtttgggtcagtcagtgctggaaaatttctctcttctttctcttcgcttgataccttgaacacaaaccgtt

SEQ ID NO: 23990 - DNA, 2903 bp, DROSOPHILA
cagcggcactttcgcttcttcttcttcgctctgcaccgaacaacgacaacagttccacgggagtcgcaggaatcgtgagacaatactgttcccaagcacatatagtagtctccaagctcagtcgcagcgtgcgtttcgagacagctcgaaaccagattcagacgactacgtagattccatcccgaaagcagagcagcggacgaggacgaggaaatcgcttttcaacgatcccgacgaaagaactgaggaaatcaaaattgaaggagtaattttttatttaagtttattgcggttgtagcacagcacaactcccatgtcagctgtttagcagcgtcgaaagaaatcgaaaagcgaagacttaccttccaagccaagtcgcagttgaaatccaagtcccaactggcagacgtctagaaacggcagcatgcgagcaaaggcaccacacgatcgcgactttggtcacagtggacgtggcggtcgcggaggcgatcgaggcggcgatgatcggcgaggaggcggcggcggaggcaatcgcttcggtggcggcggtggcggtggcgattaccacggcataaggaatggacgcgtcgagaagcgacgcgatgaccgcggaggcggcaaccgatttggaggtggtggtggattcggggatcgccgaggaggaggtggcggcggcagccaagacctccccatgcgtccggtcgacttctccaacctggctcccttcaagaagaacttttaccaggagcaccctaacgtagcaaaccgatcgccctacgaagttcagaggtatcgcgaagagcaggagatcaccgtgcgcggacaggtgccgaaccccatccaggacttctccgaggtccatctgcccgactacgtcatgaaggagatccgccgacagggctacaaggcccccaccgctatccaagcgcagggctggcctatcgccatgagtggctcgaacttcgtcggcattgccaagacgggatccggaaagaccctgggctacatcctgcccgctattgtccacatcaacaaccagcagccgctgcagaggggcgacggacctatcgccctcgtgctggcccccactcgggagctggcccaacagatccagcaggtggccaccgaattcggttcctcgtcgtatgttcgcaacacctgcgtcttcggcggcgccccgaagggcggccaaatgcgggatctgcagcgcggctgcgagatcgtcattgccacacccggacgtcttattgatttcctctccgccggctctactaacctgaagcgttgcacctacttggtgctggacgaggccgatcgcatgttagacatgggcttcgagccccagatcagaaagatcgtctcacagatccggcccgaccgacagacgctcatgtggagcgctacctggcccaaggaggtcaagcagcttgccgaggactttttgggcaactacatccagatcaacattggatcgctggagctgtccgccaatcacaacatccgccaggtggtggacgtttgtgacgagttcagcaaggaggagaaattgaagaccctcctgtcagacatctacgacaccagcgagagccccggcaagattatcatattcgtggagacaaagcgacgcgtggacaacctggtgcgcttcatccgcagcttcggagtccgttgtggagctattcacggtgacaagtcgcaatcagaacgagactttgtgctccgtgagttccgctcgggcaagtccaacattctggtggccaccgatgtggcggcccgtggactagacgtggacggcatcaagtatgtcatcaactttgactacccgcaaaacagcgaggactacatccatcgcatcggtcgcacaggacgatccaacacaaagggcacctctttcgccttcttcaccaagaacaatgccaagcaagccaaggcgctggtcgacgtactccgagaagctaatcaggaaatcaatcctgccctggaaaatctggcccgcaactcgcgctacgacggtggcggcggacgctcccgttatggaggcggtggcggcggcggtcgcttcggcggcggcggcttcaagaagggcagcctgagcaacggacgaggcttcggaggaggcggcggcggcggcggcgaaggcagacactcgcgcttcgactagatcgcggacaattagatgagcagtaaaagaagctataggaacaggagatttcagtagctaaactaaaccgcactaggtcctaagttaaattaagttcatagcttaagttaagatttcgtactactttcaccaaaccgctgacggttatttttagacttaaattcagactccctgattaatgaaacactacaaaatgcgagctatttgaacatagcgaatttatgtttaaatgatttgtaagttatttgacgctggccgcgaggtcggtacaacacaatccaattgagaacatcaaaaacactttacttaaacgcaaaaaccaattttcaaatatcatgtgataatttcttaatttaacgcaacgtatcactaaactaaaagcaaaggaaatcgtagcgcgaggagtacgttgatgtagtggaggaaaaggaggaagtaaggatcattcccgtctgtcccgttttgatgacaatgaacaaaggctgacctgacgagcgacctttgtttgataaataaattcttcaaattacttttggaaaattaacttttggataccttttatggctcaacacgagaacaagaatgtgtaaagcaaacaaagcaaacgggaaatcacattaactactgacactaaatacaaaagaaaaacaaactgtatgtacaagatgagaagttctctttcaatttaatttttcggaaaaaaataaagtttgtgtatacctattacaacctaaaccaacaa

SEQ ID NO: 23991 - protein, 578 aa, DROSOPHILA
MRAKAPHDRDFGHSGRGGRGGDRGGDDRRGGGGGGNRFGGGGGGGDYHGIRNGRVEKRRDDRGGGNRFGGGGGFGDRRGGGGGGSQDLPMRPVDFSNLAPFKKNFYQEHPNVANRSPYEVQRYREEQEITVRGQVPNPIQDFSEVHLPDYVMKEIRRQGYKAPTAIQAQGWPIAMSGSNFVGIAKTGSGKTLGYILPAIVHINNQQPLQRGDGPIALVLAPTRELAQQIQQVATEFGSSSYVRNTCVFGGAPKGGQMRDLQRGCEIVIATPGRLIDFLSAGSTNLKRCTYLVLDEADRMLDMGFEPQIRKIVSQIRPDRQTLMWSATWPKEVKQLAEDFLGNYIQINIGSLELSANHNIRQVVDVCDEFSKEEKLKTLLSDIYDTSESPGKIIIFVETKRRVDNLVRFIRSFGVRCGAIHGDKSQSERDFVLREFRSGKSNILVATDVAARGLDVDGIKYVINFDYPQNSEDYIHRIGRTGRSNTKGTSFAFFTKNNAKQAKALVDVLREANQEINPALENLARNSRYDGGGGRSRYGGGGGGGRFGGGGFKKGSLSNGRGFGGGGGGGGEGRHSRFD

SEQ ID NO: 23992 - DNA, 23203 bp, DROSOPHILA
aaaagacacacgtcccacatgcatgtgtgtgtatgtagtttaatctagtataatggcttgggtatataacaaataaaataaatccaataaacaacggcgcctagggcgctacattccacagtataattcgaactaaattagttacactatcaatgggcggcagtgtggtatatacatatattactccttgaatatcaagagtaacttgtgaatattaattagcaagaatgaagtaatttagcaacaaatatattaatctaaagccattaaatacatgtggcagtacgcagtaacaaaataatagtaaattgtggtcttaaaaccataaatccaacacatttttgtattaaatagttaattcaaacatacatattttcaaattcgaattttaatattacgttatgcgttaaagtgaaattataaacttttacttatacgtaaaagaaaaatgtcatttccaattttcatattaaatatcaactttaaatgcattatttaaataaaaaacttttgcaaatcgctatcgataacagcgcccacactatcgaaaggcgtcgataggccgctaggagctgccatcactagagatcacccttggaattgtccaattggatttgtttacctttcgcccgtttaagaatttcttttcggtggtttttcgcgtggtaaagtggctgttttgattgaattgattgtgcgaaggattgagacggagcgaccgtagttttgccggaggtacgtaagcaggaccttctcgtcctgctcccacttgggtgcccaatccccgccccccgccatagttttcgacctccaccgcgattgccggacatgtgcgtagtgtaattgatttttcggtcagcggtcaagcattatttatttaccaaatttgccaacccagcccacccccatcccccttccatatctcacccttgagtggcacacattttctcattttgtttgttttattgcaaatctcaatagaaaacgtttcggcgaccaaaaaaaaaaaaaaaaaaaaacacacacactaggactttcaacattacatattttagggattaactgtaggtacagagatcgggtttacatatgcataaaatacgcctataggtgttatcaattatttagttaattttgctaatcattttcttatcgcttttttacgtaacaaaaacggacgggtctaaaacggattaaatttgactaaaattttgaatgaaaaaactcggtgatgcacctggcggagattctgggtcaattatttcggtgctccggttgacaaagtgcgggatttgcgcttcttcagtttggtcttcaccttccgcaccagacttacggcgtccatggagatttctgttgcggatttgttggcctggacactggcattgctgcgctggtattgcatttgaccggtggatgaacccaaggcgccattgctgcccttggcctgcaatccggctgcatttctcatccgcctggagcctccaccggtcatattggtcggttgctgcacggcggtgatcacaagtccgccggtcttgaatttgttgggcgcacgtcctccgccgttgccctgcatgttacccatcacgccggcagagtgcattcgagagcccattgcccccactccgccttggcccttgaacaacaaccgcttatgctggtggtgcatatgttgtggtggctgctgctgctgctgctgctgtgctgcggatcctccggcgctgttgcgattccgggcgaatcgagtcaccagctgcgtggtctctgctatcttcatcatgctgctggacttgcgtttcaccttaccgccggattcggctgccaccaaagcctgaatgactttggcctggctggtcgttcccgttgactttctgaccacgtgcatgggcttgaagggctgctgctcccggtcccttgaatgttgcggatgatcctcaaccttcagtaggcgctgcgcctgttgcggatgggagcgccgttgctcctcttgttgctgccacatcatcagcttctgagaacaagcactggaatataaaaggacgttagatttaatagaggaataaccagggaataatcgcccgacttacttgaacagatcaacttgctccagttttctgactcttcgtggtgctcccacaaaggcgggtggcacacccatggcgatgccaccagacgcagctgtctgctccctgccattggaggggaacatgtttcggttctgaccaccgccacctccacccgctccagctccagctccagctcctcctcctcctgcagcaccaccgcctgcacttcgtatggtcgtcgtagtgttggccatttgggatgctgttatcgagtgacccttgtaccaggccagagggcgaccatccgcatccccgttcgcaccagtccagactttcttcttcagcgaaagcttaagctgcaggtcatcggccgtttgcacatttccatgtctctggggaatgaagttgctcgggacactccttgaaagaggtaaaccaatcgaattagatttcgcaaaatcattcgtaaaaatacccaccttctggggagcggttttgccttcgtctttattcctggcttggtatcgcctatgtaaaagttggccttgccctgaccaccgccgttgccattgggaatctcctgctgatcgagattgtgccacgaataggtgcgtctggcggatgtgccagttccgccggcctgccgttgcatcatgccaatacccgtgtccaattctggagcagttcgaggcgtcagcttgtagacatccagttttttcccaccgcccggagtgccgctcttcgaaggtgtggtcacaatcagttccggcggcatgtgcgacgcctttggtttctgcaccaccgtatcgccaatttcctcgatgtaccgcctctgcagatcgctctggagcagcgtatgccggagcggaggcactgcaccgtaaccattatgtccggacgtcggcgagtgctcctcgtcgtcggtggagaagtgcagatccgagccgggatccgttgtgggcaggtccagggtggtgcgcaccacctcgccacgtttctttgaaggcttattccttaccttagtgcgacgcgcctgcgtggactaagccgattagatgcgggagatttgaggcgagatcggggaattattaaattagttgtgcttgtgtgcttataagtatgtatcaaacatatgttaggtatatatattaaactttttaccgttttacctttacgatagataccttcttacgacgatagatgtagatgcgcctattggccagccacaggcggaaattgcgatcaacgtgaagtttctgattgaccaccggcttcttcttctccgtgggcatgaacttcttctttttggccgtcttctttgtgccagcaccactagtcttcaccttctttgtgacctctttactcgctgcggtgctaccacttgaaccatccggttccagtagcgattccgattgcgatgaatccatgctttccgaactgtcggaactctggcctccagtcggttgatcactattggatggcaaacttctggccaattgtctcggcgtatgcaatttctggacatcgtttgtctctacaactggagctgccgcttggacggccggtgctggcgtgggtgtggcagcactaacggcaggaccaccgcctccacgaaggcgttttccacttggagccgccttgacacccattttctgacgcctcctcttcaaggtcgttaatgttttgaatttgcgctggaacaggggcgtaaaatagatcctatccagctcgtgcatcaccttgcgcatgcgtcgcatgcgaaactgtagttcggattggggtagaaatagggtgcaggtgcagtgcagtaaaactagtgggataaaccccacttaccttgcggatttcgtgtatgacctcaggcgaactgggcggtgctcgggtgggagcacaacatggtccctccagatcggatgtcgttatcgagtgtttaccctcattatccgaactggagctgcagttgccctcgtcgctaatgatggttggaatgcatatgatggtggtagtagtagtagtagtagattagttaaggttagtagaggattgactgatggacccaccttgagtaatctgacaggggaatattcaatggttcgtcggcactagagccttctcgcatcagtctttcgataatttttgatcgtagcctgtcctgttgtttgagtaaatttaaaatctattgtaaatgttaatgcattaggattagtcagaaatcatacatttgctaaaaaaaaagaataggaaaataaatggtaatcaattaaaaacaatgtaagtgtgcggaaaaatcaagcgaatcactaaaagcatgtgtgaaaagcagtaaagtctaatgctaagcaaaagtcaaaaacgtaaatcatatgaatagatatggtatttatttcaaaaaataatattttccggttataataatacggttacgcttacgactagcaacatcgaaagaaacgcgaattatagttagagcgactaggataagataaaagacctattgtgcctggcgatgctgtgctgtgtgtcactatatagttaggattgtgcggattcaggtgggtgtatgtatatatgaaattatatataaatagatctacagaagtaatctaagaacccattgcgtggatagagatatactagccacgcaactgagtgctcaaaaacattagaaaaactgcgatacgcgcaaatagagagcattaaaattcatacaattcaatgcctcatatacatgtaatgttaattggataacatatgcatatggtgtatatgaccagatatacgtttagctacatgtatatctgttatatacctctggccgacgtgtatttgttgtgtgttgaattgtatttacgataatgtcgatggctttggatttgggatttgaattctgggtcagcacagcagcgctttagggacaaaacgcaggcagcgacgagttggtaacaataattgcgattacaattactctatgcgataaacgatatacgattgacaattgacgattaacgatttacgagtatagttcaagaacgataaaaaaaaaaagaaacggcacaagtcgatgtgtggtttttgttgtttggatttcgagctgtgtgtgtcgatagttatattgtgggctagtattgatgggataaaaccttcctaggagacacttttctccacagaacgtttcactttcaatttgtcgttcattatacatccctgatcggccattttctgtaatttcaatgctttctgttcgcgtttctcgcgttttcttatctttttgatttgtttaaacaactttgcgtgccgctttactttgttcggattctcatcgcagtagtccagaagtgtctcacaaaatgctcgtcccatgtgctcgtaatcctgaaagattcgataattatctagataggtattcgagtgtgaagtgaatgtctatgcaatttacctgcgtgttgaagtgcgtacccttgcgcgatcccagcgaggagccgccaaaggaggcttcgatcgtatagctgttggtgatgcccagcatccagaccacgatacgtccggtgccctccttgctgcgctgaattttgaacttgcagctctcgaaggagaactgcaatgggttggggttagtatatagtatatagtatctgattgcacatcataacccacccgatccgcactgttcttgtgcagcatcagcggaaagacctgctcggttaacttcttctccgggttgcgtttgttctcacagccatatatgaatatgttgtgcttgcgtgagtgagcgtgcatatcacagtacatggccacgccgcattcctcaatcagtctgtgataaataaatgatagcagtgaatatagttaaccaaagatgggcctctgtctgctgcttgaaactcaccttctaatcatggctttggtataccaaatggatggatatgtctcgcgtattaccgttcggtactggcggttcaggtccttgccggtcagcgagttacgtgtattgcccacaatgactccgtccggatttagcatgggcaccaatttaaaaatgaacttgtgccgcaaccgcttggccactgttgtgtccccggtgatgaagtccatcagacccttcatcatccacgaggctggcgtctcgctgggatggacacgtgccgataccacaatcgatttcttccgctaaatttgtatggaaacattgagaaatttaatatacaccttggtagaagattgttaaacaacatatgtacatatgtagctctttgaaacataatatcaattgctaattataactttaacgacctatgctgctatcaactttttgttcgcatataatgaatgagtttatctaagcacactgctgtttgtgcaggagtttcaaaagtttgtctacagattaattgccatgagatagatgagtttgtttgcccaactcacccgcatgttctcctcgttggatgagggcgccgtcaccgtcagatagtagacattattgccagccaaggtgcggcagagcaggcgcagcttgcagaactttgacttgaccggatggcgttggatctccatgaggtagtcctgcaggtcgctataggtgtacggatagctgtgcgcaaagaacaccgtgtcgtcgtcgtgctcgaactcaatggtaaaggtcagcgtgtatgtggagttgtcctcgtcatcctcgttggcgctactgctggcacttctggtggggaataagggaataaaccaattgaaaattcggctcaacagtggccaatttcatatgcaacccaattagatttctctagagacttgatgtcacttaaataaaaagggtctaataaaatgctaataaatatcaaagtatccgaaagttctacggtatttatgacatttaagactcaattgggtttaacccatacttactcatcatcgttccgatagtagcagatgttgtcgccgcatctgcgccagccttcgctcttctccttggcgcccagcgtggagtacatgaccggctgcataccatcgttgtaaagactgtccgacttcaccagattgacaatggagaagcggtagagcatcttgcgcctggtgcgtcgcacacggaagtagaaccattgcttggaccggctggtatagagatcgggtcgcaggtagagctcgtagtaggtgggcgtaatttggaccgccttggccaggttgccgctctcgaagcgcgattcaaactccagtccatcgtactcctccggattcatgggatggcaattggtcatgaagcgggcaccaccgacggccgaacggctaaactgcgcttggggtaaatcggagcaaagaaacgattgcgacgagttggtggtcgtcgtcgtttggttagtacttgtcgacgagattaaagtgccggtcgtctcctggctggtcatcgaattcagcaatatgtgctgatccttactcagccggaagacgttattgcgaacgggagaggaggtgcgagtgcccatcgagcttgtgccagttgttcccactcccatgcccatattcttttcatccttgccacccagacaaccgtccttgtcgcggttgcgccccctggcgagcgccgctgccgccgccgccacagtggccgcatgggtgtggggtaccgatcgtaatggggatcgcgattgcgcctgccgattcctagagcatacaacatcttgctgatgcaggccattagctgggggatggtgggttttattgtggggattttagtagtgcaaataggtttccctgcagtgaaagctctttctagggaatcttaggaatcttcaattttccttacttagttgcatgatatgaagtaatatttcctcaaactgtcccttcaaaaaagcttacactttctgaaactggaaaaaacctcttgttcattaagttgaagcgactttgaatctacaatctttgattccgtttaaaaagcaacccatttattttactggtaccccaaaagataagctaaaatcgctccaactagtgacccaacatttgccatatgcttacagccagccagcctgctcctgctctcgtctcccaccaaagtttccgtatccgaaacggatccggaaccgggacaaggacacttttcggcgccaccagcgagacgggccgaatagcttcccaagattctgcgcaagccaatgccacttcctgtattctctgcgtccgaatcggaatcatccacctcttcatcttcttcattacccaaactagagctactggagtcctcgtcagaggtgctttccctacgccgacgactgctactcattttctttttcaaacgcgatttggatcgatcttggcaggcacttcgctcaaaggccacctctaagcgggctatatttgttttgggcaacttgacggggcctacggcgaactggttcgataccttttgggatcccgatggcgggacgagatcttcgtgatccacgatccgatcgatcaccgccttggtcacattctttccaaactggctgaggacgtagcgcggcgaggctggcttatattcgctggtattgttcttccagatatcgtcgatatcgctggcatccttgctggcctccgaacggctggcggctctcgaatttcgggctgtgccaccacctacgggtgtgacctctgcctcctcctggtagcgtttcttcttcgcctcgatgagatccttaatgatggccttctctttggcctcaccgcttccaccacaataaccgccggacgtatcgtactcatcatcgtagtagtcatcgttgtcgtctagggacgcactggttgaccgattgtccacattgttgatcatcttggacacgctgttcagtttgccaggtgcacattcaccgccgccggccaggcgcatgggcgtggatcggctcggcggcgtcgaatcctggcgagagtccgaggaatagtccgattcgtcgctggactcatcgtcctccttcttcgccttgggcttttcctgtgtggtttttgtcgttgcctttttagtttttacattctcacatagtcgcaaaagtgtgttagtttcaaaattccccattttttatttattgaatgaatacacgattttccccattactggttagtgcaggtgcaaggtgcattatgttatactgccatttttttgatttgaaaatacattgaaaatgaatttcaattggatttacaaatcgaaatcgagcagttctttcgaatgtaatgcttaaaaatgatattctgaagatactcacatagttgacggcactaattggactgtagctgaacaccacaatgccgttctcctcgccaacgggacgcggtttcagctcgtttcccgtcggagcattgagcggctccggcacagcgggcacgtacggaatgtgtatgatgcgctcctcgatgacctgaatggaagtggaagagcaagagcaatataataggtacaaaaacaaaaaaaaaaagcttaaataaccaccagaaattctataatacgcgaattcttcagtgctcaataattcaaaccatcaaacttaaccctgttcagtttattgcgagagcatttgttcttcaattagtaaagcaatgaaatgaaatgtccttgcttatcgcttttaattagtgtaattaatacagtttccaccattacggcgacacctgttgttttttcaaagtctcgttaattaaaggcagtgatatttggttttcatggcacagatgttactagccatggcagttcccatcgttttgcatttgttgtccttggcaaggaaattggcgaacgtcagtgagagttattattacatttaaacttcatgtcaccaacgacgatttgctttgtgcccgatcccagctgcccaactgattgccaaaagccccacgcgaagccccatatatatccattccatttcctttttgagtgtcctcagttgaggctttgatgtcattctactgttctactgattttcccgtcgttgtaattctgcccacaagcttgagcagcttatttgcttagccttctggatatgcttacacatgtaagacgtgcacagtggggcaataactattcgcaaaatgggcaatagttactaatgaaattgattttcattgataaatttgatttaagcttactagtcgagtttacctgctgcacggatctattatctgaatatcactcatacgcaatgttgtctcataaacatgcaattggcatagaattgcatttttcatatttgaactataaatatcaagaatatatatatactgaataagcgaataaacattatttatcatcattttgcatacatggcgtatgagtactttctactttgcttttggtttgtctataaaatcttcaatttaggaaagcatcaggcattttagaaatatttttgccaaaatatttgccacgtttttcctgttacgcttactgtgcaaaaaaacaggacgataaagcatgcaaatctgatactcaaactcacatacacacacacaaacagcgatttgcagacatttgtgtctgtgtgatggcttaattgaaacatatcaacgtcagtttttgcaacaatccccctctctctttctgcggctgctacagccgtctctttcccacactcccccttgggttctctatttattttgttcacattttttggctttatttatttatgctgcgattttgtatgtacgatatgtacgatgatatcaaactaattagcttgtttattttacccaacgaatttcgtctgccttctgtcgctttcagttaatatgaccctctcgttttcctggtattgaaaattcgcaaaaagaaaataacgaagaaagctgaaaaagaagcaaactttttcatgcccattgccaatgccagtgtcattgtggcaacaactacaacaataacaacaaagcgtatcaagtcgacaccgaaggcgctttacgaatttcactttttatttgagtttgcattttggacgtcatggccaaaaggccaaaaaaaaaaaaaaaacgatgaaggcacacgaaagacgtttgcctcgaaaaaactttcttgacttattatttatgtgtgtatttttgctcttttaattgcatttacagtttgccgagtgtgcgtgtgtgtatgtgtgcgtgtgtgcctggagcctaaaaaaaaaggcagcgacttaacggcaaagcgacgaaggtgaagtgcgagcaggacagcgacagcaaatgtggtgagtttgtatttttaaatgtatggattacaaaaatttaaggattcaccgcaaaaactaatcattggttatttctaactgctactttttatgcgttttaaatttgaaatttagttcttttcactgttacaatattccattttttttttgcgtttgcatttgaagccatgttaattgacaaggaaacgttggtcttcctttgttttttcgattcattcgaattgcgccacaaattgctcagcaattgacctccaattgattcatttgccacccgcctcccccttgtggccgtctgtttaatcaatcagttggccaattttctgtttgacccttgaaaaaaaaaacccttcctcccactgaaaacccccgcgaaacctaaccaaaatcccacctcctaacagttcgcataaatcgcgttcattgagcgaccgacggggcgtatgggtaatgtgtaatatttgcccaacacaatttggcagcgcatcgaatgcaaatcgagtacaaataaataaaaatcgattgttaacaatgctaacgacttggccaacaattaggaaaagcacgagaaaaaaaaatacaacaaaggaaaaacaaataaataaaatctcaaagcggaaacgaaaggattttcattgcacttggcgagcgtttaccgcatgggtatgccatgggttaagcgggggcggctgtgggcgtggcctagtgtgtgcaccttttattgcaagttgacctacatagaggcaagatggttgagggacactacagtcccgctcgcctaagtcgaactttagtagcgcgtcaaatttataattaattacgtagaagaagtttgttgattgccaatgtgcttaaaactttcatgatcttcttcatataacatacataaaaataactgaacccaaagttcgacttaggcaagttggcctgtaatatcttcggatttgcggcggctcctttaaaggtcttcaccccattaaccctccgtcagccggatttttatatgcattaatatttatggggctcggcacgcatgtcctgcgatttcctgccagcagacgaggtgcgtgtcaaaggcattgaggctcatcccccatcctggttagaaatctaggacaccttttgcctgagccacgtcctcgtctacgtctatgtccttcaacggctcctcgacggatgcattgattgggcttggtgcttgggattgcgtttgaggttggccgctaaggattaccctggccaactgccactccactacattcactcactcacctggcattccaccggccatctgggggcctgctgtgagcagtcattgtccttgtccttcggcagggcgaagagatcgcgcggttccttcagacgtgcaactggtcgcagggtcttctcatccgtattcacaaccagctgattggtctttaggcccttcgataggaaactgccaaggaagcctgcaagacaggataacagggaaatggcttagtaaagggaaacggacgatgcggaaggcggatgccttcacaaatagttgaggaacttggttatgtactatggtaaaatacttgtgaatttgaaataaaaatagtcaggataataagtgcctatgtaaatgtaagctatgcatagcagctattgcaacccattaaaatgtattatttatgtttatattatctttaatttctcacgaatatgaatggtttattcatacctttcaatcgctttaattgcttttcatcagagttttgaactagtttggaaacttcttgattttgctaaactatgtataatgaccttaagctatattgcgtaattttgttaaatgggaaaacccaaactcgatttgctcccgaattaaaaaacgaattgcttacagcactgaaaaatatagaaactcgaccgatatgatgttcaactcaaagcctgtgtgtttatgagggaatgcgatgggatacagtgggtcagcaattatataaacatttgtcgtgccaaaacaaaaaaaaaagtttgcccctctatcttccagtttttaaaagtttacttttgcataggcgcagcagcaaatcgccattaaaattggcctaaatgagcgacatttcgggtgacttttgttaacaacaattaattgccatatgtgcggagggtgggggtgtattttctactaaagttttgtgtgtgcaaaagatatttcgttttcatttcgcactctttggaacgttctctttatttctcttgtagttttatgttttttgtttcttttcttttcccgccactgcaacatattttgttaattaatttttggtttctttcttggctttgtgctttctttgtgtgtctgcttagtcggtttttattagcacataaaagccgattttgttatcgtttttgttttgtgcgctttttcctttttttttttgccatgctttgtgctccttgttggcttcttttattgcaatttttcgctggaaaagcgaaaaaaaagggggggggggggctggtctgggctaatgcctggcaagcaactgtaaatctttgggggcttccagcgaaaaagtttttccgcagcagccaaccatttagatcctgtcaagtcgattaatatcgctaataattttcggcttttttactttttatgtttatgacccactgcaggtttcatggatttcgatgtggcttatgctctccctcaatgcaagcccataaaatttgtgttggctgtatggcttcaacaaatttgttttacatcagaattgagaaaagcgcgtaaacgtaaaatatatatattattcacaaaagaaatgcagcaaaagaaaatacaatattacaacgaaatgtcaagcagtcggattcgaaacaaagaaaatatgatttaataggttgcaaattcgtgtaatgggaatcgttgtaaagtagaaatattgttatttgattgtttgaaatggtgttttgatattctattaatccaaatacaaaatacaaaatatgttattattattattattattgagagttctgtgggggatcttctggcaattattttgggaacctgtcgaggggattattcagttgatttttcagtggaagcagttgagcacaagtatgtcaaattgttcatggctcattttgaatggttctatgtgaatgcactgcaaaaagtgtttatttacaaaaaaaaaaaaaaaaaaaaactgcgagtgcttcatatttatcgaaaacattttgactagaactgtattaaaaagacgccgtttgttttgctttgcgttgatatacgtctttagaaatatgtaaaattatatagataagatttatttgatttcttcagaacaagatgaccaagatacacaattgtaagatatagataggtatagtatatatataaagatacatttatgaaactcgctgttgcagttcaacccaatgttaattaatttgtcaattagcatgtatgtacaaaaatcgttaataattaaattgaatatttgcttttgtgttatattcgtataatctagtcctcagattatgctactaatgatcggattatttttcgctcagtgtaaccccaagaaatgttcttaccggcaaagaatttagaactcgctcctccaaacgatctcgaaaacgcgaaaaggaacacgggcgataaaagcgaaacgaaaacagaagaagacgctaaatgtggtgggtggcggaggcggtgagaaaacggggggcagcactcacacagctgttcgtataagctgatattttgttattctttcgaacagcgatgttcaaaatttgtgacactcgaacaaacagaaaacaataaaacaaaactgaaaggtgacaatagaaaaccgatttatggcggcacactttttaggtatttggatcttatttgtttctaatgctcagttttcgaatttccaatttcatgtgtcttttatttggagtctttgatttttttttttttaattatgaattcggttcgattatattgcaattttgttttgagatttcgaatggtgttttctttgtatttttttgttttgtcgtttgccgttgcgcgttttgttgttgactaaaacagaaaacccaagcgaatgtgaaatgctcagctctgtcgccgcgctgccgacgtcactgtcggcgtcgctgcctgcgaatattatttaatgcgaaagagcaggcgaaatcgcacaggagagagtgggagagagcttttgcactttcgctttgcaagtttcgcgctcagctgttctcgccttaaccgttatcctgcgcgcgtgtgtgtgtgggtatttgtctggctgccattgttattgtttggctgagctttcgctaaaactacagctgttcttgctgtttctgtgtgtgtgtgcgtgcaagagtgagcaaaggacttatgtcgctggtgatcttcagttcagatttgcaaatgtactttgtacaacactggactttttttgcgatttcttttttttttttggcaagtaggaatagtttgcattggtaataattttctttcatctttatgaccacagttagcaaagttgttaacattttgctaaaagtcaatttccagattctgtgtcaaaaactaaaaggattaaggcaaaggatgttaaaactaaatcattactctgtatttcgaatcgccctcatccttaagctgtttccacaaaaccatatccagcactcaactacttcagctgcacttttaaatggaatgacaaagctcaatcagcgaccttgacctttcaccccacgcaacaccctacctccccctctcccagcacatgtggtttttgtggctccttgttattgttggttttggactgcaatttggcgagcttttaaatgtcatttgtcgccagcaattgcacacatgaaatttcttttggaaaaaaagataaagaaagtaaatacagtatacagtaatttttgttgttggtaaaatgtcatgaaacctttttcaagcaatgcatttttcatgggaattcatttggaccacatgggcgattcggtggtttggccaaatggacaagggcaaacatttcgcgttcattcatgggaaaagcgaaaagagaaatggggaaatttcggaggagaaagggctagcgaaatagaaagctcgcgctcctcttctctgtgctttcaattttcaattgttgcgccaaggcggttgtcgtttgccgcaaaacgacagcaggaatttggcgttaattaaatgtttatgctcaaatgcaaagcgagagatctgcgcccgatcgcctctaattgccgacttttgcatattatttacttacattaaattgtattattattcgtaatatttatggcattttgtttatcccaatcgcaggcattcggccaatgcctttgaggccggaccgcaaaaatctcagccgatccgcaaaagcgcaatattattgccatcccacaatatttcacaatttttattcgacatttttttttttgcttttttttcgcctttttattccccgcgtttatgagtttgcaattttcattctcgtgaaatttgtttaatacatttcgttgttacattttctttgtttgccatttttccagacgcttttatggtattgccccctcagatcgttctacatataaaaatacccctggatttggggaatatacgttcttagtgaaagctagtaactaacttgtagtttgcttaaaaaaaaatatgcataattatgcaagacctgataattgcaaattaattaaactctcatccttaggatgtttagccaggcaactacaataacctagatccatgtaattgcgccccttttggctaagggattttccgaattttctaattaacctgcagcgatttgatttgtatggaattgatatgcaccgaattgtcgcagccaagcgaaaatttcacgctagacgtattcaaatagtcttgagggctcaagtcaatgaacattaatgggtttactgtctctgagttttggggtctctggctctgtgatttatgcaggtgaaatatcgttaatcgcaattcaatgaactgaaatgagttcgaatacccccctattatacatagtatagactctttcttggttgacaacaggcaacgacttgactttgatttcccaattgcgattccggaatttctgtgttaatgattttgtgttgccgttgccatgacagcagcaagtggcagctaaaatcaaacagttttgcggctaattctaattccattttatccgcactttatccgatttcaggtggacccggaagtgaggtagagggaaggaagaacgaaggaaggaaaggttgaaaacgaacaacgattcacaacgatattttcctacgggcgaaggcggtgataaaagcgcaacattcaacaaattccccatgctggccatgtagtacagtgaactatccataacagcaacgacctaacgaacagcaacaccgaggtgcccttagacaatctattcgtacaagagaaacaccaaactcaactaacaacaaattgaaagtgagtatttgcattatttactgttatatacttaataaattatttgctagacattgattgaactcgatattttgaaataaaatattgggtttcagttgcagatgtcctagtacttataccttgttcgatgagcctcaaattgatttgacaaatgttcttatgctaatggtgaaaagtaaaacgccatttagacagacaagttcaaacacaaacaatatataaaatgtaagcaataacaatacacaaataatataatcaatgagaaatcttcctacgatttacatgttttaacatattgaattcaatttttaactgcgctacattgaattatgagcaacttagagcacttaagactagcaaaagatataagcacaaaagattttttgtaaatgaatgctatatatggtatattcccttggaatatgacccattacctccactggatgtggtcagcgtgcagacgggaaatagctgcgcctgcaggaactgcacgcgaccgcctccaaagtccatggtatatatagtatctcgattcctacggcattatgatgaggaagatgggccagagttagttagctatgcggtatttgggatgagactcaaatgggaacacagactgttgattgatttcactaccgtcgtgcttcacttgcttttggcacacattgaaaaaatgcaaaccacttggttatatcctttaaactaggaccttatgcaatcgcagttgatagcgactataggcggcattattgttggtattcacacaccgattccgatcccgatttcgatttcgattccgatcctacgacactatgacactatgcagttttgttgtggctctttgtacggctcgtttcgcattgcgtcgtcaaatgataaccaccgatttggccaaactgagccgcagtcgatgattcgagtcgttgtgagccaactcgaatttccactgcgactgttataaacaaataaacaaagcctcgccagttctcattcgctttctctctcgctctctctctcgctcttttgtccaatcctcgttgtctaatgttccaaggaagtgcaaggcagtagagtcctggcactatacacatacccatacacttcatatctatggctcatagtacgccatcctaaccatcccatggaacctatccatccatggcatgccgtgaacatgaattcgattcgatggctcaaacaaagccaaagccaaaggcaaccagccttggatacgccaaaaaaaaaaaaaaaatagaaaaaaatgagaaaaactaacgagcacagttcgtggaatttttgtgcatattctaacgagcaacaaatgtttgccgaaggtggaacgcgattcacggatacgaatatctccaggtcacgtttacacctaacactgtatagattgtttgctaaacaacgagatgattccagttaacagcatatgaagtgtattattaagcggtttgatggacgaccaattcgaatttcttggcttacttaatctctgtagttcgtacttcttttcaaaatattaccaaatactattttcgtaattgttggaaaacgatttagaagatcagctgctgtcggttctaataattttctaatagctagaaaagctagacataaaaataaaaacgtcgcagctaaatagaaaatgtaaaaggaaagagataaaggaaaaaatcaaagcacagcctcgatgccaaaaccaatttgtcaaagtcgctcctcggcggcaacggaaaagcgttggttggggggaggtgggggtggagaatctatggtgttgcaagaggggtgcagcaccgtgggaaacttttactaaaagtgagcggcggaagggaggggggtgcgtacgcggggaagaagcagcagctgtcagctgcctacgcggacacaaaacgaggaggtgtcaaagagcgagaggagagagagccaagcgagaagaacaaacttttaatcactcgctccctatcgtcctcccttcatgttctctttctcctccttctcgtttctcctacattttttctatttgcttctgcctatgagattaagattatgtcatcgaagtggctgagcagcgagaagaagcagataaaccatataaggtgaagaaagccgaatgcgatatacccttctttctaaaggtctttctttcttatgttcaaaccccaaaagaaaaaagtgaaaaacttgttctactacgttttttttttgtttttgtgaatcaatatattatttttgcttatcaattagatacaggttctttgcaaagtgcaataataacccgcacaagagtattgttgaaagaaaaagctgcagcaacgatagaagcaacagcaatgatcttgatcgtgcaatttatgtgttttctattttggcaaaacgccgtgactgccaaggcgaaaataagactctctaaccgaaccgtaaacgcatgccgtcctcctcctgaccccgcgcacctgctcctttgtccattttacacgcttttcgccgatttagcctccccttaccgaccaccgattttcaagcccctgcgccgcttggccctcgtcaatcatcgaattgtgccagcgattagctttcgccaccccatcctccgatttgtccgccaagaacttttcccactttccgattctacagtgaataacgcactaaaaactttcgatctcaaagcttttgtaaagatacatatgtatatacgtatgatatatgatatataataagctcaataatcagttgtattaagtacagttcttataagtataaaatgattgatcttggattcttcaaattttatattttggaacaaaattattgatatatcaagatattgaaataattaaatcttaaacttgttcactagtttcctctctagccaatatgcactgtgtctctactttttcagctatctggccgctttgggcaaattaacaaattgcaattaaaaatttccgttggcagcggtcaacatgtgtgtttttgttcacacaaaaaataaaatcatccgaatccgaatttcgatgctgtataataattgtgacagagataaacgatgtacacgaattggaagtgaaaagcgaattatgggattgctgaataatattcccgatggatatgtgcagattgtgcatgcttcttttgatgtttaagcctctagagggagtgagtcagtgctctttttttattcgacataatcgtatttctgaaggagacatctactaccctttaataaatatactcataaaaattacgtatacgacatggggactaatgcttcatttgccttgctcaccagatagataattgctagtaataagaaatacatttcggagtgcttaaattattttaaaagaatttactgctagcctctttaaaacgacacactttacgagatgccaacacggcgtatgcgtaataaactgaaacgttattgagcaacagaggataatcgcttgcatattaggttgccttttgtctttgaacatttcttatcataaatatttgagagatactttttaagggtaacccgaaatccgtttcttgtgtaaccttcttgagtggatatcctttgttccgtttttatttttgcttacacaccaaattgaatcttcattatccgtcgacagcgcttgagtgaacatcttgagtggcacgcgggtggaaaaactaagtgcaccggaaaaaacgctctatgtgaaagtgtttgtatcaattatgtacaattattttgcatcttagcaattgctctgtatcataacatatcgcatgaaagtgacattcaattgcatagtttagcatatcgtttttattttttctcggtgttggggatggagcatctaacggcactcaccattcacatagtcgcccaggactagagaacattccatgtcattgcatttgaagttggctctcaccacattgacgttaacggtactgctatctctcttgagctccagctcatcttgctctccctcgacggcatcctccttggattccagctcgacctcctcccttccttcctcgcccacctcatctgctgctgtccctctctcagcgctcttacagcgttcattgttgttgctatcatcgctgcaactgctgcagcatctctctgcactccccccgctactcgcgctccccagcgctatctcgctctgatgcaaggggatgggctgaaggagagcgagggggcagtgacgtctgctcatcgaagccgagctcaaggttctcagcagacggctcagagaggctgacattgcctccctctctcgctccgccatcttggatggatgcacgtaaaaccaaaaaaaagacacacacacagcactcaagaacacagatcaaggcgcgcgcgtgcctgtccagcccaactaacggtttatctcggagtcgctctcctcttcttcggccagctaagctcagctcagctgctagcgcaactgctgactgagctgcaaaaccaacgcggacgacaatggtggcctctgcctctgccgacgtcgctgtcgctgcctttggcgaaattgcgaatcacagtaaaccacggcattaaaattgttgctgccacggcgttgcctttgtgcaaggcaccgacgaaaagcaaccgtacaacaaaaacaaactgaaggcccgtacaaaaggccgaatcggatataccctcaaacaagggctcctgcagcggctaaaaacatgatagttcagtagcagataatacacaaaattaccaaattgcatatcagtcatttatctttactaattgatagaatatgtagaatatttcatatataactacagctttctagttgtgcattattatccattttatatgtagatgccatgcgttttcagacttgggcgcaaaatgcacgtgtgctctcccgcgttagagtattaaacaaaaacacagaaaaacaacataaaaaaagtagttttttgttgttttgttgtaggcctactacacgtggcaatgcaggcggtgggcgggtcactgggtgggtggtggcactgtaacccccccccctttccatcccccctttgaaactccgccgtgattaacataaattgcgcacgacatggactatataaacagcacagaaaaatcccagcactcatccctgtatcgccgtatgcagccacccactggcgaagcatttgttttgcgattttaaaatgtacatacatatgtacatataataaaaatatgctcactaaatgccattgcttatatgatcctcctcctttcgcgccacccactccacggaagtctagccctttttgtttgcctactttttggcgcgtgagcgatttccatcagtgatgatgaaattttcgcataatggcatgtatttataatctgtaaatctgttaaatgaaaaacagatatttgaaacttttaagtgcttgtttttatacccattggcaatatttgcaca

SEQ ID NO: 23993 - DNA, 6563 bp, DROSOPHILA
agcagctgagctgagcttagctggccgaagaagaggagagcgactccgagataaaccgttagttgggctggacaggcacgcgcgcgccttgatctgtgttcttgagtgctgtgtgtgtgtcttttttttggttttacgtgcatccatccaagatggcggagcgagagagggaggcaatgtcagcctctctgagccgtctgctgagaaccttgagctcggcttcgatgagcagacgtcactgccccctcgctctccttcagcccatccccttgcatcagagcgagatagcgctggggagcgcgagtagcggggggagtgcagagagatgctgcagcagttgcagcgatgatagcaacaacaatgaacgctgtaagagcgctgagagagggacagcagcagatgaggtgggcgaggaaggaagggaggaggtcgagctggaatccaaggaggatgccgtcgagggagagcaagatgagctggagctcaagagagatagcagtaccgttaacgtcaatgtggtgagagccaacttcaaatgcaatgacatggaatgttctctagtcctgggcgactatgtgaatgcaattatctatctggtgagcaaggcaaatgaagcattagtccccatgtcgtatacaatcggaaagtgggaaaagttcttggcggacaaatcggaggatggggtggcgaaagctaatcgctggcacaattcgatgattgacgagggccaagcggcgcaggggcttgaaaatcggtggaatcgagatactatatataccatggactttggaggcggtcgcgtgcagttcctgcaggcgcagctatttcccgtctgcacgctgaccacatccagtggaggcttccttggcagtttcctatcgaagggcctaaagaccaatcagctggttgtgaatacggatgagaagaccctgcgaccagttgcacgtctgaaggaaccgcgcgatctcttcgccctgccgaaggacaaggacaatgactgctcacagcaggcccccagatggccggtggaatgccaggtcatcgaggagcgcatcatacacattccgtacgtgcccgctgtgccggagccgctcaatgctccgacgggaaacgagctgaaaccgcgtcccgttggcgaggagaacggcattgtggtgttcagctacagtccaattagtgccgtcaactatgaaaagcccaaggcgaagaaggaggacgatgagtccagcgacgaatcggactattcctcggactctcgccaggattcgacgccgccgagccgatccacgcccatgcgcctggccggcggcggtgaatgtgcacctggcaaactgaacagcgtgtccaagatgatcaacaatgtggacaatcggtcaaccagtgcgtccctagacgacaacgatgactactacgatgatgagtacgatacgtccggcggttattgtggtggaagcggtgaggccaaagagaaggccatcattaaggatctcatcgaggcgaagaagaaacgctaccaggaggaggcagaggtcacacccgtaggtggtggcacagcccgaaattcgagagccgccagccgttcggaggccagcaaggatgccagcgatatcgacgatatctggaagaacaataccagcgaatataagccagcctcgccgcgctacgtcctcagccagtttggaaagaatgtgaccaaggcggtgatcgatcggatcgtggatcacgaagatctcgtcccgccatcgggatcccaaaaggtatcgaaccagttcgccgtaggccccgtcaagttgcccaaaacaaatatagcccgcttagaggtggcctttgagcgaagtgcctgccaagatcgatccaaatcgcgtttgaaaaagaaaatgagtagcagtcgtcggcgtagggaaagcacctctgacgaggactccagtagctctagtttgggtaatgaagaagatgaagaggtggatgattccgattcggacgcagagaatacaggaagtggcattggcttgcgcagaatcttgggaagctattcggcccgtctcgctggtggcgccgaaaagtgtccttgtcccggttccggatccgtttcggatacggaaactttggtgggagacgagagcaggagcaggctggctggctctaatggcctgcatcagcaagatgttgtatgctctaggaatcggcaggcgcaatcgcgatccccattacgatcggtaccccacacccatgcggccactgtggcggcggcggcagcggcgctcgccagggggcgcaaccgcgacaaggacggttgtctgggtggcaaggatgaaaagaatatgggcatgggagtgggaacaactggcacaagctcgatgggcactcgcacctcctctcccgttcgcaataacgtcttccggctgagtaaggatcagcacatattgctgaattcgatgaccagccaggagacgaccggcactttaatctcgtcgacaagtactaaccaaacgacgacgaccaccaactcgtcgcaatcgtttctttgctccgatttaccccaagcgcagtttagccgttcggccgtcggtggtgcccgcttcatgaccaattgccatcccatgaatccggaggagtacgatggactggagtttgaatcgcgcttcgagagcggcaacctggccaaggcggtccaaattacgcccacctactacgagctctacctgcgacccgatctctataccagccggtccaagcaatggttctacttccgtgtgcgacgcaccaggcgcaagatgctctaccgcttctccattgtcaatctggtgaagtcggacagtctttacaacgatggtatgcagccggtcatgtactccacgctgggcgccaaggagaagagcgaaggctggcgcagatgcggcgacaacatctgctactatcggaacgatgatgaaagtgccagcagtagcgccaacgaggatgacgaggacaactccacatacacgctgacctttaccattgagttcgagcacgacgacgacacggtgttctttgcgcacagctatccgtacacctatagcgacctgcaggactacctcatggagatccaacgccatccgcggaagaaatcgattgtggtatcggcacgtgtccatcccagcgagacgccagcctcgtggatgatgaagggtctgatggacttcatcaccggggacacaacagtggccaagcggttgcggcacaagttcatttttaaattggtgcccatgctaaatccggacggagtcattgtgggcaatacacgtaactcgctgaccggcaaggacctgaaccgccagtaccgaacggtaatacgcgagacatatccatccatttggtataccaaagccatgattagaagactgattgaggaatgcggcgtggccatgtactgtgatatgcacgctcactcacgcaagcacaacatattcatatatggctgtgagaacaaacgcaacccggagaagaagttaaccgagcaggtctttccgctgatgctgcacaagaacagtgcggatcggttctccttcgagagctgcaagttcaaaattcagcgcagcaaggagggcaccggacgtatcgtggtctggatgctgggcatcaccaacagctatacgatcgaagcctcctttggcggctcctcgctgggatcgcgcaagggtacgcacttcaacacgcaggattacgagcacatgggacgagcattttgtgagacacttctggactactgcgatgagaatccgaacaaagacaggctacgatcaaaaattatcgaaagactgatgcgagaaggctctagtgccgacgaaccattgaatattcccctgtcagattactcaagcgacgagggcaactgcagctccagttcggataatgagggtaaacactcgataacgacatccgatctggagggaccatgttgtgctcccacccgagcaccgcccagttcgcctgaggtcatacacgaaatccgcaagtttcgcatgcgacgcatgcgcaaggtgatgcacgagctggataggatctattttacgcccctgttccagcgcaaattcaaaacattaacgaccttgaagaggaggcgtcagaaaatgggtgtcaaggcggctccaagtggaaaacgccttcgtggaggcggtggtcctgccgttagtgctgccacacccacgccagcaccggccgtccaagcggcagctccagttgtagagacaaacgatgtccagaaattgcatacgccgagacaattggccagaagtttgccatccaatagtgatcaaccgactggaggccagagttccgacagttcggaaagcatggattcatcgcaatcggaatcgctactggaaccggatggttcaagtggtagcaccgcagcgagtaaagaggtcacaaagaaggtgaagactagtggtgctggcacaaagaagacggccaaaaagaagaagttcatgcccacggagaagaagaagccggtggtcaatcagaaacttcacgttgatcgcaatttccgcctgtggctggccaataggcgcatctacatctatcgtcgtaagaagtccacgcaggcgcgtcgcactaaggtaaggaataagccttcaaagaaacgtggcgaggtggtgcgcaccaccctggacctgcccacaacggatcccggctcggatctgcacttctccaccgacgacgaggagcactcgccgacgtccggacataatggttacggtgcagtgcctccgctccggcatacgctgctccagagcgatctgcagaggcggtacatcgaggaaattggcgatacggtggtgcagaaaccaaaggcgtcgcacatgccgccggaactgattgtgaccacaccttcgaagagcggcactccgggcggtgggaaaaaactggatgtctacaagctgacgcctcgaactgctccagaattggacacgggtattggcatgatgcaacggcaggccggcggaactggcacatccgccagacgcacctattcgtggcacaatctcgatcagcaggagattcccaatggcaacggcggtggtcagggcaaggccaacttttacataggcgataccaagccaggaataaagacgaaggcaaaaccgctccccagaaggagtgtcccgagcaacttcattccccagagacatggaaatgtgcaaacggccgatgacctgcagcttaagctttcgctgaagaagaaagtctggactggtgcgaacggggatgcggatggtcgccctctggcctggtacaagggtcactcgataacagcatcccaaatggccaacactacgacgaccatacgaagtgcaggcggtggtgctgcaggaggaggaggagctggagctggagctggagcgggtggaggtggcggtggtcagaaccgaaacatgttcccctccaatggcagggagcagacagctgcgtctggtggcatcgccatgggtgtgccacccgcctttgtgggagcaccacgaagagtcagaaaactggagcaagttgatctgttcaatgcttgttctcagaagctgatgatgtggcagcaacaagaggagcaacggcgctcccatccgcaacaggcgcagcgcctactgaaggttgaggatcatccgcaacattcaagggaccgggagcagcagcccttcaagcccatgcacgtggtcagaaagtcaacgggaacgaccagccaggccaaagtcattcaggctttggtggcagccgaatccggcggtaaggtgaaacgcaagtccagcagcatgatgaagatagcagagaccacgcagctggtgactcgattcgcccggaatcgcaacagcgccggaggatccgcagcacagcagcagcagcagcagcagccaccacaacatatgcaccaccagcataagcggttgttgttcaagggccaaggcggagtgggggcaatgggctctcgaatgcactctgccggcgtgatgggtaacatgcagggcaacggcggaggacgtgcgcccaacaaattcaagaccggcggacttgtgatcaccgccgtgcagcaaccgaccaatatgaccggtggaggctccaggcggatgagaaatgcagccggattgcaggccaagggcagcaatggcgccttgggttcatccaccggtcaaatgcaataccagcgcagcaatgccagtgtccaggccaacaaatccgcaacagaaatctccatggacgccgtaagtctggtgcggaaggtgaagaccaaactgaagaagcgcaaatcccgcactttgtcaaccggagcaccgaaataattgacccagaatctccgccaggtgcatcaccgagttttttcattcaaaattttagtcaaatttaatccgttttagacccgtccgtttttgttacgtaaaaaagcgataagaaaatgattagcaaaattaactaaataattgataacacctataggcgtattttatgcatatgtaaacccgatctctgtacctacagttaatccctaaaatatgtaatgttgaaagtcctagtgtgtgtgttttttttttttttttttt

SEQ ID NO: 23994 - protein, 2050 aa, DROSOPHILA
MAEREREAMSASLSRLLRTLSSASMSRRHCPLALLQPIPLHQSEIALGSASSGGSAERCCSSCSDDSNNNERCKSAERGTAADEVGEEGREEVELESKEDAVEGEQDELELKRDSSTVNVNVVRANFKCNDMECSLVLGDYVNAIIYLVSKANEALVPMSYTIGKWEKFLADKSEDGVAKANRWHNSMIDEGQAAQGLENRWNRDTIYTMDFGGGRVQFLQAQLFPVCTLTTSSGGFLGSFLSKGLKTNQLVVNTDEKTLRPVARLKEPRDLFALPKDKDNDCSQQAPRWPVECQVIEERIIHIPYVPAVPEPLNAPTGNELKPRPVGEENGIVVFSYSPISAVNYEKPKAKKEDDESSDESDYSSDSRQDSTPPSRSTPMRLAGGGECAPGKLNSVSKMINNVDNRSTSASLDDNDDYYDDEYDTSGGYCGGSGEAKEKAIIKDLIEAKKKRYQEEAEVTPVGGGTARNSRAASRSEASKDASDIDDIWKNNTSEYKPASPRYVLSQFGKNVTKAVIDRIVDHEDLVPPSGSQKVSNQFAVGPVKLPKTNIARLEVAFERSACQDRSKSRLKKKMSSSRRRRESTSDEDSSSSSLGNEEDEEVDDSDSDAENTGSGIGLRRILGSYSARLAGGAEKCPCPGSGSVSDTETLVGDESRSRLAGSNGLHQQDVVCSRNRQAQSRSPLRSVPHTHAATVAAAAAALARGRNRDKDGCLGGKDEKNMGMGVGTTGTSSMGTRTSSPVRNNVFRLSKDQHILLNSMTSQETTGTLISSTSTNQTTTTTNSSQSFLCSDLPQAQFSRSAVGGARFMTNCHPMNPEEYDGLEFESRFESGNLAKAVQITPTYYELYLRPDLYTSRSKQWFYFRVRRTRRKMLYRFSIVNLVKSDSLYNDGMQPVMYSTLGAKEKSEGWRRCGDNICYYRNDDESASSSANEDDEDNSTYTLTFTIEFEHDDDTVFFAHSYPYTYSDLQDYLMEIQRHPRKKSIVVSARVHPSETPASWMMKGLMDFITGDTTVAKRLRHKFIFKLVPMLNPDGVIVGNTRNSLTGKDLNRQYRTVIRETYPSIWYTKAMIRRLIEECGVAMYCDMHAHSRKHNIFIYGCENKRNPEKKLTEQVFPLMLHKNSADRFSFESCKFKIQRSKEGTGRIVVWMLGITNSYTIEASFGGSSLGSRKGTHFNTQDYEHMGRAFCETLLDYCDENPNKDRLRSKIIERLMREGSSADEPLNIPLSDYSSDEGNCSSSSDNEGKHSITTSDLEGPCCAPTRAPPSSPEVIHEIRKFRMRRMRKVMHELDRIYFTPLFQRKFKTLTTLKRRRQKMGVKAAPSGKRLRGGGGPAVSAATPTPAPAVQAAAPVVETNDVQKLHTPRQLARSLPSNSDQPTGGQSSDSSESMDSSQSESLLEPDGSSGSTAASKEVTKKVKTSGAGTKKTAKKKKFMPTEKKKPVVNQKLHVDRNFRLWLANRRIYIYRRKKSTQARRTKVRNKPSKKRGEVVRTTLDLPTTDPGSDLHFSTDDEEHSPTSGHNGYGAVPPLRHTLLQSDLQRRYIEEIGDTVVQKPKASHMPPELIVTTPSKSGTPGGGKKLDVYKLTPRTAPELDTGIGMMQRQAGGTGTSARRTYSWHNLDQQEIPNGNGGGQGKANFYIGDTKPGIKTKAKPLPRRSVPSNFIPQRHGNVQTADDLQLKLSLKKKVWTGANGDADGRPLAWYKGHSITASQMANTTTTIRSAGGGAAGGGGAGAGAGAGGGGGGQNRNMFPSNGREQTAASGGIAMGVPPAFVGAPRRVRKLEQVDLFNACSQKLMMWQQQEEQRRSHPQQAQRLLKVEDHPQHSRDREQQPFKPMHVVRKSTGTTSQAKVIQALVAAESGGKVKRKSSSMMKIAETTQLVTRFARNRNSAGGSAAQQQQQQQPPQHMHHQHKRLLFKGQGGVGAMGSRMHSAGVMGNMQGNGGGRAPNKFKTGGLVITAVQQPTNMTGGGSRRMRNAAGLQAKGSNGALGSSTGQMQYQRSNASVQANKSATEISMDAVSLVRKVKTKLKKRKSRTLSTGAPK

SEQ ID NO: 23995 - DNA, 8483 bp, DROSOPHILA
agattgtacggctccaaatgtaattcaaacaaaataaaatgtgtccgagatacaattccttttaacgtatgtatgttcgttttcatgtttacatgtcattattgtacatatgtatacagttctaatgttattataactgtatactgaaactgtacttgcgcgacttaaaacctacatgtgtatgtcatttatgtacatacatatacagtttgtatgttatcttaactgtatcctgaatctgacggtaaccaaaacgcatgcttaaaaatgatatgaagatcgtaaccttttgcaatcaaaattttaaacaccaatttttgcgactttgattggtacatatgtacatatgtacgtatataaatatgtagctcgcaagctcacattcacacaaacatatgcatataaatatatttaaagaaacaaacaatttcaatcatttaccttttaacgaatgcagcattccgcgctgttggtacagcttatagggcgtcatactaaatgcaatcatgggaattaatttaaacaacggaatctttaccagcctctcttgcctgcgatcgcgtacaaatcttcgacatgcagatcaattgcgttggttaaatagcgcacaggagtgacctgttgtttttgcaagaccgctgagaataacacttgggacactaataaaactacttctactattaatttcactacactaagtccggcagctgggaactccgtcagatttgtgaatttacattgcttagctctgcgcaaaaaccaatacgcaaaccgttaaagaattaatcacaatggctgcgcgaataactgttgattgtgacatatcgatatatcgattgcattccctggatcttggcgtctggataagactgttaaattcaaattttgaattactaaaatctttacacatttctataaattaccgaatttcagaaaaataaatattaatattgttgcaaatatcccatatagtaggcgaaacaatacaataactaaaaataaactgtcatgaaatttattgcaatattcatatgaaaaatgatttcttttaaagaaaattgggtttcttgtacacaaatatttgtaattttttatgggcgctgtctcattatgtttttgtgaaaaaccagggttatgatgactttatttggttgtaaagacattgcaaattctgttgtttgtacgattaaagtcttcattctgcgcataccggtaaaattatacttttcatatttatctttaatatatttttgtaaaggaaaatacattatcttatggttggttacagaaaatacaaagacagagtgtaatgtacatacaatcgagttgtttaaaactttaggtttaacatatacaacgcatacaacaaatagaaatgttaaaagagacaaaaataagtttacaatggggacatgagaatgttgcataatttctaggcaacggatttaattgttttatacaatttccatagacaccaacataattaagttgcatgataattgaaggaggtactaactactgctttaatttttactgaactgaccgacactatactatgtatatgcataactaaagctcatcaattcttttggagctctctattaggtatatatgcgggtattaagacgactaaaactagttccgtgtgagaagactacacacatcagaatggtttaaattatatagcgaagagcacagcataagttagagaagaaagcccataagagttggcaagcctatgccgccttctcctctgactttaggctttaaaaacgacactaaaaattacgttggtgcttgggtatctgttaattttgacgctgatgaatataaggatagcttcgaccttttagcatatggtgactgcggttgcaacgcttcagcgtctagtcagttgtcaatctccagaggcttggcctcctcccacgagaagcccgcgcgaccgaagtgtccataagtgcttgttcgctggtatatcggctggcgcaggtttaggtcccttaaaacaaaaatatagacaattgttatgaaatattttttagcatctagagtttgacacttacttgacaatcttgccgggcctgaggtcaaagtttcgacggatgatatccagaagttctttttgtgacttgtgagaagttccgtagtcgaacacagttatggagagaggctcagcaagacctatggcgtaggacacttggacaaggcagcgcttgcagagaccggccttaaccagtgatttggccacccagcgtgctgcatatgcagctgatctgtcaaccttggtgaagtccttgccagagaatgcaccgccgccgtgggcgccccagcctccgtaagtatctacaatgatttttcttcctgtaagcccagcgtcacccattggtccaccgattacaaaaagcccacaaggattgatgtggacaatggtgttggcatcaatgtatttggcgggaatgactactttaacaactttctccattacttccgagcgcagggtttctaacgatatcttttcagaatgctgcatggacactacaatagtgtggacacgcttgggaactgctgatccctgattgaagaggtactcgcaggttacttgtgttttggaatcggggcgagcccaccagaacacatctgagcgacgcagctcagcaatcttttcgtttagtttgtgagccaaaacgacggttaggggcatacattcctcggtttcgtcggtggcatatccaaacatgataccctgcaaaaagtttatttcgcttcattaataatctctatcactaattaattaatcattaattattcacttaaaagtaaccaaaaccaaaaagaatcagtagcgttagataaataaaacacatttgggttaggaaagggtaaatcaagcatgggtgatagattcgggtatgaattaattgttgctacttaggagtcaaaaagttgtttacaaaattatgttagtgatgtatatatatgcagtagtgtgccttagttttgtgtctgctattctaattatggtatcgactgaaaagtcaaaagttaaatgatatggatttggcagcttcaattaacaaaaaagacgatcatatggttggtaggtcggttggagcaatattgcagcgctattatgatatagtggcaaacagatgaatttaaaattaaatagcaataaagtcgtcatacactacttcaattagttacgaaaatatataaaggaaacgataaacagaaattatagaagtggcgacaacaccccttccaaagagcttataaacgccctaccaccatgaatattttagtcgcaactaaattgctatcaataaaaattaaaaagatgcgttgctcttcggaaagggccttcgatcccggcctgccgagactgctacttctttactgcttctaaatcacacctgatctccggcaccgatctcttcctcggcacggttgacatgcactcccgcagcgatctcaggcgattgttggtccaatgccaacagcacattgcacgttttgaaatcgaaaccttttgtgaatttcgaagcgcgattgcgaagtgcacaatatcgtttaaagtttggtattggattgtatcgagattggtttaatatgaaacgaaaagaaagataaaagagagaagcgcagcaatggtgcacatacacaggaaaatgtctgtaagtaatgttcataatatgattttaaacaccctattattttagattataattatatatataaaaacggtttacaaaaaaatgtattttctacaatcttcataagcactctcttggtgttttttctatataccaaagtctgggaaaactttaagccttcttccataggtcagacaagccgcatgcaagacttctcttgcttccataaaacggtaactagcggaattttaatgattacataaatctttcaatggatttggttgaatgcaatttatgtggttagagaacgcccgcagtgtaatccaaatgtgtgatatgttatgtatttcagtcgttatatatttgcttgaggtgaaattgttaagttgtcttcgaccaaatggttcgtagctgtgggaaacaagtcaatttgattttttttggggcttaagaaaaaatagttatagtaatagtattcctattgctcatcagcttttaatgacaaaggcgaaactcttgttggcctgtgagcaagccaagttaatgtgggaaagatacgaattaagggaaacacttaacaaatgaaacgaaacgaacgaacgcacacactccgcatcacttagtgctaggcggtagtagaagaacggaaagctttgctgtacctggtcaccagcgccgacgtcttcttcttcgcggttgatatgaacgccgttggcaatgttgggcgactgttgctcgatggctacaagcaggttaagtgtcttccaatcgaaacctttttgatttttatttgattttattgttatttaatattgagttgacagtattgttcgtaggaccgacgtagggaacgaattgtaatacccgcccacaaattgtttatgtacctaatagacacttacccttggaggagtcatcataaccaatgtgctgcactgtctcacgaacaaccttctggtagtcgaccacagccttagacgtgatctcgccgcacagcagaatcatgcccgtcttggcgacggtttctgtattaaatattatggaatgtgttaaaagaaatttcggcaactttttcaggtaatccaaaaacagatttgccggtggtttgaccttgtttttttatgttggcgctatcgaataagtcaacttcaaaaagaatggcactcacggtgattcttgattaattctatgaatgagattatttattgttggtcagcgcaccttcattggccgaatttaatataaatctgattttgggtcagagcagtcatgtactccaggtttcataacacttaccacacgccaccttcgcgtttggatcctgcttcagatgggcatccaagatagcgtcgctgatttggtcgcacattttgtctaaaaaaaataaggtaagcaagaggtaagccagaggtgggcgaagaaggaggggaaagcatttttgtcggggagtggaaggaggaacgggccaaaatgttattcagtgcgacggatcaaaatttgctgggccatgcggtttcatttaatctgtctgctattgacagcgaaattcaattcccagaacaagagcataaggcgaccgtagtgttgtccaaacacaaaatgatgacatttgaagccgaatcgtccatgaaatcctgggagtcggattcatctgataccagtcgggttgctcgcgcttgcctcaaaacttggcgcgtaattggagtccgtcaacattcggctacttttcgtagtaaaggcgttattgaactcgaacatgcgtcagcaatagcaacataaattaccaaaactgttgactcatagaaatggcgcatggtatcgatttcggctgggataatgattgcgaggaaactagttaggtcaagggtttaaagtagctactctgaaatgggtttcagggtttccaatttccggctagtctaattatctattctaacaagtccgtcactcatttattacaaaaagacaggcgatattaatgtcaaccatttggggtgtattcttctgaatggcactcggcgcttatcatcacgattgtatagggctagattgtctagggctagcttgccaagccgacttaattagcattataaaataaaatagtatagaatagtaaaagtaatcaatgcgtagtataaaaggtcgctcggcttatcaacagctgttgtcaaacacactactatactggtcgccactgctgatataaacaaactctgggaggggcgaaaagatcgagctcgagcaaaacacgtggttggcaatttcggtgaaaaaaataagctttgacagcggtctagaaaaatgtaaggtatgtttgtgttggccgttgttttgatcgccatctgcgatcaaatgaacaagtgcgtggacaacgtagaacaacgtagagaatacttgaatttcgcatctcccatgagccacaagcacatggtgcgcatgacgtagtctctctgtacacacatacatacatatgtgagagccgcaaacgataaagaaccagtctattaattgcgtctgcccatccaagcacaaggtttagcccgctgttgtgcggggatttcaagagaagccagctgttctccgtggtcccagctttccggcttggtcaccgggcgatgcaacagaggcacgttttactagctcttcttcccgttctcagcctctgttcaagtcgtgcaaattgggtagaaatcaacaaaggtatggacataatttcgtcgccattttgttagagttcaggcggtaagcagaagtgagtagacggtggaggtgtggaactgggtatacagggaaagggacttcagacagaagggcctcagacgctagagaatcagtttggtcaggttatgagaactgacaggcaacatctctcaccacgcccgaaggggcatttgagattgtttctttttttacactgacactatcggtatgatgcaataggaggcgccgcagatgcaatgaagcactcacctggatgaccctcgccaacggactcggaagtgaacaggaatgtagctccgtcttccatgtcatatgagttgccattgctgccgttgcatccgttggcgctatgtccgtttgtcttttgcggcatgttgatgggtagtttgtaatatgtaactcgaagtttgaaggggcaatgggggagcagtgctataacccgagttccggtcggctaaattgttggtggagctgggggaacagagagaaagagaggccacattagcggttgttaaaaaacgcttaacgaaattgattttccgaactcttgcaaaacacatctattttcgcattcgcgaatctaagctataggccgcctcgaggctgttgggattttccggtattcgcacacttttcgttatagttttttttatataatcgcccttcttttatgtttttatgctgcgcgtttgccacaatcgtcgctacatacatgagacgcacgttgagcgggttcaaagctaaactagtcgctaggtgagggctcggtgctgctagctgtttaaaatgcgtgttcgacgttctagctattagttcaacaaattatacacactgattctgagttatactggttcagcgacggcaaccaaatcagcggcgcagccaacacacgtcctatcttagcgacggttctgaagaaaaagagcgcaactttttaatgccattcagaatttatacctccaacgagagagcgggcttttgcttatcgtcgcaaacggaggaggcggttctcttcggctgactcgattattattttgagacttatttgggcgctctttagggaaactttcctagcgttctcggtactctcaaatgattttacttcttcagtatctccacgtttttgggttttaagcagctgttccgccgcccagcgttgccaccccgctccggagtgaactgtagtgaatctagatccagatcctttattttatactcactgtggttttgaacaaaggatcagacaagatatggattatagtctcgactagcttcctgctcaacctgcgttcaactgcggatgatttttacagacgaataatatttataaatttttgtagacagcatttgagaagatgagtcggcaagaaataagagcttatcagaacaaaactatgtgctaccacggcagccacctatatacctaatttttaaaatctgtttagcattgctctctcggcttctcttatgtacagcaattgacatatacatattcgatgatatagacaatcgctacacgaagcgcaattcgaagcgaatttttaaacgaatgtctgtatctgttgaaaccctagcttttccctaacatggagtgactgcccttttggagatggatcgttcgacactatcttgtcaaggaaagtcgtcaattagggttctcatactattcgaacaatttgtgcttttgaaaaagtgcttacgtcatgccacagccaagaagacaaacaaggtctgccaagatcaaggagcctggtaatcagtttttgcatgtacattttttaaaattctaatacccactgaatataaccgaaaacaacaagccccattatctttcaaataaggtgtgaccccacggggcctaagaagatcgcgtgtgcctgaacgaacagatgcgcagggcacattattcttgagcacaaatggtgggtgcttgcgaactgtagattgtggcaatgcatttattttactgatttatcgtcagttattgtaatagccttaactaaacaatttatcactttgccaataacaaggttttttattatttcacttttctaatacatatataattttctttttgccgtaagaaacgttctcaatacgtagacaaaa

SEQ ID NO: 23996 - DNA, 2367 bp, DROSOPHILA
tgaagaagtaaaatcatttgagagtaccgagaacgctaggaaagtttccctaaagagcgcccaaataagtctcaaaataataatcgagtcagccgaagagaaccgcctcctccgtttgcgacgataagcaaaagcccgctctctcgttggagctccaccaacaatttagccgaccggaactcgggttatagcactgctcccccattgccccttcaaacttcgagttacatattacaaactacccatcaacatgccgcaaaagacaaacggacatagcgccaacggatgcaacggcagcaatggcaactcatatgacatggaagacggagctacattcctgttcacttccgagtccgttggcgagggtcatccagacaaaatgtgcgaccaaatcagcgacgctatcttggatgcccatctgaagcaggatccaaacgcgaaggtggcgtgtgaaaccgtcgccaagacgggcatgattctgctgtgcggcgagatcacgtctaaggctgtggtcgactaccagaaggttgttcgtgagacagtgcagcacattggttatgatgactcctccaagggtttcgatttcaaaacgtgcaatgtgctgttggcattggaccaacaatcgcctgagatcgctgcgggagtgcatgtcaaccgtgccgaggaagagatcggtgccggagatcagggtatcatgtttggatatgccaccgacgaaaccgaggaatgtatgcccctaaccgtcgttttggctcacaaactaaacgaaaagattgctgagctgcgtcgctcagatgtgttctggtgggctcgccccgattccaaaacacaagtaacctgcgagtacctcttcaatcagggatcagcagttcccaagcgtgtccacactattgtagtgtccatgcagcattctgaaaagatatcgttagaaaccctgcgctcggaagtaatggagaaagttgttaaagtagtcattcccgccaaatacattgatgccaacaccattgtccacatcaatccttgtgggctttttgtaatcggtggaccaatgggtgacgctgggcttacaggaagaaaaatcattgtagatacttacggaggctggggcgcccacggcggcggtgcattctctggcaaggacttcaccaaggttgacagatcagctgcatatgcagcacgctgggtggccaaatcactggttaaggccggtctctgcaagcgctgccttgtccaagtgtcctacgccataggtcttgctgagcctctctccataactgtgttcgactacggaacttctcacaagtcacaaaaagaacttctggatatcatccgtcgaaactttgacctcaggcccggcaagattgtcaaggacctaaacctgcgccagccgatataccagcgaacaagcacttatggacacttcggtcgcgcgggcttctcgtgggaggaggccaagcctctggagattgacaactgactagacgctgaagcgttgcaaccgcagtcaccatatgctaaaaggtcgaagctatccttatattcatcagcgtcaaaattaacagatacccaagcaccaacgtaatttttagtgtcgtttttaaagcctaaagtcagaggagaaggcggcataggcttgccaactcttatgggctttcttctctaacttatgctgtgctcttcgctatataatttaaaccattctgatgtgtgtagtcttctcacacggaactagttttagtcgtcttaatacccgcatatatacctaatagagagctccaaaagaattgatgagctttagttatgcatatacatagtatagtgtcggtcagttcagtaaaaattaaagcagtagttagtacctccttcaattatcatgcaacttaattatgttggtgtctatggaaattgtataaaacaattaaatccgttgcctagaaattatgcaacattctcatgtccccattgtaaacttatttttgtctcttttaacatttctatttgttgtatgcgttgtatatgttaaacctaaagttttaaacaactcgattgtatgtacattacactctgtctttgtattttctgtaaccaaccataagataatgtattttcctttacaaaaatatattaaagataaatatgaaaagtataattttaccggtatgcgcagaatgaagactttaatcgtacaaacaacagaatttgcaatgtctttacaaccaaataaagtcatcataaccctggtttttcacaaaaacataatgagacagcgcccataaaaaattacaaatatttgtgtacaagaaacccaattttctttaaaagaaatcatttttcatatgaatattgcaataaatttcatgacagttt

SEQ ID NO: 23997 - protein, 408 aa, DROSOPHILA
MPQKTNGHSANGCNGSNGNSYDMEDGATFLFTSESVGEGHPDKMCDQISDAILDAHLKQDPNAKVACETVAKTGMILLCGEITSKAVVDYQKVVRETVQHIGYDDSSKGFDFKTCNVLLALDQQSPEIAAGVHVNRAEEEIGAGDQGIMFGYATDETEECMPLTVVLAHKLNEKIAELRRSDVFWWARPDSKTQVTCEYLFNQGSAVPKRVHTIVVSMQHSEKISLETLRSEVMEKVVKVVIPAKYIDANTIVHINPCGLFVIGGPMGDAGLTGRKIIVDTYGGWGAHGGGAFSGKDFTKVDRSAAYAARWVAKSLVKAGLCKRCLVQVSYAIGLAEPLSITVFDYGTSHKSQKELLDIIRRNFDLRPGKIVKDLNLRQPIYQRTSTYGHFGRAGFSWEEAKPLEIDN

SEQ ID NO: 23998 - DNA, 8444 bp, DROSOPHILA
agattgtacggctccaaatgtaattcaaacaaaataaaatgtgtccgagatacaattccttttaacgtatgtatgttcgttttcatgtttacatgtcattattgtacatatgtatacagttctaatgttattataactgtatactgaaactgtacttgcgcgacttaaaacctacatgtgtatgtcatttatgtacatacatatacagtttgtatgttatcttaactgtatcctgaatctgacggtaaccaaaacgcatgcttaaaaatgatatgaagatcgtaaccttttgcaatcaaaattttaaacaccaatttttgcgactttgattggtacatatgtacatatgtacgtatataaatatgtagctcgcaagctcacattcacacaaacatatgcatataaatatatttaaagaaacaaacaatttcaatcatttaccttttaacgaatgcagcattccgcgctgttggtacagcttatagggcgtcatactaaatgcaatcatgggaattaatttaaacaacggaatctttaccagcctctcttgcctgcgatcgcgtacaaatcttcgacatgcagatcaattgcgttggttaaatagcgcacaggagtgacctgttgtttttgcaagaccgctgagaataacacttgggacactaataaaactacttctactattaatttcactacactaagtccggcagctgggaactccgtcagatttgtgaatttacattgcttagctctgcgcaaaaaccaatacgcaaaccgttaaagaattaatcacaatggctgcgcgaataactgttgattgtgacatatcgatatatcgattgcattccctggatcttggcgtctggataagactgttaaattcaaattttgaattactaaaatctttacacatttctataaattaccgaatttcagaaaaataaatattaatattgttgcaaatatcccatatagtaggcgaaacaatacaataactaaaaataaactgtcatgaaatttattgcaatattcatatgaaaaatgatttcttttaaagaaaattgggtttcttgtacacaaatatttgtaattttttatgggcgctgtctcattatgtttttgtgaaaaaccagggttatgatgactttatttggttgtaaagacattgcaaattctgttgtttgtacgattaaagtcttcattctgcgcataccggtaaaattatacttttcatatttatctttaatatatttttgtaaaggaaaatacattatcttatggttggttacagaaaatacaaagacagagtgtaatgtacatacaatcgagttgtttaaaactttaggtttaacatatacaacgcatacaacaaatagaaatgttaaaagagacaaaaataagtttacaatggggacatgagaatgttgcataatttctaggcaacggatttaattgttttatacaatttccatagacaccaacataattaagttgcatgataattgaaggaggtactaactactgctttaatttttactgaactgaccgacactatactatgtatatgcataactaaagctcatcaattcttttggagctctctattaggtatatatgcgggtattaagacgactaaaactagttccgtgtgagaagactacacacatcagaatggtttaaattatatagcgaagagcacagcataagttagagaagaaagcccataagagttggcaagcctatgccgccttctcctctgactttaggctttaaaaacgacactaaaaattacgttggtgcttgggtatctgttaattttgacgctgatgaatataaggatagcttcgaccttttagcatatggtgactgcggttgcaacgcttcagcgtctagtcagttgtcaatctccagaggcttggcctcctcccacgagaagcccgcgcgaccgaagtgtccataagtgcttgttcgctggtatatcggctggcgcaggtttaggtcccttaaaacaaaaatatagacaattgttatgaaatattttttagcatctagagtttgacacttacttgacaatcttgccgggcctgaggtcaaagtttcgacggatgatatccagaagttctttttgtgacttgtgagaagttccgtagtcgaacacagttatggagagaggctcagcaagacctatggcgtaggacacttggacaaggcagcgcttgcagagaccggccttaaccagtgatttggccacccagcgtgctgcatatgcagctgatctgtcaaccttggtgaagtccttgccagagaatgcaccgccgccgtgggcgccccagcctccgtaagtatctacaatgatttttcttcctgtaagcccagcgtcacccattggtccaccgattacaaaaagcccacaaggattgatgtggacaatggtgttggcatcaatgtatttggcgggaatgactactttaacaactttctccattacttccgagcgcagggtttctaacgatatcttttcagaatgctgcatggacactacaatagtgtggacacgcttgggaactgctgatccctgattgaagaggtactcgcaggttacttgtgttttggaatcggggcgagcccaccagaacacatctgagcgacgcagctcagcaatcttttcgtttagtttgtgagccaaaacgacggttaggggcatacattcctcggtttcgtcggtggcatatccaaacatgataccctgcaaaaagtttatttcgcttcattaataatctctatcactaattaattaatcattaattattcacttaaaagtaaccaaaaccaaaaagaatcagtagcgttagataaataaaacacatttgggttaggaaagggtaaatcaagcatgggtgatagattcgggtatgaattaattgttgctacttaggagtcaaaaagttgtttacaaaattatgttagtgatgtatatatatgcagtagtgtgccttagttttgtgtctgctattctaattatggtatcgactgaaaagtcaaaagttaaatgatatggatttggcagcttcaattaacaaaaaagacgatcatatggttggtaggtcggttggagcaatattgcagcgctattatgatatagtggcaaacagatgaatttaaaattaaatagcaataaagtcgtcatacactacttcaattagttacgaaaatatataaaggaaacgataaacagaaattatagaagtggcgacaacaccccttccaaagagcttataaacgccctaccaccatgaatattttagtcgcaactaaattgctatcaataaaaattaaaaagatgcgttgctcttcggaaagggccttcgatcccggcctgccgagactgctacttctttactgcttctaaatcacacctgatctccggcaccgatctcttcctcggcacggttgacatgcactcccgcagcgatctcaggcgattgttggtccaatgccaacagcacattgcacgttttgaaatcgaaaccttttgtgaatttcgaagcgcgattgcgaagtgcacaatatcgtttaaagtttggtattggattgtatcgagattggtttaatatgaaacgaaaagaaagataaaagagagaagcgcagcaatggtgcacatacacaggaaaatgtctgtaagtaatgttcataatatgattttaaacaccctattattttagattataattatatatataaaaacggtttacaaaaaaatgtattttctacaatcttcataagcactctcttggtgttttttctatataccaaagtctgggaaaactttaagccttcttccataggtcagacaagccgcatgcaagacttctcttgcttccataaaacggtaactagcggaattttaatgattacataaatctttcaatggatttggttgaatgcaatttatgtggttagagaacgcccgcagtgtaatccaaatgtgtgatatgttatgtatttcagtcgttatatatttgcttgaggtgaaattgttaagttgtcttcgaccaaatggttcgtagctgtgggaaacaagtcaatttgattttttttggggcttaagaaaaaatagttatagtaatagtattcctattgctcatcagcttttaatgacaaaggcgaaactcttgttggcctgtgagcaagccaagttaatgtgggaaagatacgaattaagggaaacacttaacaaatgaaacgaaacgaacgaacgcacacactccgcatcacttagtgctaggcggtagtagaagaacggaaagctttgctgtacctggtcaccagcgccgacgtcttcttcttcgcggttgatatgaacgccgttggcaatgttgggcgactgttgctcgatggctacaagcaggttaagtgtcttccaatcgaaacctttttgatttttatttgattttattgttatttaatattgagttgacagtattgttcgtaggaccgacgtagggaacgaattgtaatacccgcccacaaattgtttatgtacctaatagacacttacccttggaggagtcatcataaccaatgtgctgcactgtctcacgaacaaccttctggtagtcgaccacagccttagacgtgatctcgccgcacagcagaatcatgcccgtcttggcgacggtttctgtattaaatattatggaatgtgttaaaagaaatttcggcaactttttcaggtaatccaaaaacagatttgccggtggtttgaccttgtttttttatgttggcgctatcgaataagtcaacttcaaaaagaatggcactcacggtgattcttgattaattctatgaatgagattatttattgttggtcagcgcaccttcattggccgaatttaatataaatctgattttgggtcagagcagtcatgtactccaggtttcataacacttaccacacgccaccttcgcgtttggatcctgcttcagatgggcatccaagatagcgtcgctgatttggtcgcacattttgtctaaaaaaaataaggtaagcaagaggtaagccagaggtgggcgaagaaggaggggaaagcatttttgtcggggagtggaaggaggaacgggccaaaatgttattcagtgcgacggatcaaaatttgctgggccatgcggtttcatttaatctgtctgctattgacagcgaaattcaattcccagaacaagagcataaggcgaccgtagtgttgtccaaacacaaaatgatgacatttgaagccgaatcgtccatgaaatcctgggagtcggattcatctgataccagtcgggttgctcgcgcttgcctcaaaacttggcgcgtaattggagtccgtcaacattcggctacttttcgtagtaaaggcgttattgaactcgaacatgcgtcagcaatagcaacataaattaccaaaactgttgactcatagaaatggcgcatggtatcgatttcggctgggataatgattgcgaggaaactagttaggtcaagggtttaaagtagctactctgaaatgggtttcagggtttccaatttccggctagtctaattatctattctaacaagtccgtcactcatttattacaaaaagacaggcgatattaatgtcaaccatttggggtgtattcttctgaatggcactcggcgcttatcatcacgattgtatagggctagattgtctagggctagcttgccaagccgacttaattagcattataaaataaaatagtatagaatagtaaaagtaatcaatgcgtagtataaaaggtcgctcggcttatcaacagctgttgtcaaacacactactatactggtcgccactgctgatataaacaaactctgggaggggcgaaaagatcgagctcgagcaaaacacgtggttggcaatttcggtgaaaaaaataagctttgacagcggtctagaaaaatgtaaggtatgtttgtgttggccgttgttttgatcgccatctgcgatcaaatgaacaagtgcgtggacaacgtagaacaacgtagagaatacttgaatttcgcatctcccatgagccacaagcacatggtgcgcatgacgtagtctctctgtacacacatacatacatatgtgagagccgcaaacgataaagaaccagtctattaattgcgtctgcccatccaagcacaaggtttagcccgctgttgtgcggggatttcaagagaagccagctgttctccgtggtcccagctttccggcttggtcaccgggcgatgcaacagaggcacgttttactagctcttcttcccgttctcagcctctgttcaagtcgtgcaaattgggtagaaatcaacaaaggtatggacataatttcgtcgccattttgttagagttcaggcggtaagcagaagtgagtagacggtggaggtgtggaactgggtatacagggaaagggacttcagacagaagggcctcagacgctagagaatcagtttggtcaggttatgagaactgacaggcaacatctctcaccacgcccgaaggggcatttgagattgtttctttttttacactgacactatcggtatgatgcaataggaggcgccgcagatgcaatgaagcactcacctggatgaccctcgccaacggactcggaagtgaacaggaatgtagctccgtcttccatgtcatatgagttgccattgctgccgttgcatccgttggcgctatgtccgtttgtcttttgcggcatgttgatgggtagtttgtaatatgtaactcgaagtttgaaggggcaatgggggagcagtgctataacccgagttccggtcggctaaattgttggtggagctgggggaacagagagaaagagaggccacattagcggttgttaaaaaacgcttaacgaaattgattttccgaactcttgcaaaacacatctattttcgcattcgcgaatctaagctataggccgcctcgaggctgttgggattttccggtattcgcacacttttcgttatagttttttttatataatcgcccttcttttatgtttttatgctgcgcgtttgccacaatcgtcgctacatacatgagacgcacgttgagcgggttcaaagctaaactagtcgctaggtgagggctcggtgctgctagctgtttaaaatgcgtgttcgacgttctagctattagttcaacaaattatacacactgattctgagttatactggttcagcgacggcaaccaaatcagcggcgcagccaacacacgtcctatcttagcgacggttctgaagaaaaagagcgcaactttttaatgccattcagaatttatacctccaacgagagagcgggcttttgcttatcgtcgcaaacggaggaggcggttctcttcggctgactcgattattattttgagacttatttgggcgctctttagggaaactttcctagcgttctcggtactctcaaatgattttacttcttcagtatctccacgtttttgggttttaagcagctgttccgccgcccagcgttgccaccccgctccggagtgaactgtagtgaatctagatccagatcctttattttatactcactgtggttttgaacaaaggatcagacaagatatggattatagtctcgactagcttcctgctcaacctgcgttcaactgcggatgatttttacagacgaataatatttataaatttttgtagacagcatttgagaagatgagtcggcaagaaataagagcttatcagaacaaaactatgtgctaccacggcagccacctatatacctaatttttaaaatctgtttagcattgctctctcggcttctcttatgtacagcaattgacatatacatattcgatgatatagacaatcgctacacgaagcgcaattcgaagcgaatttttaaacgaatgtctgtatctgttgaaaccctagcttttccctaacatggagtgactgcccttttggagatggatcgttcgacactatcttgtcaaggaaagtcgtcaattagggttctcatactattcgaacaatttgtgcttttgaaaaagtgcttacgtcatgccacagccaagaagacaaacaaggtctgccaagatcaaggagcctggtaatcagtttttgcatgtacattttttaaaattctaatacccactgaatataaccgaaaacaacaagccccattatctttcaaataaggtgtgaccccacggggcctaagaagatcgcgtgtgcctgaacgaacagatgcgcagggcacattattcttgagcacaaatggtgggtgcttgcgaactgtagattgtggcaatgcatttattttactgatttatcgtcagttattgtaatagccttaactaaacaatttatcactttgccaataacaaggttttttattatttcacttttctaatacatatataatttt

SEQ ID NO: 23999 - DNA, 2328 bp, DROSOPHILA
gaaagtttccctaaagagcgcccaaataagtctcaaaataataatcgagtcagccgaagagaaccgcctcctccgtttgcgacgataagcaaaagcccgctctctcgttggagctccaccaacaatttagccgaccggaactcgggttatagcactgctcccccattgccccttcaaacttcgagttacatattacaaactacccatcaacatgccgcaaaagacaaacggacatagcgccaacggatgcaacggcagcaatggcaactcatatgacatggaagacggagctacattcctgttcacttccgagtccgttggcgagggtcatccagacaaaatgtgcgaccaaatcagcgacgctatcttggatgcccatctgaagcaggatccaaacgcgaaggtggcgtgtgaaaccgtcgccaagacgggcatgattctgctgtgcggcgagatcacgtctaaggctgtggtcgactaccagaaggttgttcgtgagacagtgcagcacattggttatgatgactcctccaagggtttcgattggaagacacttaacctgcttgtagccatcgagcaacagtcgcccaacattgccaacggcgttcatatcaaccgcgaagaagaagacgtcggcgctggtgaccagggtatcatgtttggatatgccaccgacgaaaccgaggaatgtatgcccctaaccgtcgttttggctcacaaactaaacgaaaagattgctgagctgcgtcgctcagatgtgttctggtgggctcgccccgattccaaaacacaagtaacctgcgagtacctcttcaatcagggatcagcagttcccaagcgtgtccacactattgtagtgtccatgcagcattctgaaaagatatcgttagaaaccctgcgctcggaagtaatggagaaagttgttaaagtagtcattcccgccaaatacattgatgccaacaccattgtccacatcaatccttgtgggctttttgtaatcggtggaccaatgggtgacgctgggcttacaggaagaaaaatcattgtagatacttacggaggctggggcgcccacggcggcggtgcattctctggcaaggacttcaccaaggttgacagatcagctgcatatgcagcacgctgggtggccaaatcactggttaaggccggtctctgcaagcgctgccttgtccaagtgtcctacgccataggtcttgctgagcctctctccataactgtgttcgactacggaacttctcacaagtcacaaaaagaacttctggatatcatccgtcgaaactttgacctcaggcccggcaagattgtcaaggacctaaacctgcgccagccgatataccagcgaacaagcacttatggacacttcggtcgcgcgggcttctcgtgggaggaggccaagcctctggagattgacaactgactagacgctgaagcgttgcaaccgcagtcaccatatgctaaaaggtcgaagctatccttatattcatcagcgtcaaaattaacagatacccaagcaccaacgtaatttttagtgtcgtttttaaagcctaaagtcagaggagaaggcggcataggcttgccaactcttatgggctttcttctctaacttatgctgtgctcttcgctatataatttaaaccattctgatgtgtgtagtcttctcacacggaactagttttagtcgtcttaatacccgcatatatacctaatagagagctccaaaagaattgatgagctttagttatgcatatacatagtatagtgtcggtcagttcagtaaaaattaaagcagtagttagtacctccttcaattatcatgcaacttaattatgttggtgtctatggaaattgtataaaacaattaaatccgttgcctagaaattatgcaacattctcatgtccccattgtaaacttatttttgtctcttttaacatttctatttgttgtatgcgttgtatatgttaaacctaaagttttaaacaactcgattgtatgtacattacactctgtctttgtattttctgtaaccaaccataagataatgtattttcctttacaaaaatatattaaagataaatatgaaaagtataattttaccggtatgcgcagaatgaagactttaatcgtacaaacaacagaatttgcaatgtctttacaaccaaataaagtcatcataaccctggtttttcacaaaaacataatgagacagcgcccataaaaaattacaaatatttgtgtacaagaaacccaattttctttaaaagaaatcatttttcatatgaatattgcaataaatttcatgacagttt

SEQ ID NO: 24000 - protein, 408 aa, DROSOPHILA
MPQKTNGHSANGCNGSNGNSYDMEDGATFLFTSESVGEGHPDKMCDQISDAILDAHLKQDPNAKVACETVAKTGMILLCGEITSKAVVDYQKVVRETVQHIGYDDSSKGFDWKTLNLLVAIEQQSPNIANGVHINREEEDVGAGDQGIMFGYATDETEECMPLTVVLAHKLNEKIAELRRSDVFWWARPDSKTQVTCEYLFNQGSAVPKRVHTIVVSMQHSEKISLETLRSEVMEKVVKVVIPAKYIDANTIVHINPCGLFVIGGPMGDAGLTGRKIIVDTYGGWGAHGGGAFSGKDFTKVDRSAAYAARWVAKSLVKAGLCKRCLVQVSYAIGLAEPLSITVFDYGTSHKSQKELLDIIRRNFDLRPGKIVKDLNLRQPIYQRTSTYGHFGRAGFSWEEAKPLEIDN

SEQ ID NO: 24001 - DNA, 7594 bp, DROSOPHILA
tttcttgtacacaaatatttgtaattttttatgggcgctgtctcattatgtttttgtgaaaaaccagggttatgatgactttatttggttgtaaagacattgcaaattctgttgtttgtacgattaaagtcttcattctgcgcataccggtaaaattatacttttcatatttatctttaatatatttttgtaaaggaaaatacattatcttatggttggttacagaaaatacaaagacagagtgtaatgtacatacaatcgagttgtttaaaactttaggtttaacatatacaacgcatacaacaaatagaaatgttaaaagagacaaaaataagtttacaatggggacatgagaatgttgcataatttctaggcaacggatttaattgttttatacaatttccatagacaccaacataattaagttgcatgataattgaaggaggtactaactactgctttaatttttactgaactgaccgacactatactatgtatatgcataactaaagctcatcaattcttttggagctctctattaggtatatatgcgggtattaagacgactaaaactagttccgtgtgagaagactacacacatcagaatggtttaaattatatagcgaagagcacagcataagttagagaagaaagcccataagagttggcaagcctatgccgccttctcctctgactttaggctttaaaaacgacactaaaaattacgttggtgcttgggtatctgttaattttgacgctgatgaatataaggatagcttcgaccttttagcatatggtgactgcggttgcaacgcttcagcgtctagtcagttgtcaatctccagaggcttggcctcctcccacgagaagcccgcgcgaccgaagtgtccataagtgcttgttcgctggtatatcggctggcgcaggtttaggtcccttaaaacaaaaatatagacaattgttatgaaatattttttagcatctagagtttgacacttacttgacaatcttgccgggcctgaggtcaaagtttcgacggatgatatccagaagttctttttgtgacttgtgagaagttccgtagtcgaacacagttatggagagaggctcagcaagacctatggcgtaggacacttggacaaggcagcgcttgcagagaccggccttaaccagtgatttggccacccagcgtgctgcatatgcagctgatctgtcaaccttggtgaagtccttgccagagaatgcaccgccgccgtgggcgccccagcctccgtaagtatctacaatgatttttcttcctgtaagcccagcgtcacccattggtccaccgattacaaaaagcccacaaggattgatgtggacaatggtgttggcatcaatgtatttggcgggaatgactactttaacaactttctccattacttccgagcgcagggtttctaacgatatcttttcagaatgctgcatggacactacaatagtgtggacacgcttgggaactgctgatccctgattgaagaggtactcgcaggttacttgtgttttggaatcggggcgagcccaccagaacacatctgagcgacgcagctcagcaatcttttcgtttagtttgtgagccaaaacgacggttaggggcatacattcctcggtttcgtcggtggcatatccaaacatgataccctgcaaaaagtttatttcgcttcattaataatctctatcactaattaattaatcattaattattcacttaaaagtaaccaaaaccaaaaagaatcagtagcgttagataaataaaacacatttgggttaggaaagggtaaatcaagcatgggtgatagattcgggtatgaattaattgttgctacttaggagtcaaaaagttgtttacaaaattatgttagtgatgtatatatatgcagtagtgtgccttagttttgtgtctgctattctaattatggtatcgactgaaaagtcaaaagttaaatgatatggatttggcagcttcaattaacaaaaaagacgatcatatggttggtaggtcggttggagcaatattgcagcgctattatgatatagtggcaaacagatgaatttaaaattaaatagcaataaagtcgtcatacactacttcaattagttacgaaaatatataaaggaaacgataaacagaaattatagaagtggcgacaacaccccttccaaagagcttataaacgccctaccaccatgaatattttagtcgcaactaaattgctatcaataaaaattaaaaagatgcgttgctcttcggaaagggccttcgatcccggcctgccgagactgctacttctttactgcttctaaatcacacctgatctccggcaccgatctcttcctcggcacggttgacatgcactcccgcagcgatctcaggcgattgttggtccaatgccaacagcacattgcacgttttgaaatcgaaaccttttgtgaatttcgaagcgcgattgcgaagtgcacaatatcgtttaaagtttggtattggattgtatcgagattggtttaatatgaaacgaaaagaaagataaaagagagaagcgcagcaatggtgcacatacacaggaaaatgtctgtaagtaatgttcataatatgattttaaacaccctattattttagattataattatatatataaaaacggtttacaaaaaaatgtattttctacaatcttcataagcactctcttggtgttttttctatataccaaagtctgggaaaactttaagccttcttccataggtcagacaagccgcatgcaagacttctcttgcttccataaaacggtaactagcggaattttaatgattacataaatctttcaatggatttggttgaatgcaatttatgtggttagagaacgcccgcagtgtaatccaaatgtgtgatatgttatgtatttcagtcgttatatatttgcttgaggtgaaattgttaagttgtcttcgaccaaatggttcgtagctgtgggaaacaagtcaatttgattttttttggggcttaagaaaaaatagttatagtaatagtattcctattgctcatcagcttttaatgacaaaggcgaaactcttgttggcctgtgagcaagccaagttaatgtgggaaagatacgaattaagggaaacacttaacaaatgaaacgaaacgaacgaacgcacacactccgcatcacttagtgctaggcggtagtagaagaacggaaagctttgctgtacctggtcaccagcgccgacgtcttcttcttcgcggttgatatgaacgccgttggcaatgttgggcgactgttgctcgatggctacaagcaggttaagtgtcttccaatcgaaacctttttgatttttatttgattttattgttatttaatattgagttgacagtattgttcgtaggaccgacgtagggaacgaattgtaatacccgcccacaaattgtttatgtacctaatagacacttacccttggaggagtcatcataaccaatgtgctgcactgtctcacgaacaaccttctggtagtcgaccacagccttagacgtgatctcgccgcacagcagaatcatgcccgtcttggcgacggtttctgtattaaatattatggaatgtgttaaaagaaatttcggcaactttttcaggtaatccaaaaacagatttgccggtggtttgaccttgtttttttatgttggcgctatcgaataagtcaacttcaaaaagaatggcactcacggtgattcttgattaattctatgaatgagattatttattgttggtcagcgcaccttcattggccgaatttaatataaatctgattttgggtcagagcagtcatgtactccaggtttcataacacttaccacacgccaccttcgcgtttggatcctgcttcagatgggcatccaagatagcgtcgctgatttggtcgcacattttgtctaaaaaaaataaggtaagcaagaggtaagccagaggtgggcgaagaaggaggggaaagcatttttgtcggggagtggaaggaggaacgggccaaaatgttattcagtgcgacggatcaaaatttgctgggccatgcggtttcatttaatctgtctgctattgacagcgaaattcaattcccagaacaagagcataaggcgaccgtagtgttgtccaaacacaaaatgatgacatttgaagccgaatcgtccatgaaatcctgggagtcggattcatctgataccagtcgggttgctcgcgcttgcctcaaaacttggcgcgtaattggagtccgtcaacattcggctacttttcgtagtaaaggcgttattgaactcgaacatgcgtcagcaatagcaacataaattaccaaaactgttgactcatagaaatggcgcatggtatcgatttcggctgggataatgattgcgaggaaactagttaggtcaagggtttaaagtagctactctgaaatgggtttcagggtttccaatttccggctagtctaattatctattctaacaagtccgtcactcatttattacaaaaagacaggcgatattaatgtcaaccatttggggtgtattcttctgaatggcactcggcgcttatcatcacgattgtatagggctagattgtctagggctagcttgccaagccgacttaattagcattataaaataaaatagtatagaatagtaaaagtaatcaatgcgtagtataaaaggtcgctcggcttatcaacagctgttgtcaaacacactactatactggtcgccactgctgatataaacaaactctgggaggggcgaaaagatcgagctcgagcaaaacacgtggttggcaatttcggtgaaaaaaataagctttgacagcggtctagaaaaatgtaaggtatgtttgtgttggccgttgttttgatcgccatctgcgatcaaatgaacaagtgcgtggacaacgtagaacaacgtagagaatacttgaatttcgcatctcccatgagccacaagcacatggtgcgcatgacgtagtctctctgtacacacatacatacatatgtgagagccgcaaacgataaagaaccagtctattaattgcgtctgcccatccaagcacaaggtttagcccgctgttgtgcggggatttcaagagaagccagctgttctccgtggtcccagctttccggcttggtcaccgggcgatgcaacagaggcacgttttactagctcttcttcccgttctcagcctctgttcaagtcgtgcaaattgggtagaaatcaacaaaggtatggacataatttcgtcgccattttgttagagttcaggcggtaagcagaagtgagtagacggtggaggtgtggaactgggtatacagggaaagggacttcagacagaagggcctcagacgctagagaatcagtttggtcaggttatgagaactgacaggcaacatctctcaccacgcccgaaggggcatttgagattgtttctttttttacactgacactatcggtatgatgcaataggaggcgccgcagatgcaatgaagcactcacctggatgaccctcgccaacggactcggaagtgaacaggaatgtagctccgtcttccatgtcatatgagttgccattgctgccgttgcatccgttggcgctatgtccgtttgtcttttgcggcatgttgatgggtagtttgtaatatgtaactcgaagtttgaaggggcaatgggggagcagtgctataacccgagttccggtcggctaaattgttggtggagctgggggaacagagagaaagagaggccacattagcggttgttaaaaaacgcttaacgaaattgattttccgaactcttgcaaaacacatctattttcgcattcgcgaatctaagctataggccgcctcgaggctgttgggattttccggtattcgcacacttttcgttatagttttttttatataatcgcccttcttttatgtttttatgctgcgcgtttgccacaatcgtcgctacatacatgagacgcacgttgagcgggttcaaagctaaactagtcgctaggtgagggctcggtgctgctagctgtttaaaatgcgtgttcgacgttctagctattagttcaacaaattatacacactgattctgagttatactggttcagcgacggcaaccaaatcagcggcgcagccaacacacgtcctatcttagcgacggttctgaagaaaaagagcgcaactttttaatgccattcagaatttatacctccaacgagagagcgggcttttgcttatcgtcgcaaacggaggaggcggttctcttcggctgactcgattattattttgagacttatttgggcgctctttagggaaactttcctagcgttctcggtactctcaaatgattttacttcttcagtatctccacgtttttgggttttaagcagctgttccgccgcccagcgttgccaccccgctccggagtgaactgtagtgaatctagatccagatcctttattttatactcactgtggttttgaacaaaggatcagacaagatatggattatagtctcgactagcttcctgctcaacctgcgttcaactgcggatgatttttacagacgaataatatttataaatttttgtagacagcatttgagaagatgagtcggcaagaaataagagcttatcagaacaaaactatgtgctaccacggcagccacctatatacctaatttttaaaatctgtttagcattgctctctcggcttctcttatgtacagcaattgacatatacatattcgatgatatagacaatcgctacacgaagcgcaattcgaagcgaatttttaaacgaatgtctgtatctgttgaaaccctagcttttccctaacatggagtgactgcccttttggagatggatcgttcgacactatcttgtcaaggaaagtcgtcaattagggttctcatactattcgaacaatttgtgcttttgaaaaagtgcttacgtcatgccacagccaagaagacaaacaaggtctgccaagatcaaggagcctggtaatcagtttttgcatgtacattttttaaaattctaatacccactgaatataaccgaaaacaacaagccccattatctttcaaataaggtgtgaccccacggggcctaagaagatcgcgtgtgcctgaacgaacagatgcgcagggcacattattcttgagcacaaatggtgggtgcttgcgaactgtagattgtggcaatgcatttattttactgatttatcgtcagttattgtaatagccttaactaaacaatttatcactttgccaataacaaggttttttattatttcacttttctaatacatatataattttctttttgccgtaagaaacgttctcaatacgtagacaaaaatatttaaacttaaaatgctcaattttcaagacacttcacaagagctatcagctacaatgactgggcaaaagccaattatttaaataaattcattatatggtaaaatatactgcacgcaattaagtgcacaattttcttttgaatatatgaaaggcacgcgccaataagccaaa

SEQ ID NO: 24002 - DNA, 1392 bp, DROSOPHILA
ttgagcaggaagctagtcgagactataatccatatcttgtctgatcctttgttcaaaaccacactccaccaacaatttagccgaccggaactcgggttatagcactgctcccccattgccccttcaaacttcgagttacatattacaaactacccatcaacatgccgcaaaagacaaacggacatagcgccaacggatgcaacggcagcaatggcaactcatatgacatggaagacggagctacattcctgttcacttccgagtccgttggcgagggtcatccagacaaaatgtgcgaccaaatcagcgacgctatcttggatgcccatctgaagcaggatccaaacgcgaaggtggcgtgtgaaaccgtcgccaagacgggcatgattctgctgtgcggcgagatcacgtctaaggctgtggtcgactaccagaaggttgttcgtgagacagtgcagcacattggttatgatgactcctccaagggtttcgattggaagacacttaacctgcttgtagccatcgagcaacagtcgcccaacattgccaacggcgttcatatcaaccgcgaagaagaagacgtcggcgctggtgaccaggtttcgatttcaaaacgtgcaatgtgctgttggcattggaccaacaatcgcctgagatcgctgcgggagtgcatgtcaaccgtgccgaggaagagatcggtgccggagatcagggtatcatgtttggatatgccaccgacgaaaccgaggaatgtatgcccctaaccgtcgttttggctcacaaactaaacgaaaagattgctgagctgcgtcgctcagatgtgttctggtgggctcgccccgattccaaaacacaagtaacctgcgagtacctcttcaatcagggatcagcagttcccaagcgtgtccacactattgtagtgtccatgcagcattctgaaaagatatcgttagaaaccctgcgctcggaagtaatggagaaagttgttaaagtagtcattcccgccaaatacattgatgccaacaccattgtccacatcaatccttgtgggctttttgtaatcggtggaccaatgggtgacgctgggcttacaggaagaaaaatcattgtagatacttacggaggctggggcgcccacggcggcggtgcattctctggcaaggacttcaccaaggttgacagatcagctgcatatgcagcacgctgggtggccaaatcactggttaaggccggtctctgcaagcgctgccttgtccaagtgtcctacgccataggtcttgctgagcctctctccataactgtgttcgactacggaacttctcacaagtcacaaaaagaacttctggatatcatccgtcgaaactttgacctcaggcccggcaagattgtcaa

SEQ ID NO: 24003 - protein, 200 aa, DROSOPHILA
MPQKTNGHSANGCNGSNGNSYDMEDGATFLFTSESVGEGHPDKMCDQISDAILDAHLKQDPNAKVACETVAKTGMILLCGEITSKAVVDYQKVVRETVQHIGYDDSSKGFDWKTLNLLVAIEQQSPNIANGVHINREEEDVGAGDQVSISKRAMCCWHWTNNRLRSLRECMSTVPRKRSVPEIRVSCLDMPPTKPRNVCP

SEQ ID NO: 24004 - DNA, 8648 bp, DROSOPHILA
agattgtacggctccaaatgtaattcaaacaaaataaaatgtgtccgagatacaattccttttaacgtatgtatgttcgttttcatgtttacatgtcattattgtacatatgtatacagttctaatgttattataactgtatactgaaactgtacttgcgcgacttaaaacctacatgtgtatgtcatttatgtacatacatatacagtttgtatgttatcttaactgtatcctgaatctgacggtaaccaaaacgcatgcttaaaaatgatatgaagatcgtaaccttttgcaatcaaaattttaaacaccaatttttgcgactttgattggtacatatgtacatatgtacgtatataaatatgtagctcgcaagctcacattcacacaaacatatgcatataaatatatttaaagaaacaaacaatttcaatcatttaccttttaacgaatgcagcattccgcgctgttggtacagcttatagggcgtcatactaaatgcaatcatgggaattaatttaaacaacggaatctttaccagcctctcttgcctgcgatcgcgtacaaatcttcgacatgcagatcaattgcgttggttaaatagcgcacaggagtgacctgttgtttttgcaagaccgctgagaataacacttgggacactaataaaactacttctactattaatttcactacactaagtccggcagctgggaactccgtcagatttgtgaatttacattgcttagctctgcgcaaaaaccaatacgcaaaccgttaaagaattaatcacaatggctgcgcgaataactgttgattgtgacatatcgatatatcgattgcattccctggatcttggcgtctggataagactgttaaattcaaattttgaattactaaaatctttacacatttctataaattaccgaatttcagaaaaataaatattaatattgttgcaaatatcccatatagtaggcgaaacaatacaataactaaaaataaactgtcatgaaatttattgcaatattcatatgaaaaatgatttcttttaaagaaaattgggtttcttgtacacaaatatttgtaattttttatgggcgctgtctcattatgtttttgtgaaaaaccagggttatgatgactttatttggttgtaaagacattgcaaattctgttgtttgtacgattaaagtcttcattctgcgcataccggtaaaattatacttttcatatttatctttaatatatttttgtaaaggaaaatacattatcttatggttggttacagaaaatacaaagacagagtgtaatgtacatacaatcgagttgtttaaaactttaggtttaacatatacaacgcatacaacaaatagaaatgttaaaagagacaaaaataagtttacaatggggacatgagaatgttgcataatttctaggcaacggatttaattgttttatacaatttccatagacaccaacataattaagttgcatgataattgaaggaggtactaactactgctttaatttttactgaactgaccgacactatactatgtatatgcataactaaagctcatcaattcttttggagctctctattaggtatatatgcgggtattaagacgactaaaactagttccgtgtgagaagactacacacatcagaatggtttaaattatatagcgaagagcacagcataagttagagaagaaagcccataagagttggcaagcctatgccgccttctcctctgactttaggctttaaaaacgacactaaaaattacgttggtgcttgggtatctgttaattttgacgctgatgaatataaggatagcttcgaccttttagcatatggtgactgcggttgcaacgcttcagcgtctagtcagttgtcaatctccagaggcttggcctcctcccacgagaagcccgcgcgaccgaagtgtccataagtgcttgttcgctggtatatcggctggcgcaggtttaggtcccttaaaacaaaaatatagacaattgttatgaaatattttttagcatctagagtttgacacttacttgacaatcttgccgggcctgaggtcaaagtttcgacggatgatatccagaagttctttttgtgacttgtgagaagttccgtagtcgaacacagttatggagagaggctcagcaagacctatggcgtaggacacttggacaaggcagcgcttgcagagaccggccttaaccagtgatttggccacccagcgtgctgcatatgcagctgatctgtcaaccttggtgaagtccttgccagagaatgcaccgccgccgtgggcgccccagcctccgtaagtatctacaatgatttttcttcctgtaagcccagcgtcacccattggtccaccgattacaaaaagcccacaaggattgatgtggacaatggtgttggcatcaatgtatttggcgggaatgactactttaacaactttctccattacttccgagcgcagggtttctaacgatatcttttcagaatgctgcatggacactacaatagtgtggacacgcttgggaactgctgatccctgattgaagaggtactcgcaggttacttgtgttttggaatcggggcgagcccaccagaacacatctgagcgacgcagctcagcaatcttttcgtttagtttgtgagccaaaacgacggttaggggcatacattcctcggtttcgtcggtggcatatccaaacatgataccctgcaaaaagtttatttcgcttcattaataatctctatcactaattaattaatcattaattattcacttaaaagtaaccaaaaccaaaaagaatcagtagcgttagataaataaaacacatttgggttaggaaagggtaaatcaagcatgggtgatagattcgggtatgaattaattgttgctacttaggagtcaaaaagttgtttacaaaattatgttagtgatgtatatatatgcagtagtgtgccttagttttgtgtctgctattctaattatggtatcgactgaaaagtcaaaagttaaatgatatggatttggcagcttcaattaacaaaaaagacgatcatatggttggtaggtcggttggagcaatattgcagcgctattatgatatagtggcaaacagatgaatttaaaattaaatagcaataaagtcgtcatacactacttcaattagttacgaaaatatataaaggaaacgataaacagaaattatagaagtggcgacaacaccccttccaaagagcttataaacgccctaccaccatgaatattttagtcgcaactaaattgctatcaataaaaattaaaaagatgcgttgctcttcggaaagggccttcgatcccggcctgccgagactgctacttctttactgcttctaaatcacacctgatctccggcaccgatctcttcctcggcacggttgacatgcactcccgcagcgatctcaggcgattgttggtccaatgccaacagcacattgcacgttttgaaatcgaaaccttttgtgaatttcgaagcgcgattgcgaagtgcacaatatcgtttaaagtttggtattggattgtatcgagattggtttaatatgaaacgaaaagaaagataaaagagagaagcgcagcaatggtgcacatacacaggaaaatgtctgtaagtaatgttcataatatgattttaaacaccctattattttagattataattatatatataaaaacggtttacaaaaaaatgtattttctacaatcttcataagcactctcttggtgttttttctatataccaaagtctgggaaaactttaagccttcttccataggtcagacaagccgcatgcaagacttctcttgcttccataaaacggtaactagcggaattttaatgattacataaatctttcaatggatttggttgaatgcaatttatgtggttagagaacgcccgcagtgtaatccaaatgtgtgatatgttatgtatttcagtcgttatatatttgcttgaggtgaaattgttaagttgtcttcgaccaaatggttcgtagctgtgggaaacaagtcaatttgattttttttggggcttaagaaaaaatagttatagtaatagtattcctattgctcatcagcttttaatgacaaaggcgaaactcttgttggcctgtgagcaagccaagttaatgtgggaaagatacgaattaagggaaacacttaacaaatgaaacgaaacgaacgaacgcacacactccgcatcacttagtgctaggcggtagtagaagaacggaaagctttgctgtacctggtcaccagcgccgacgtcttcttcttcgcggttgatatgaacgccgttggcaatgttgggcgactgttgctcgatggctacaagcaggttaagtgtcttccaatcgaaacctttttgatttttatttgattttattgttatttaatattgagttgacagtattgttcgtaggaccgacgtagggaacgaattgtaatacccgcccacaaattgtttatgtacctaatagacacttacccttggaggagtcatcataaccaatgtgctgcactgtctcacgaacaaccttctggtagtcgaccacagccttagacgtgatctcgccgcacagcagaatcatgcccgtcttggcgacggtttctgtattaaatattatggaatgtgttaaaagaaatttcggcaactttttcaggtaatccaaaaacagatttgccggtggtttgaccttgtttttttatgttggcgctatcgaataagtcaacttcaaaaagaatggcactcacggtgattcttgattaattctatgaatgagattatttattgttggtcagcgcaccttcattggccgaatttaatataaatctgattttgggtcagagcagtcatgtactccaggtttcataacacttaccacacgccaccttcgcgtttggatcctgcttcagatgggcatccaagatagcgtcgctgatttggtcgcacattttgtctaaaaaaaataaggtaagcaagaggtaagccagaggtgggcgaagaaggaggggaaagcatttttgtcggggagtggaaggaggaacgggccaaaatgttattcagtgcgacggatcaaaatttgctgggccatgcggtttcatttaatctgtctgctattgacagcgaaattcaattcccagaacaagagcataaggcgaccgtagtgttgtccaaacacaaaatgatgacatttgaagccgaatcgtccatgaaatcctgggagtcggattcatctgataccagtcgggttgctcgcgcttgcctcaaaacttggcgcgtaattggagtccgtcaacattcggctacttttcgtagtaaaggcgttattgaactcgaacatgcgtcagcaatagcaacataaattaccaaaactgttgactcatagaaatggcgcatggtatcgatttcggctgggataatgattgcgaggaaactagttaggtcaagggtttaaagtagctactctgaaatgggtttcagggtttccaatttccggctagtctaattatctattctaacaagtccgtcactcatttattacaaaaagacaggcgatattaatgtcaaccatttggggtgtattcttctgaatggcactcggcgcttatcatcacgattgtatagggctagattgtctagggctagcttgccaagccgacttaattagcattataaaataaaatagtatagaatagtaaaagtaatcaatgcgtagtataaaaggtcgctcggcttatcaacagctgttgtcaaacacactactatactggtcgccactgctgatataaacaaactctgggaggggcgaaaagatcgagctcgagcaaaacacgtggttggcaatttcggtgaaaaaaataagctttgacagcggtctagaaaaatgtaaggtatgtttgtgttggccgttgttttgatcgccatctgcgatcaaatgaacaagtgcgtggacaacgtagaacaacgtagagaatacttgaatttcgcatctcccatgagccacaagcacatggtgcgcatgacgtagtctctctgtacacacatacatacatatgtgagagccgcaaacgataaagaaccagtctattaattgcgtctgcccatccaagcacaaggtttagcccgctgttgtgcggggatttcaagagaagccagctgttctccgtggtcccagctttccggcttggtcaccgggcgatgcaacagaggcacgttttactagctcttcttcccgttctcagcctctgttcaagtcgtgcaaattgggtagaaatcaacaaaggtatggacataatttcgtcgccattttgttagagttcaggcggtaagcagaagtgagtagacggtggaggtgtggaactgggtatacagggaaagggacttcagacagaagggcctcagacgctagagaatcagtttggtcaggttatgagaactgacaggcaacatctctcaccacgcccgaaggggcatttgagattgtttctttttttacactgacactatcggtatgatgcaataggaggcgccgcagatgcaatgaagcactcacctggatgaccctcgccaacggactcggaagtgaacaggaatgtagctccgtcttccatgtcatatgagttgccattgctgccgttgcatccgttggcgctatgtccgtttgtcttttgcggcatgttgatgggtagtttgtaatatgtaactcgaagtttgaaggggcaatgggggagcagtgctataacccgagttccggtcggctaaattgttggtggagctgggggaacagagagaaagagaggccacattagcggttgttaaaaaacgcttaacgaaattgattttccgaactcttgcaaaacacatctattttcgcattcgcgaatctaagctataggccgcctcgaggctgttgggattttccggtattcgcacacttttcgttatagttttttttatataatcgcccttcttttatgtttttatgctgcgcgtttgccacaatcgtcgctacatacatgagacgcacgttgagcgggttcaaagctaaactagtcgctaggtgagggctcggtgctgctagctgtttaaaatgcgtgttcgacgttctagctattagttcaacaaattatacacactgattctgagttatactggttcagcgacggcaaccaaatcagcggcgcagccaacacacgtcctatcttagcgacggttctgaagaaaaagagcgcaactttttaatgccattcagaatttatacctccaacgagagagcgggcttttgcttatcgtcgcaaacggaggaggcggttctcttcggctgactcgattattattttgagacttatttgggcgctctttagggaaactttcctagcgttctcggtactctcaaatgattttacttcttcagtatctccacgtttttgggttttaagcagctgttccgccgcccagcgttgccaccccgctccggagtgaactgtagtgaatctagatccagatcctttattttatactcactgtggttttgaacaaaggatcagacaagatatggattatagtctcgactagcttcctgctcaacctgcgttcaactgcggatgatttttacagacgaataatatttataaatttttgtagacagcatttgagaagatgagtcggcaagaaataagagcttatcagaacaaaactatgtgctaccacggcagccacctatatacctaatttttaaaatctgtttagcattgctctctcggcttctcttatgtacagcaattgacatatacatattcgatgatatagacaatcgctacacgaagcgcaattcgaagcgaatttttaaacgaatgtctgtatctgttgaaaccctagcttttccctaacatggagtgactgcccttttggagatggatcgttcgacactatcttgtcaaggaaagtcgtcaattagggttctcatactattcgaacaatttgtgcttttgaaaaagtgcttacgtcatgccacagccaagaagacaaacaaggtctgccaagatcaaggagcctggtaatcagtttttgcatgtacattttttaaaattctaatacccactgaatataaccgaaaacaacaagccccattatctttcaaataaggtgtgaccccacggggcctaagaagatcgcgtgtgcctgaacgaacagatgcgcagggcacattattcttgagcacaaatggtgggtgcttgcgaactgtagattgtggcaatgcatttattttactgatttatcgtcagttattgtaatagccttaactaaacaatttatcactttgccaataacaaggttttttattatttcacttttctaatacatatataattttctttttgccgtaagaaacgttctcaatacgtagacaaaaatatttaaacttaaaatgctcaattttcaagacacttcacaagagctatcagctacaatgactgggcaaaagccaattatttaaataaattcattatatggtaaaatatactgcacgcaattaagtgcacaattttcttttgaatatatgaaaggcacgcgccaa

SEQ ID NO: 24005 - DNA, 2269 bp, DROSOPHILA
aagctagtcgagactataatccatatcttgtctgatcctttgttcaaaaccacactccaccaacaatttagccgaccggaactcgggttatagcactgctcccccattgccccttcaaacttcgagttacatattacaaactacccatcaacatgccgcaaaagacaaacggacatagcgccaacggatgcaacggcagcaatggcaactcatatgacatggaagacggagctacattcctgttcacttccgagtccgttggcgagggtcatccagacaaaatgtgcgaccaaatcagcgacgctatcttggatgcccatctgaagcaggatccaaacgcgaaggtggcgtgtgaaaccgtcgccaagacgggcatgattctgctgtgcggcgagatcacgtctaaggctgtggtcgactaccagaaggttgttcgtgagacagtgcagcacattggttatgatgactcctccaagggtttcgatttcaaaacgtgcaatgtgctgttggcattggaccaacaatcgcctgagatcgctgcgggagtgcatgtcaaccgtgccgaggaagagatcggtgccggagatcagggtatcatgtttggatatgccaccgacgaaaccgaggaatgtatgcccctaaccgtcgttttggctcacaaactaaacgaaaagattgctgagctgcgtcgctcagatgtgttctggtgggctcgccccgattccaaaacacaagtaacctgcgagtacctcttcaatcagggatcagcagttcccaagcgtgtccacactattgtagtgtccatgcagcattctgaaaagatatcgttagaaaccctgcgctcggaagtaatggagaaagttgttaaagtagtcattcccgccaaatacattgatgccaacaccattgtccacatcaatccttgtgggctttttgtaatcggtggaccaatgggtgacgctgggcttacaggaagaaaaatcattgtagatacttacggaggctggggcgcccacggcggcggtgcattctctggcaaggacttcaccaaggttgacagatcagctgcatatgcagcacgctgggtggccaaatcactggttaaggccggtctctgcaagcgctgccttgtccaagtgtcctacgccataggtcttgctgagcctctctccataactgtgttcgactacggaacttctcacaagtcacaaaaagaacttctggatatcatccgtcgaaactttgacctcaggcccggcaagattgtcaaggacctaaacctgcgccagccgatataccagcgaacaagcacttatggacacttcggtcgcgcgggcttctcgtgggaggaggccaagcctctggagattgacaactgactagacgctgaagcgttgcaaccgcagtcaccatatgctaaaaggtcgaagctatccttatattcatcagcgtcaaaattaacagatacccaagcaccaacgtaatttttagtgtcgtttttaaagcctaaagtcagaggagaaggcggcataggcttgccaactcttatgggctttcttctctaacttatgctgtgctcttcgctatataatttaaaccattctgatgtgtgtagtcttctcacacggaactagttttagtcgtcttaatacccgcatatatacctaatagagagctccaaaagaattgatgagctttagttatgcatatacatagtatagtgtcggtcagttcagtaaaaattaaagcagtagttagtacctccttcaattatcatgcaacttaattatgttggtgtctatggaaattgtataaaacaattaaatccgttgcctagaaattatgcaacattctcatgtccccattgtaaacttatttttgtctcttttaacatttctatttgttgtatgcgttgtatatgttaaacctaaagttttaaacaactcgattgtatgtacattacactctgtctttgtattttctgtaaccaaccataagataatgtattttcctttacaaaaatatattaaagataaatatgaaaagtataattttaccggtatgcgcagaatgaagactttaatcgtacaaacaacagaatttgcaatgtctttacaaccaaataaagtcatcataaccctggtttttcacaaaaacataatgagacagcgcccataaaaaattacaaatatttgtgtacaagaaacccaattttctttaaaagaaatcatttttcatatgaatattgcaataaatttcatgacagttt

SEQ ID NO: 24006 - protein, 408 aa, DROSOPHILA; identical to SEQ ID NO: 23997

SEQ ID NO: 24007 - DNA, 10931 bp, DROSOPHILA
tacgcgacgacatgtcttcgatgactgagcgcgggagcaagtccgtccaattgcggcggtgccatgtggtgtcgtccgactttaggcggcggtgtgcgtgcggtggtgtcacttgtctaatcgaacccccccagccagcagcagcatgtcttgccaccatttggcttcctccagcagcgacacgctaacttaaggaggccaaagacattggctcaatagaaaatcgtttgttccggttaagtgtatgtagtaaaaatcgtttaatcagtcgtatataaattacagcgctatttagcttacatcggtaaagatcgaaaatagactgttatattttccaaaactattggaatacctatgaatataattcgtatataaatattgcagtacattttcaaatactttattttacaattgttttatgttgcatataaaatatatcaaattgtctctaaaattttgcattcttttaatccgcatctattgttcagctatatatcacgattaaaaataaaactccaacaccatatatatagaaaattcttttaatcataaattatatggtataaattacagcgcggtttcgcttacacaattggcttaatattaaatttgacaatcaagttgtgtcttaaacgtaaaaagggaagactgcctaaggatggttgcaaaaaaagaaaatccggcatggcatacaatttaaaatacacgcaatataaatatgtaacaaatatcagctaattttttgaggaatattcatccgaagtattgctttaattggggtcttttatcattgtcaatatccgtgctaatccgcaattgccataagtaaaataaaggactacagcagcactcgcacatatatatatatatatagtagaaatctactgaattccgcgtatcacaattttaatcaactacaaatttacaatatgtgtgtttcactaaaaataatctgaagcttaccctgagccgctgtctttttcgttcgatccacttgtgcggatacgccaagtgatgctagacaatgtccccggatgcgccatagttcatgccattatttcgtatgttattgtgatgctccaaatgatcctgctccatctgctccttgagcatctccagctcacggatgcccgagactgtcacctcatatttgtgcgacaccagggagcgatagaagtgaatggcgaaggccataaagatgatcatcaccggtatgaggaccacacacgctgaccaagccgccggcggacttaggtcatagaatttcacccagcacaggatggctatctccagtagaaagagtatgagtcccagcagcgtggagaatgcccacgccgtttcaatgtaccaatggagacgctcgtgtggcgattcgtggaccagggaaatactatgcaaattacacaccgtctcaatatttggcaggatacaggtgctgatcatcagggccagcatgtgcaccgccaccaggagggtggtgcagatggcgaaggctatcagcatgcccggtggtacattcgtatcgtgatccagttgcacctccaccatcgccacctatgtgaaaattgcaaaagtgaagaaagtcattaatgatttttatttaattttggttagaaatcgaaacgattccccggcatcgcctcttattattattagccatttctcgcgagaacattgcaaaattggcaaataagcaacttttctcttatattatgtgatctgaatggacctaatttatctgatccgcccctaatgccgcgcctccctttcttcagcatgctaggtgtacatgtggaatgcataacaagttgatgaaccaaaaaaaaaaagcgacatataaatacctcgtcactcaattaattaatataataattcagcacctgcaatacttgcacattttccaattgatttatttaatattatgtactgcatactataatttaataatttatctagatttaactgtgtcgtgtgtggaattgctagacaataagtgggaattttaacaatgctgggaaaccaacgaatgtatcatgatgtatgttgatatttgctttgatatttgctcctcttcagcaaaactgctacaatattgcaatagtctaaactacccataattaatgggtgagaaatacatacgagtatatgcacggcaaacagctaacagacttgtttggccaagaaaacgatagtgggaataaaacgaaatctatttcgttggccctcaatttcttgctgccggcatcgaaaataattatgttggttagcaatattcacaggtacagaaggctaattattgatgtatgatatatatatatatatatacatatatatatatttatatatccctgtcatgattgaaattacttaaatgcgactgcgagtaggttaatgggcactcaaacggaacaaataacagattgcattccgttgcgcgatacgccaagtggaaaccactcttattataaaataacaataattattttgttacagtgtatgccatattcgtggtggcattttccgccttttgtgctgaacaaacagaaatgcgatgtccaaataaaaagattatgtggtttttgccatcatttctggccctgcacattgagttggcttaatgttaaaaaaaaaaacatagaactataacctagggcaaaaaagtagttaaattgtagtctacaaaatagcctaataattcctaattgtttcattttaatacacataaatgcccaacttaatgtgatttttgcgccaaatcgcttttccttcgaaatgtaatttataatggatttttatgtgcatttccaaggtatctataagttaattgctcttttagagattcagtttaaaactaaactaatttgttacattatgtatcttcgatgaaaaattagctttgtataatgatgttgctttgatatttacgtacattaattttaaaacaacagttgtcaatgtattgtataaaccctttgtaaagtataaagtctcaataattaagagtttaaactcaccatggcgaatccggagagcagggcggacgtcttgctggatgcctttagcttggcccgactaagctggagcttccgccaggacaggtaggtgggcgagtggagatcctcgccggactgcgacatgctgctgctggcggtgcgatggtgtccgcgcggctgaaagcggtaggattgattctgttggtaggtgcgcaactgaaagggcggcggctgggccgcaaatgggggcgatgctatggaggctagtggtgctagtggcgctatcggtgctactgctgaagctgcggccgccgctgaagctgccgccactgaagccgcatatgctggcgacccgtctcgctgcgcagtgaagcgtctcgtttgcggcgaattcgaattaaactggctgtgatagagataccgcgacgaccccacaaaattgctcgctctcagattgcccagctggtgagcgggcagctggtggtgcaggggctgggctgtctgggttgtctgggtgaggggcagttggtgggcgtgaccgaggttcggttgcgggcgcatataatcgccgtagtcaccggttgccgctgtggctgtagccgccgccgtataggcatccacactggccgccaatctggcagtggcatgcagagcgctcgccaaggccgaggctggctgccgaatccccaagcggttcggctgtggatgcacctggtagcgcctcgatatcggcattacatccagggtctcactgctcgccgttcgttcggttgacgattcgaaggagccctgctggtggctcagcatcaggctgctctggctcaaattggcccgggcataacgcagattgctcgtcccgctgcccggcagcaattgctcctcctcgtgatcctccgccggcgtttgggcggcctcttggtccgctgacttcatcttcttgtggcgtcggggcggctttagaggtatctgctcctctggcttggattcaccctcttcaaagggtggcatggactactctcgctctcggatggatcagatataattagtctgataaatattctatgccctctctttgcgacaataaatattagccagttagtatctaaactaggctaagaatgtatcttttgctgttagttctcagttctaagaaaagcaacaagtccgcttcaacttgaattttgattctgtatacagtctaataggttctcctttctagtgttaaagatcctagcttactaatatttcagttctcaagctctttagcaagatctaaagtgaaaatatcgaaacttatgctccacaaattgtaccgatcggctgccttccaatgtctggcatttgttaataaataaaaaaatattccatcaggtcattaaggtcccatgttggttatcgacaacgccctgcctcaattatggagcactttcttagaacgtttcaatttgccgttgtgttgttgcacagcacttgattcgcagtagttatattattcatttcttaaccatttgaacctgggcgttatggattttaatggcttttccatggatatttctctctcgtctggcggctaaggaatatttattttattgacgaccttttacagtttttgggtctttggaatattaaagttattactcttgatcttggcgacttttcattccattgttcttggttctcggaagtatcaacttattgccgaactcgtgatttagtcttatcgttgtttttttctggttttagatatacatatgttttcttttatgctaacttctgtcagtgaatcacatcgacatatgtatttgcattgatatcttgcggatttccgaatgccagtaacgacgattcactgtacttggttggcggagcgcaatctttgttcgagagagttcgtttgccacttgtcactgtaatctcgttgctttcagcgattttcattaggttccgtttcacttggttgattttgcaatacttcctcccattgatgatgctgaatgattttcgctgggtgttattgtttttatttttttgcacatgacaattgatcaacaattatccacacacacacacatacacgcacgctgaaaatttgtgaccctcttctctcactctcttcaccgctatctctctgtctttttgggtgcgttgaaatatttactttttatttataaacacacatttatggttcttataaaatgtaaaatacgtgtgtcaataaaacagtttttcgcaggcacttgttgccgactttttcacatgttttttgttttttatataaatttttttttcatatgaccgaagccaagagttgtaccctaacgactgctagctgagaggaaagcacgaaaagctaggaactgaaacggaaaacagtcgcggatgctggcgacacttccgcaagacaaaaaaaaaaataagagccacgcaagaaaaacgacgaatcgaatagtaattcttgccttttcgccacgaatttaattcaggtgcgcggtgcacattcgattcgatttcatttcagcgtccgcgtttcgcttttagcgcctcttgttccttcggcgatggcaagttaacaactaactgatacggcggctctgcccagagcggtaagcaccggcggtgagcggcggcgacgacgacgtatattcaaattcgacaatcaatttgaacggtgcggcctgcctgcgatgacacaaaaaacaacaacagctactataatggcaatcgaactatgacagtaaagcctcccaagcaacgaacttatataaaaacataacaatctacgacagaagaaatatagatacatttaccgaaaattaaaagaaaacaacgaaatacgccaaaagatacaacaaatataaactactttaaaaataattttgtaatttaaaaaaaaatgcttctaataatatactaattttcattggtaagatttttttttaattatagttattcagtaggactagcaaaagttcgggttagtgaagttgcactgtacaaaacaaccatttcaatgaaagcgtttaaagagagagtgggtaaggaatagaaacggaaagagagctagctaccagacagtaaaagaatcgaaagaggcgaaaccaaaactacaggaaaacaaaaagtaacaaggtgagtgggtgagaaggggaaacggggcggttggtaagggctaggggctagtgtctgctgctacttttggcaatcgatcagcgatcatcaaactgatgaatggggaagacaaatcgagtgattaaacacacgcacacacgacgaccctgaacttcaactatcgagattcaatcaagatccaattcacagacgaaaagtcactcgaattcacggacacaatgctctaaaaaaccatattgtgggtcaatatcctacgacaagagtacgagtaggtggtaacaccgcttattgacattattaaactgaagtcagaaactatttaaaaaaaaatgagtcagtacttcattatagatattttgagatctactgtatatagtcctttaaatatgtagaatgtatcctgtgctttcctgtttgaaatatcatattcaatcagatgaaactaccgaaagcgacgctaacaccagtagaagtagaagtagacgaaaacataggactctttttggccaggttgcgccactcaaggtgtcctcgataaatttgcggttttgatagatattggtgtaaaacatgaagccctcatcatcgcaggtgtgcacccgacgcgccacgccgtacaggaagtgatcgcaaaagagtggactgcccaagtcctgctggcacatattgcccctgcccgtatagctagtcatgcacaggcatctgctgcagtcaggcttgcactcatactccgaaatcttttgagctctgatttgaataagctcgcttgagtagggtccgtcctggaaccaagtaactgggttatcatacaccatgctgaatgcggggcacatcgcagatatatatacataacttacgtagtaaatcctgccccatccgagagagttgcaaagccaagtgctattcaactccttttccggcagcatcatggcaaacctttggccagtaacgccgcgatccagcttcagcagagccaattctgtgcacccacttatggcggactcgtccaacacaatcttctgcacgtggtatatgttcttgggagatggctttttcaatcgcttgggcgtgaagacgacaacccttagattcttgcgattactcggctggtttggggtgctctccggcctggtgctcacacaacagccggaggtgacgacccaccaggcggagagcagagagccggcacagaagtggttatcaccccaatggcgaatgtgtttgcgcgttcgtatagacaccacattctggtgataattgtccgttacgtagaggttcctctgaagccccttcttcccttcatttgaatacgcagatgaggtcagaagaagcaggaggaggaactgcatcccaaataaggcggatggtacatatgaatagctttttttttacagataaagttgacaaagtaatcaacagcaacttagtttttgtgggaatttatacaagaattactattctctaaacttttaatacaagttctatggtccaagcagcagtttttgcatactcttttgaaacgtcgaaaaactattgaacaaataaacacaattgttttctctatcttttatcgcatttttatggaaaacatatggcacgaggatcatgctgttgaaattgaaaaccaacacaaatgtacaaaaaattattaaactaaaatttaatatagctgatcgcagggaaaccaaacaagtcgatacaactgaatccatcgagatggaaagtgccttccttttttggccataaacaaatacgaatctggctaatgttaataataacttggcctgtcaaatggaaccagtttgcttgcgtttcctccagaataaacaaaatgtaaccacttaaaaaatgtgagtaaaaatacataagacataagtcccagccgataaagcagcacaaaaaacagaaggtgtcagctggcggttgttgtttcattttcactggcaaaattcgtatgcaaacacacacctggatttcagagacgccgacccaagaagcacctccatttctttgcagctcgatgggtgggtgcgtgtatttattatcgccggttaaataaaacaaaataaaaaatagcgaacaaacaaaagaacagcagacgcgataagagaaacgtacaactcttggagccaattagacgccgggttctacaatatttccatgaccatttgcaatttcattgtcagtgctgttcgccaaaaacaacactgttcaataattcagcaggtttggcagttaactcagtcgtcatacctgtgatttatacgtatgcatgtgcgttgcgttgtgtgtgtactttcgagtgtctgtgtgatctggttcgacttgaaacgtaggccgtgtttatgtgtcagattgcgtggcttaatcaaacgggcgcattcagcagagtctcgcgaattcggggatatgagtaatacgtgatttataatgggactcagcgattagaagtccgatttatttatcaccgttttcggaagaacatattttcgcaaatatacgaggattcgtaaaatatataaatatatatccgacttactcactgaaaaatgttaatcgaccgtgtttcaaataactaattttaataaaagtttattgttttcaatcactatcgacagacagcaaacttgaaagtttttataccaaatattggcattctcatttcggccaactgactaacaaataatacttgttgtacaacaaattagtttatgtcctttttatatcgtttttagacacctaaatatagcttcagctaaattatgtagaatgtacatattaaatctggcagcccactcagcaaatgtcattgcgctttcttcgctttattttgattgggaaattttctaacggtaatcacacaaaagagaatattaaaaagtaaactaattaatggcatgagtacggtaaataagtttcatgattgaaattccttctgaatttttactaaataatcttaaaagtcgatctacattttatatgatataaatctcgtgaccgatcaccgatcacagcttacatgatcacagagccgtgattaaactgctgaatgcgcccattgtcagcgtgtgagagagatagtgagtggagaaggtggaaacagagagatagagagagttgcgagagagcagcttccatagcatcgctttaagattggggtcgtgggagtggggaaagttctggtagacagagataggagattggggaattgatttgttattggacttaccttcgcctggttctgtgaggaagggggcgggggcggcgggaactgcagcagcgagttgctgatgctggtgcgctggaaacctgcgctgttgttgctgttgctgccgctacccgtgggactgttgctgtggtgctgtggatgcggatgtgcgtgcagcgggaactgttgctggaactgatgaccggtggccactgaagtggcggctgcaacggcggcggccacaacgtgctggaagtggtgctgctggtgatttccagtggtgatcactgcagaacttctcgctgcccgcggaaccgacgacgtgatcggcgactttgttggcgtctctaggcccgaattgttggccgtggtccacacagacatgatttttggctagcgatttctcctgcggatttaagtacgtctgccatggtgcacggaaaaacaggcaagcaaaagagtaacaaaataagttaggcaattcgacacgtcgcaaatataaggtgctaattaagtacgatcggcgaggtttgaaagtaaactaaacaaaaaacaaattaattcaacagcatttcgatgctttacttgtgtgcatgtatgaaatgacctaacgcgtgacgccaacatatcgatctatcgattgcactagtgctgccagccctgccatcagctgttaccgatattttaaagcaaaaggcgccaaatttctgtgagatcgaaatatttgtggcttactgtgttagtgattttatatttagtaattggtaagcgacacaggctaattaatcatacgccccctaagtcacataaattaatcaaatcgtttgcagaactttacgccctgacacacatttcaaattgccgatagcagttgttcggttcttttcctatttcttgctcttgcaaaaacagctctcttgccgttttggtttgctaattttctttcacattcttccggcgtagtcctcaattattttattcttggtctgcccgtgtactaacatatgtacatacgcatttacatatatgtgtatgcacattgcatctgtcgctactctttctgtgctttttttttgttatccgccttgaacttgcaaattttgaatgagtgcgaggagtgcggtatggttctcgcataactgtgctattcgccttctctgtcagtcttctaatattcacacccacagtttcgcaagtggctttcttcgcttttccaccccttattctttgcttgttctgtggtttgctttgggaattaattttaattaatttaaagcgagtcatgtgccgatgaacagacctagaaccgttatctattggatatgcccaaagcgcgagcactcacgtatgtaagtatgtacatccatatatccatgtatgcatagtaacagtcgcggccaaaataataggggctaaaccataaatgaccgatatacaaatcttcttaaaaaactcataattaacgccgcatgacatgataatctataaatgttagctctgcaggctaaaaaacactctttaaaaacaaaatttatattattgtaaaacacctgcaggaatggaatgttaagtggtaaatgttttcaatatcttctttgttt

SEQ ID NO: 24008 - DNA, 2187 bp, DROSOPHILA
tcatacatgcacacaagtaaagcatcgaaatgctgttgaattaatttgttttttgtttagtttactttcaaacctcgccgatcgtacttaattagcaccttatatttgcgacgtgtcgaattgcctaacttattttgttactcttttgcttgcctgtttttccgtgcaccatggcagacgtacttaaatccgcaggagaaatcgctagccaaaaatcatgtctgtgtggaccacggccaacaattcgggcctagagacgccaacaaagtcgccgatcacgtcgtcggttccgcgggcagcgagaagttctgcagtgatcaccactggaaatcaccagcagcaccacttccagcacgttgtggccgccgccgttgcagccgccacttcagtggccaccggtcatcagttccagcaacagttcccgctgcacgcacatccgcatccacagcaccacagcaacagtcccacgggtagcggcagcaacagcaacaacagcgcaggtttccagcgcaccagcatcagcaactcgctgctgcagttcccgccgcccccgcccccttcctcacagaaccaggcgaagttcctcctcctgcttcttctgacctcatctgcgtattcaaatgaagggaagaaggggcttcagaggaacctctacgtaacggacaattatcaccagaatgtggtgtctatacgaacgcgcaaacacattcgccattggggtgataaccacttctgtgccggctctctgctctccgcctggtgggtcgtcacctccggctgttgtgtgagcaccaggccggagagcaccccaaaccagccgagtaatcgcaagaatctaagggttgtcgtcttcacgcccaagcgattgaaaaagccatctcccaagaacatataccacgtgcagaagattgtgttggacgagtccgccataagtgggtgcacagaattggctctgctgaagctggatcgcggcgttactggccaaaggtttgccatgatgctgccggaaaaggagttgaatagcacttggctttgcaactctctcggatggggcaggatttactacgtaagttatgtatatatatctgcgatgtgccccgcattcagcatggtgtatgataacccagttacttggttccaggacggaccctactcaagcgagcttattcaaatcagagctcaaaagatttcggagtatgagtgcaagcctgactgcagcagatgcctgtgcatgactagctatacgggcaggggcaatatgtgccagcaggacttgggcagtccactcttttgcgatcacttcctgtacggcgtggcgcgtcgggtgcacacctgcgatgatgagggcttcatgttttacaccaatatctatcaaaaccgcaaatttatcgaggacaccttgagtggcgcaacctggccaaaaagagtcctatgttttcgtctacttctacttctactggtgttagcgtcgctttcgccgcgcggacaccatcgcaccgccagcagcagcatgtcgcagtccggcgaggatctccactcgcccacctacctgtcctggcggaagctccagcttagtcgggccaagctaaaggcatccagcaagacgtccgccctgctctccggattcgccatggtggcgatggtggaggtgcaactggatcacgatacgaatgtaccaccgggcatgctgatagccttcgccatctgcaccaccctcctggtggcggtgcacatgctggccctgatgatcagcacctgtatcctgccaaatattgagacggtgtgtaatttgcatagtatttccctggtccacgaatcgccacacgagcgtctccattggtacattgaaacggcgtgggcattctccacgctgctgggactcatactctttctactggagatagccatcctgtgctgggtgaaattctatgacctaagtccgccggcggcttggtcagcgtgtgtggtcctcataccggtgatgatcatctttatggccttcgccattcacttctatcgctccctggtgtcgcacaaatatgaggtgacagtctcgggcatccgtgagctggagatgctcaaggagcagatggagcaggatcatttggagcatcacaataacatacgaaataatggcatgaactatggcgcatccggggacattgtctagcatcacttggcgtatcc

SEQ ID NO: 24009 - protein, 650 aa, DROSOPHILA
MSVWTTANNSGLETPTKSPITSSVPRAARSSAVITTGNHQQHHFQHVVAAAVAAATSVATGHQFQQQFPLHAHPHPQHHSNSPTGSGSNSNNSAGFQRTSISNSLLQFPPPPPPSSQNQAKFLLLLLLTSSAYSNEGKKGLQRNLYVTDNYHQNVVSIRTRKHIRHWGDNHFCAGSLLSAWWVVTSGCCVSTRPESTPNQPSNRKNLRVVVFTPKRLKKPSPKNIYHVQKIVLDESAISGCTELALLKLDRGVTGQRFAMMLPEKELNSTWLCNSLGWGRIYYVSYVYISAMCPAFSMVYDNPVTWFQDGPYSSELIQIRAQKISEYECKPDCSRCLCMTSYTGRGNMCQQDLGSPLFCDHFLYGVARRVHTCDDEGFMFYTNIYQNRKFIEDTLSGATWPKRVLCFRLLLLLLVLASLSPRGHHRTASSSMSQSGEDLHSPTYLSWRKLQLSRAKLKASSKTSALLSGFAMVAMVEVQLDHDTNVPPGMLIAFAICTTLLVAVHMLALMISTCILPNIETVCNLHSISLVHESPHERLHWYIETAWAFSTLLGLILFLLEIAILCWVKFYDLSPPAAWSACVVLIPVMIIFMAFAIHFYRSLVSHKYEVTVSGIRELEMLKEQMEQDHLEHHNNIRNNGMNYGASGDIV

SEQ ID NO: 24010 - DNA, 4366 bp, DROSOPHILA
tgcccacaaatgctgcaatggaaaacgggtatattagatagtcgaattggaattgggcacaggaatgcgttcgaacatttaaagatgagttaacgaagctatagatggtctgactacggatgattccgtgcctctttcggctggctggcttggtcgaactatctctgtgtatttaacactgttttgtataaactggatggccttatctctccctcttaaccttattacatttgcataccccgtaatccgtaatccgctcccagcagagccaaacaaacaccgctaactgcacctcagaatgtcaacaattgcgagaacggacatgcaaagtgcagtaaaaaaagcacactcaattttagatgctcgaagacatactagatacatacatatgtatgtatattaaatatcagtttagtagtactgcagtatctgctattttaatttaattcaaatttaagatttattttgtaagtttaagtataataaccacacttaatagcccccctttgaagcgattgagttcgcggttatactcaatcaatataagattgcagggaaatgcaattgcctgccatcccagagtgcagtacccctgccctatcagctggacgcagtatattgccattgggaatatacgagtatatggaagcattgtctccttcgcagccatatctttcatccaagcatacaaacatacatatatgtacatatatacgagggtgtgtgtcagttgagcgaaaaacacacatattctgaacggaaaccctaagatttagtctttgaatactttcagtgtcaggcagctgtttgtggtggaaaactttccattaaaaacaaggtcttgccttagctagtttttgtgccctcatgtcactcttatttacaagcaagctgttctatattttaaaactttgattttcacagtcattgcaacaacagttgttcaaaagctcgccagaaaagagaaaataaaatagtctgtagtaatgtgttttgctttgtacgcagttctgcttttactcaaaatgtatttatgtatctcaatggaatttttaattttgctagtgctagtatttagacatttatattataacagcatatagtaaaatgatgtaaaatgctaccgaacaaagtgaagcgacagatccgtaaagtgagatacatatgtaccaatatatatacataaattaatttcttagtattttatttttaacaacttctaatcaacaattggtttttataaacatatttcacatatatgtgtattcgtgctcatggatatgaatgattaatatgcatatcgtccgatttcagtgatatttccttcttaaatttacatttagaaactcttaggagttattaaaaaagtgcgttcaagaagttaagggcaaaaaatggcgttgaccgaattcaacgtcggatcccaaaatgtttgtttgatctaaaaggtacaaaaaattaacgtagagtacaatgttttttattatttagattaaagcaatgatagatatacgtagtttgtgagatatatggcaaagtattcatgaggccccatcgctttaaggaaatttcgctttagcttagttcttcttgccacccacccacgttcttaaattctaagcgcacgcttttcgtgcctcggtctcctgtcttttttgcacaagcaaactaaattttgcttcagttcaatgtaaatataaccaaatgatcggatacgcttcacagttccataaaacataatgtacaaaaaattaaacatctgttgcaccgctcacagcctactcgttgagcaggcaggtgcgaacaatggcgttgcacacggcgtagggatcacagttggagcttggccgccggtcttcgaggtatcctttgccggccgtcgcaacgccacgcggcactcgcacacttacggcccggttggccacgccccaagaaaacttatcgatgctagaagtctcaagacgtcccacgaggcgccgttcattgtctttgccttccttggggtcgtatgccttgatgtgccgctcgtggcgcttgctcagcttctcgatagcttcctcgatggccttgattccgccatcagcacgcatctcctttgtggaaaagttggtatgcgcgccggctccgttccactgaccctccatcggtttggggtcaaaggtgaccactacgccatactcctcagctatgcgctgcaaaatatatcgcgacacccataaatcgtcacatgccttaatcccggctggaccaatttggaactcccactgcgcgggcattacctcggcattggtgccggcgaagtcgatcccagcatacaggcaggccacgacgtgggcctccacaagatcgcgagcgtacacacggtcagctcccacgccgcagtagtaaggaccttgtggggctgggaaaccgttctccggccagccgaagggacgtccgtccacgtctaataaagtgtattcttgctcaatgccgaaccagggctcctgatcgctaattaggtcaatggctgcctggaacgcggcacgcttgttggacgccgtcggcttgccgtcggcgctgtaggtgtcgcacaggacaattacgtcgttctttcccggcttaaagggatcgcgatatatggcgcgtggcttgagcgtggtgtccgagttctcgccatgggcctggtaggtggaactgccgtcgtactgccaatccggcaagtcctccacggagctgggtactttgtccaaaacgcgatccttgaggcgaatgttctcgccggtaccgtcgatccataagtaagtagcctgcactcgattggccggcgtttccaggttgcggtacctctgcagaatgctcttgtctagagccgtgttgggggagttggccaagaactgggagcgggtggtattgccagtacgcagcagacgcagctgctgtgttgcgggagccaccagctccttcttcaggaagagtcctgccacgcgtagtgccatcttggttcttggattggagtcggcgagaaggacaaaaggacacggttagttatgtattgctggcgaatgtgaggacgtgcgcaggaagggcaagggctggtggcatgctggctcactctgcttttctcatgaatttttatgtaattattttccttgcacttgattttccgaggtagttaaaaaaggggtacttttccagtgaagacgcagtcttccgcacaacttaccgtgctctgctcgtttttccactttacagttatatgattggttaaacagtcgctggttggacaggtcttttggtaattttggattgcggtactttcggttttcgtttctgtttctgtcaggggctgcggagcgactgttggggacacccgaccaattcgatgtttggaagtcttgtgagcacagttagcgcgacagcattcacttttttcgttgtttcgtcgcgcgcctcgggtttttctttatctcgtttgcgacgccgacgcacagacaaaggcctcccagagagcattcaaaactggcggtatatgagcacccgctccgcagccactagccagagagacctgcaatgcgacccataatgtttatgtttcgaggctagtcgggtagccaaaagccccgttactgagcacacgctataagctcatttatgcatttcgagcacttgtagcttgcattagcgccaaatgaaaaacaaaagtttttagtaattctcatcgtagaacacctgcaccatttatgtgcatggcccactttagaacccacaaattaagttctacatttttgataaattcatttcagaaactatgataggttacgcagtatgcagatgcatttcagcagtactacttattacaacactctctcatttctcgtaatctcttcgtaaaaacctccaccattttgctctttggctgattgttttgaatacacgcctggtacaaagttcactatatacaattaaatatagcgaatgcaaggagcaccgtatcagctgtgtctattcgtgtttggcatttgataaactctgtggtggaccgcattaatagagccttaaatgaagcaataatgatttgtttataatatgtaaattcggtactaaatgttcctattcctggcttgggtctcgcatacgacgttctgaatattaaaaatatatctaactaaaactataactaaaatagcagtataagtacacagtgtagccaacttttaggctgagtatgtaaaacgttgaaatttaaatgctatgtaaattctgatctaaatatcctgtgtggaggatattcaatatttatttgttacagattatacttagtcctaggccgtcgttcatcaagccacgcatattggcccactccctcctacataatggcatgttg

SEQ ID NO: 24011 - DNA, 2366 bp, DROSOPHILA
atcgaattggtcgggtgtccccaacagtcgctccgcagcccctgacagaaacagaaacgaaaaccgaaagtaccgcaatccaaaattaccaaaagacctgtccaaccagcgactgtttaaccaatcatataactgtaaagtggaaaaacgagcagagcacggtaagttgtgcggaagactgcgtcttcactggaaaagtaccccttttttaactacctcggaaaatcaagtgcaaggaaaataattacataaaaattcatgagaaaagcagagtgagccagcatgccaccagcccttgcccttcctgcgcacgtcctcacattcgccagcaatacataactaaccgtgtccttttgtccttctcgccgactccaatccaagaaccaagatggcactacgcgtggcaggactcttcctgaagaaggagctggtggctcccgcaacacagcagctgcgtctgctgcgtactggcaataccacccgctcccagttcttggccaactcccccaacacggctctagacaagagcattctgcagaggtaccgcaacctggaaacgccggccaatcgagtgcaggctacttacttatggatcgacggtaccggcgagaacattcgcctcaaggatcgcgttttggacaaagtacccagctccgtggaggacttgccggattggcagtacgacggcagttccacctaccaggcccatggcgagaactcggacaccacgctcaagccacgcgccatatatcgcgatccctttaagccgggaaagaacgacgtaattgtcctgtgcgacacctacagcgccgacggcaagccgacggcgtccaacaagcgtgccgcgttccaggcagccattgacctaattagcgatcaggagccctggttcggcattgagcaagaatacactttattagacgtggacggacgtcccttcggctggccggagaacggtttcccagccccacaaggtccttactactgcggcgtgggagctgaccgtgtgtacgctcgcgatcttgtggaggcccacgtcgtggcctgcctgtatgctgggatcgacttcgccggcaccaatgccgaggtaatgcccgcgcagtgggagttccaaattggtccagccgggattaaggcatgtgacgatttatgggtgtcgcgatatattttgcagcgcatagctgaggagtatggcgtagtggtcacctttgaccccaaaccgatggagggtcagtggaacggagccggcgcgcataccaacttttccacaaaggagatgcgtgctgatggcggaatcaaggccatcgaggaagctatcgagaagctgagcaagcgccacgagcggcacatcaaggcatacgaccccaaggaaggcaaagacaatgaacggcgcctcgtgggacgtcttgagacttctagcatcgataagttttcttggggcgtggccaaccgggccgtaagtgtgcgagtgccgcgtggcgttgcgacggccggcaaaggatacctcgaagaccggcggccaagctccaactgtgatccctacgccgtgtgcaacgccattgttcgcacctgcctgctcaacgagtaggctgtgagcggtgcaacagatgtttaattttttgtacattatgttttatggaactgtgaagcgtatccgatcatttggttatatttacattgaactgaagcaaaatttagtttgcttgtgcaaaaaagacaggagaccgaggcacgaaaagcgtgcgcttagaatttaagaacgtgggtgggtggcaagaagaactaagctaaagcgaaatttccttaaagcgatggggcctcatgaatactttgccatatatctcacaaactacgtatatctatcattgctttaatctaaataataaaaaacattgtactctacgttaattttttgtaccttttagatcaaacaaacattttgggatccgacgttgaattcggtcaacgccattttttgcccttaacttcttgaacgcacttttttaataactcctaagagtttctaaatgtaaatttaagaaggaaatatcactgaaatcggacgatatgcatattaatcattcatatccatgagcacgaatacacatatatgtgaaatatgtttataaaaaccaattgttgattagaagttgttaaaaataaaatactaagaaattaatttatgtatatatattggtacatatgtatctcactttacggatctgtcgcttcactttgttcggtagcattttacatcattttactatatgctgttataatataaatgtctaaatactagcactagcaaaattaaaaattccattgagatacataaatacattttgagtaaaagcagaactgcgtac

SEQ ID NO: 24012 - protein, 399 aa, DROSOPHILA; identical to SEQ ID NO: 4866

SEQ ID NO: 24013 - DNA, 3070 bp, DROSOPHILA
gttagggctataaaactgatgttatttgtacagcctgatttcgtggccgcaatgtcagtcagttgctttgaatttcgtttcgttgtttatctgcctaaaattagaaaagatagcagaatattgtgcttataaatagttgaataaacatgcaaaaagcttaccttccgtaaatgtgtgtccgcaccggttcaaacaaacagggaataaatttactcattcttagccaacttagcttaagtaattaatttaaaattaataacaagtaattattgtatgtatgattgctgacaaacatatacatatatataatggataggctgataacacaataattgattacaaaaaaaattagctgttgaagacaaagtttttttttgcttaaataccggaatacttataaatatcctagcagattctatacctttatactttgctggcacaaccaaagttgaaatcgcaaacaaattcgatccatgtatgtatgctcgtttatatgcattgtgatttttttttaaattgctaaccgggttgttggcttctgatgcagtggctgcttcatgctgaacttgaactggctttattcgccagacttgaaataaattacttttaacaagtaagctgcgtttcggcacttcaatacttgtggaggtcagtggtaaattaagaaacctgttttgttttcgtgatcaatgcataatttcactttatataatggactttcttctcatgtaacctccgatttgaatgtattaaatagatttcatagggtggaagaacatattatagataagaaaatacgtcaaaactacgtcatccaattagtttcgatcagatggtaataaaaaatagtaactaaagatttgggatttattgaattttgaaaagtcgaaggggtgtcacacaaaggcagtcgcagccctattcggcttgctggcctgttccgcgaaaacgggggtttttttaaatttacgaatacgaaatgccaaacattagtaaccggttcggcgtaatacgtcacagatagaagataactaactcttaaattttttggtatttttagattcacccaattccaacgaccgtgatgcgggtttttgttccgccagttcggaaagcgaaggcggagacgacttggtcgtcgagcacgcgcgcagtggcagtcccgacatcagaccaaaaggaacagactcggcggactccaagccaatagcccttgtccgcaacaaacgcaagagttcggaacccttcaaagtcgtaggtttgacgactcccaactctaaatccatgcctggtcctccgtccagtgcgagtatgaatgcaactggtccgctaaagaaacgcatacgatacacatcttccgccgattcggcagttgtcctaacgccaccagccatagactctccaccgcccaacagttgcataccttccacgttgcgcctgcagcatgaaataatgcctaatccggcacatatatatgttcgccatccgggagttacgactcttcacagatcgcttgctgcccacccagaacagctggaaccactcgcattagtaacgaccaaaaagcaatgtgtcgaccaagcggggcctaaaatagaggccttttccgcattgctaattggaaaacagccatccgccaaaaaaacgttgaaggaaaggacgcaaaaagaatcaacgtcatcttcctttttagaagctagtcttagcgatgaggatctgaacaagacgggattggcaccaatttcgcgacctcatcaacatcaacgcaattacaagaatatgactagggagcgccgcattgaggcgaacgcacgtgaacggacccgtgtacacaccatatccgccgcctacgaaacgctccgccaagctgttccagcctatgccagcactcaaaaactttccaaactctccgttcttcgggtagcgtgttcctatatactaaccttaagtagaatggctggcgaggattacagcgccgatcaatccgtaccgtccattgccacgtgcttagaagctgtaacatcaaccatccaaacggagggaaaagtgaaacgaaagaaagacgagtaatctgtccagtttcgtggataacttacttttttagactttaaatgcgactgatttctgctatttttttaaatatttgtgcttaagcttagattaatctgcatacagcattcctatccacatgctttgattctttgccagaagtggcctaatagctttaaaagttttcaaggctttgttagatatacagacttcatgagtttaaaaaaaaaatttttaagtatgcctgcatacaatttgtatttgatattgacattgttatgaataaatactagcgatgtgatcataatttaatctctacctacagaaacattttagtcagtacaaaaagtcaacgccatctatgtacgagtgtataaaaagacaataatcggcatccttaaaacctatgtaaatgacaataatgtaaactatatatttacctaaaaaagtttcagtttcttgtttcaaacaggatttttatatcaatttacaagtttttaaaagaagctttgccaaaatgttgtaatttcaccatcaactttagttaccttaggactgaatatgaaaatgtatatttttttacatgtacctctataataagatcaattcttcttttacgaattgcatacaacagagataatcagtagtaattaaaaatccgtagttacgaaattaaataaagaatttaacaaatttcagtttatgtaagtaactgtagacgtttcctcttcaattgtaatctcattgttttgtatacattgatatatttgtacccatgtatacattcataagtgtacgtgccatagaatcaggaaatacacaaaacttactataaagagaatgtatttttatatagagttgggatttcaggtggtcgcggttaaaatattagtcatctgggtgcaagcgcactaaaggaaaccatatagaaatgacggctttaagggttattttatgtctgtacgttaaacaatcttatcgtttgcaacaagctatttcgtgatattaaaaactcaacagg

SEQ ID NO: 24014 - DNA, 1070 bp, DROSOPHILA
ttcggcgtaatacgtcacagatagaagataactaactcttaaattttttggtatttttagattcacccaattccaacgaccgtgatgcgggtttttgttccgccagttcggaaagcgaaggcggagacgacttggtcgtcgagcacgcgcgcagtggcagtcccgacatcagaccaaaaggaacagactcggcggactccaagccaatagcccttgtccgcaacaaacgcaagagttcggaacccttcaaagtcgtaggtttgacgactcccaactctaaatccatgcctggtcctccgtccagtgcgagtatgaatgcaactggtccgctaaagaaacgcatacgatacacatcttccgccgattcggcagttgtcctaacgccaccagccatagactctccaccgcccaacagttgcataccttccacgttgcgcctgcagcatgaaataatgcctaatccggcacatatatatgttcgccatccgggagttacgactcttcacagatcgcttgctgcccacccagaacagctggaaccactcgcattagtaacgaccaaaaagcaatgtgtcgaccaagcggggcctaaaatagaggccttttccgcattgctaattggaaaacagccatccgccaaaaaaacgttgaaggaaaggacgcaaaaagaatcaacgtcatcttcctttttagaagctagtcttagcgatgaggatctgaacaagacgggattggcaccaatttcgcgacctcatcaacatcaacgcaattacaagaatatgactagggagcgccgcattgaggcgaacgcacgtgaacggacccgtgtacacaccatatccgccgcctacgaaacgctccgccaagctgttccagcctatgccagcactcaaaaactttccaaactctccgttcttcgggtagcgtgttcctatatactaaccttaagtagaatggctggcgaggattacagcgccgatcaatccgtaccgtccattgccacgtgcttagaagctgtaacatcaaccatccaaacggagggaaaagtgaaacgaaagaaagacgagtaa

SEQ ID NO: 24015 - protein, 261 aa, DROSOPHILA
MPGPPSSASMNATGPLKKRIRYTSSADSAVVLTPPAIDSPPPNSCIPSTLRLQHEIMPNPAHIYVRHPGVTTLHRSLAAHPEQLEPLALVTTKKQCVDQAGPKIEAFSALLIGKQPSAKKTLKERTQKESTSSSFLEASLSDEDLNKTGLAPISRPHQHQRNYKNMTRERRIEANARERTRVHTISAAYETLRQAVPAYASTQKLSKLSVLRVACSYILTLSRMAGEDYSADQSVPSIATCLEAVTSTIQTEGKVKRKKDE

SEQ ID NO: 24016 - DNA, 3630 bp, DROSOPHILA
atgacctcctcctctgaccgtcgcaggcagcagaaggaaatattccacgccgccactccacaccactcagcatccatctgcctcggcgtccacatttccagcgactcaaatgcaactctttcattatgcgcaaacggcaagtcgcaggcaaacaagcctaagcaaactgagcagagcaaaccttgaaacaattcaatagtttcctcattagtaacattcgtgccaaagccaataggcgacaggagtggtaagtctgaggaggcgtacactggtcctaaacagatacaaattcagatgcttgtatgcgacccgcttaaatcattaaaaactgttaataagaattgccaaaatcatgaacgtcaagttttaagaatgggatataatcattacgattttaccttaaagtaaattaagtgcaagagtacctatccaaggttgtgtagttgtatgtcctttctattttatataatatggtatatagctttaaggcatctttttgtaaatttgttgatctacattttgttttgatcatcaaaaaactttagagatattggaactattgcaaacagtctgtttaaaattatgaagtgacgaaataccacggcacatgaaatattaaatttattttttattatgtataaaagattaataatatagaaattaaataattatatagttattgatctaaattccgaaaaaaattatattctttaatacgcttatctggcctactcggggttttctatgaaatcaaatcttactacatttttagcagtgtacgagctagctaagagcagcacggtcgtgataaggagcagtacaagtaccattgaaatccaatatcaatgcgaatcgcacacagcgctgggaaccttcgccgcggtctgccgtctctcagaagcaactttgtttgggcttgtgtttgcgttctccgttccgaagaccgtagacggtagaccgcaaacggaagaccgtagagcgtagagcgtggaacatggtgcgctgacactccagcgggccagaggcgaacggctgtttcgcagtcgcgggacagtcgctaccggcagctcggcagcgatcgtcgccttctcggtcgcagttgcagtcgcagtcgcagttgtagtcactagcagcgagctaggtacattcgccgacgatcccaaacaaagcgtcagagcggcccagagcccgaaagacatcgaaacggagtgcggacaaagccgctagttcgtggtttgctctgcccgctgccattggttcggttcacggtctgcaaaaggcggtgcagagcgacggccagctgactgactgacggctgttagccgaaattcgctaatttcccgcgaagaaaatcgcctttgaacccggtcggagaagtcgtgcgcgcatttttcgaaagcgaaaatcgcaatataaaacgctcgggccggcgtgtaagtgcgcaatttgtgtgacaaccgaaaataaagtgaaacgaataaacgaatggccacagatactgggcgtgaaacacagaaacaaatgtactgtcacaaaaaccagtgccaagtgtcaatggattggcttgaacccacgcgataagaacgcggctgaaatacataactcacattcaagtagccgaagccatgcacactttcaaaaggggcttcttttgctctgatctgagcatacggtatccctacaaggactgcacgatcacggtgccgatgctactgctcatgatgctcctgctcccgatgctcttcgtggccgtggtggagatcatgcggatctgcaagcgcttccgcaccaggctctacttccgcaatctgtggcgcgcagaggccaccttcagcttcggcttcatagccacctatctcaccaccgagctggcgaagcacgccgtcgggcggctgaggccgcacttcttccacggttgccagccgcgcctcgacgatggcagctcctgctcggacctccagaacgctgagctgtacgtggagcagttccactgcactaacaacaacctctccacgcgacagatccgcgagttgcacgtcagtttcccgagtgcccacagcagcttgagcttctattcgatggtcctgctggccctctacgtacacggggtgtggcggggacgagggggagtgcgagtcctgcggcacgtcctgcagttcctgctccttatggctgccctctgcgtttccctgagccgcgtagccgactactggcaccactggtccgacgtcctggccggcgccctccttggagtgacctatgccgccatcacagctgcctacgtgggtaacctattgcggcggcagaccagctccaccggcagaatcccgccctccttgaactacagccaccacctgcaccaccagctaatggcggacaacaataactcgacggcctctgctaaggtccacttcctggcagcagctgcttccgcttcaatgaccacaacgacgccgctcgacgacatccaggactccgatgtggaggattccagggactgcagagactccgaggactcgcacgactctcaggactcgcacgcagagaatgaggacgacaacgaggaggtatacaagtcgcaaatgtcgcgtcccgtcactccgcccaccgatctgacccacgtcgtctgagacaccaagctggaaatatggcggagaggaataatcagacttatcgcccgccggctgctatttccactatttttccatttagaaatcgaagcaaacagaaatatgtgataagtgcgcggcgcactctttacctgatatgccaatgtccacccccacactcctccggcgattttcgaaatccaaagcgatcaatcggttgtgcaacttctatgccgatccgggaaattgtttcggccttcaacggcttattgctcgatggcgattacgagaatttcggctatgggtgagtatctcgccaaaagtatctgccgctgatattgcaaggccggatcgaaccgcagtatctcggcggagctactggctccgcgctagctacttgtttgtttgtaaacaataccgcagtcacgtcgcagtcgccgctgccgcttttgaagtgcccagcccgccaacgtggagctccagctcccaatcagctgcgacaatctctggacagcgacgccgactgctgcgccttgcggctgatagtgcataaaaataataaataataataaatgccgcgcttatggctgcacagacacggaatacactcgcatgagagggggatttatgaacaaatcaattaagtcgagtttaattttattatttgttttatgttaaatatgtttggctaccgacagattttaaggcttactctaagtgtttgctctacaggctgaataaatgtttattgcccaagtgatttacgaggtgcagttttttaagtttggcttctcgacattttgaatcggttgcgtttccagcgaaccacatttctaggaaacccctttgctcaagaaggctagattgtccgtaagcaatggtttgataaggccgactatcaggtagaatgataaataaatatgtaattgtagtcataataccactagaacaacacattccacatcgaacaaaacgaaaataaacattcttggcccgactaattgtacttgtcccaagcgtg

SEQ ID NO: 24017 - DNA, 1630 bp, DROSOPHILA
cgctgacactccagcgggccagaggcgaacggctgtttcgcagtcgcgggacagtcgctaccggcagctcggcagcgatcgtcgccttctcggtcgcagttgcagtcgcagtcgcagttgtagtcactagcagcgagctaggtacattcgccgacgatcccaaacaaagcgtcagagcggcccagagcccgaaagacatcgaaacggagtgcggacaaagccgctagttcgtggtttgctctgcccgctgccattggttcggttcacggtctgcaaaaggcggtgcagagcgacggccagctgactgactgacggctgttagccgaaattcgctaatttcccgcgaagaaaatcgcctttgaacccggtcggagaagtcgtgcgcgcatttttcgaaagcgaaaatcgcaatataaaacgctcgggccggcgtgtaagtgcgcaatttgtgtgacaaccgaaaataaagtgaaacgaataaacgaatggccacagatactgggcgtgaaacacagaaacaaatgtactgtcacaaaaaccagtgccaagtgtcaatggattggcttgaacccacgcgataagaacgcggctgaaatacataactcacattcaagtagccgaagccatgcacactttcaaaaggggcttcttttgctctgatctgagcatacggtatccctacaaggactgcacgatcacggtgccgatgctactgctcatgatgctcctgctcccgatgctcttcgtggccgtggtggagatcatgcggatctgcaagcgcttccgcaccaggctctacttccgcaatctgtggcgcgcagaggccaccttcagcttcggcttcatagccacctatctcaccaccgagctggcgaagcacgccgtcgggcggctgaggccgcacttcttccacggttgccagccgcgcctcgacgatggcagctcctgctcggacctccagaacgctgagctgtacgtggagcagttccactgcactaacaacaacctctccacgcgacagatccgcgagttgcacgtcagtttcccgagtgcccacagcagcttgagcttctattcgatggtcctgctggccctctacgtacacggggtgtggcggggacgagggggagtgcgagtcctgcggcacgtcctgcagttcctgctccttatggctgccctctgcgtttccctgagccgcgtagccgactactggcaccactggtccgacgtcctggccggcgccctccttggagtgacctatgccgccatcacagctgcctacgtgggtaacctattgcggcggcagaccagctccaccggcagaatcccgccctccttgaactacagccaccacctgcaccaccagctaatggcggacaacaataactcgacggcctctgctaaggtccacttcctggcagcagctgcttccgcttcaatgaccacaacgacgccgctcgacgacatccaggactccgatgtggaggattccagggactgcagagactccgaggactcgcacgactctcaggactcgcacgcagagaatgaggacgacaacgaggaggtatacaagtcgcaaatgtcgcgtcccgtcactccgcccaccgatctgacccacgtcgtctga

SEQ ID NO: 24018 - protein, 334 aa, DROSOPHILA
MHTFKRGFFCSDLSIRYPYKDCTITVPMLLLMMLLLPMLFVAVVEIMRICKRFRTRLYFRNLWRAEATFSFGFIATYLTTELAKHAVGRLRPHFFHGCQPRLDDGSSCSDLQNAELYVEQFHCTNNNLSTRQIRELHVSFPSAHSSLSFYSMVLLALYVHGVWRGRGGVRVLRHVLQFLLLMAALCVSLSRVADYWHHWSDVLAGALLGVTYAAITAAYVGNLLRRQTSSTGRIPPSLNYSHHLHHQLMADNNNSTASAKVHFLAAAASASMTTTTPLDDIQDSDVEDSRDCRDSEDSHDSQDSHAENEDDNEEVYKSQMSRPVTPPTDLTHVV

SEQ ID NO: 24019 - DNA, 2996 bp, DROSOPHILA
aagctccattccactccactccactcccacctcgattctctgttctccactgcccctttccccgttttccgctccccgctcctatctgggctcgcttttatcagcggcttatcagtaaataattccacctgttgcgcggcttgcgcgagtgtgggtttaagtgcgagtgtgtgtatgtgtgtgtgtgtagataactcgaggtgaggtatcgcattaagcaacgcttgtgctgccccacaattgtggtccccaaaaagcaaactttgcttgtttgcactgctcagcgctgctacgctggagtggaaatggaagccccgctgccagcggatttcgtagataaccgagccaaaacccaactgaaacggactgaaacaaaacccagcaaacccacacttgtacacataggaacgggaccgctacaggcacagatacagatgtagatgtagatacagatacaaatacagatatagatataggggctctatagaggcagactgcctcaaatcttatcttaaaacttgactcgatgcggcgcagtgacgcagtcgcttagcaatgccgctttcattgctcaaactgcgccgctttatcgatcaagtcgatcaggatgggagtagcgcgtcctttaatccttgatccttaaactctaaacatggtttttctcatttagcatttgaagccatctttgcttggataatttcccacttaatcatccgagcatcctgacttgcgatcttaagttttgtccgctcagttgcatgtatggatatcctatggatatggatggatatcctattccctcgatcttgaggcactggacgaatgctatccccccctatcgcttgaagttatgtaacccactcattaattaaaacctcgtgttcccacaaagaacacacacacatacacacacacactcaaacatatgattgcatttggtcttccctttcgcactcacacgtcagctcaacccttactttggtgcagcttgaaaagcggcgaaaagaacaaggtttatttataaactgcgctcgttgttgggggtttctctctgcgcgaagtatccaattttccctctttcccgctctctctctctctctctctctctctctctcttaagcctcttcttctagctgttgcttcgacttcggctcttcgcagggggtgtgcggcgtggggtggtgggtggcgactggcgggctcgttgttgttgtaaactcggtttcaagctttaattacgtctcacccatacacacttccgtgtccgtgcctgtgtgtgtgtgtgtgtgtgtaaacagttgagctctttgtaggagtgtgtctttggagcgggagcggcagcggggggagggtcggaaacgggggctggaggagcgcaagggctccgcacgtctttagccattcctatttttgtttacccatcgccggcgtcgctgcactccaacggtacttctgagcgtgcccgaattcgaattggaattcagtcgagctttgcgcgtcgtcgccgccgttcgcgaagtttgttgctggatgggctcgttcgctatcccccacccccacttatgtcgtgtcgtgtcgttgtctctctctctctctcgtactcgctcaaagcctgtcacccacttttctgcgcccgctcgccggctttggcgcggccttaaaacgtgagtacccctctctcgctccggcctgctctccgtcctgcgtgtgtgcttctgtgtgtgtgggggagagtttggcgataatctccaatttcccgataagatatcccactgtgtcgtcgcactctgcccgctcccctctcagctcgagcctgtccggccccaaagagccgcttcggctgccgaggagagcgtctagaaggatcgcacctgcagcgcaatcgatgccacgatggccactttctcaaggagttcgtccacgcactacgcgtgcaccgtaagaaaaagtgagaattctagccgcataccttccgaagtttacgagtagcatcaaggctacctcgttcaagggaagccatcaactacgttggagcacatgcacagaagcaatcgatcattgggagcgttgtctataccataagcatgtttcagacctgccgcctttatttcctcagtgcaccgcgctctcttcatctctcttttcggcttatcactcccactgtgtgggtggcgtggagtcgagtcgagtggagtggattggagtggagctgttgcgtttgttgttgctttcattatgttattaattaggcgagtggcggctgtggtggcgtaggtgggatcggatcgattgctaggggtgtgtgttcaatcaggaggtggggcgatggtcgctggtcagtgtgtcgctggtcactgtgtggagcacagatggtggccacttcggccctcttcgctgccgatagaagggatagaaggcccatgcaaagctccagagaataacacagtgtgcattactttctcccccagcttcacgacgtcttgcaaacggttgaaaatggagaagactccccggtacacgcagcgggagcggaacatggtgttgagctacgcggcgcagtacaaggatgtgatcgagaacaagcgcacggacgcggagtccaaccgcaagaaggacgaggtgtggctgcagatcgccaaggagttcaactcgcgggtctaccaccagcgcagcgccaagcagctgcgccagctttacaagaacatgaagctgctgctcaaaaaggacctatgcggcgaggacaagagcaaccattcgttcatggacctgctcaacacgctgtcgcaccaggagtccgtggcccagtacattgccgagcagctgtcgccggagggcgcgggcggtggcggcggcggcggtaagcaaggcggcgcgggcaacggaggcggaaacggacaccaatcggacgactacgacgactccaaggtgggcttaaaattcagatctgtgcataagtgtcccatccggtgcttaagtctcaagactcaagtcacttg

SEQ ID NO: 24020 - DNA, 996 bp, DROSOPHILA
gaaaagaacaaggtttatttataaactgcgctcgttgttgggggtttctctctgcgcgaagtatccaattttccctctttcccgctctctctctctctctctctctctctctctcttaagcctcttcttctagctgttgcttcgacttcggctcttcgcagggggtgtgcggcgtggggtggtgggtggcgactggcgggctcgttgttgttgtaaactcggtttcaagctttaattacgtctcacccatacacacttccgtgtccgtgcctgtgtgtgtgtgtgtgtgtgtaaacagttgagctctttgtaggagtgtgtctttggagcgggagcggcagcggggggagggtcggaaacgggggctggaggagcgcaagggctccgcacgtctttagccattcctatttttgtttacccatcgccggcgtcgctgcactccaacggtacttctgagcgtgcccgaattcgaattggaattcagtcgagctttgcgcgtcgtcgccgccgttcgcgaagtttgttgctggatgggctcgttcgctatcccccacccccacttatgtcgtgtcgtgtcgttgtctctctctctctctcgtactcgctcaaagcctgtcacccacttttctgcgcccgctcgccggctttggcgcggccttaaaacgtgagtacccctctctcgctccggcctgctctccgtcctgcgtgtgtgcttctgtgtgtgtgggggagagtttggcgataatctccaatttcccgataagatatcccactgtgtcgtcgcactctgcccgctcccctctcagctcgagcctgtccggccccaaagagccgcttcggctgccgaggagagcgtctagaaggatcgcacctgcagcgcaatcgatgccacgatggccactttctcaaggagttcgtccacgcactacgcgtgcaccgtaagaaaaagtgagaattctagccgcataccttccgaagtttacgagtagcatcaag

SEQ ID NO: 24021 - protein, 45 aa, DROSOPHILA
MGSFAIPHPHLCRVVSLSLSLSRTRSKPVTHFSAPARRLWRGLKT

SEQ ID NO: 24022 - DNA, 4245 bp, DROSOPHILA
tcgcgacccactatttatttgccagcctaactgaaacatagcgattcatctcattttaaaatgtcttgcgtcgcctatttttttattgcctttttttttctatacatgtaacgtgtttatttttaagttttcctacgagctgctaccaaaaagaataagaagaagaaggtgactatcttgaatgtacatttactttacaaaactagaccttacttacttacttaattagagatcgagcagctaagaacgcatgaaaatgaaatgtacaaatgtggttcctaatctagtccctaaagtcaaaagtgaagaacgaaagagctacagaaaagaaatcgaaattgttacgcctagccgagaacttgtgtattatttttttatatcgcttagattgttcccccgaggaaagcattgaaggaactgtagctaatttatgtacttaatgaaccagtgaaaccaaaccaatgatttgaaatggtgtaaagagaagaaacttgctagtcgccgctgcataactgtgtaaatgtggcacacaaaccatttagttagtgttagtgctactgtacgtgtaaaatacaattaattgcctatccagacccagtaaccacaatttacaaggaagcacacaccaaacgaaactgaaaaccaagaaaacaaaactatttatacaattttgtaaacaagaacttattaataaaacaatgaatttactttgtggcccagcctgttgacttttggatagtaaaatttcgtttaaggcttaacattttggcacttacgctcattttgctcgcttaagctgctcttcatttggcgccaaacgaattggcgttgcccaacactgaccagccagcacaaagcgctaccagactgcgcaaccgactgctcatctgggaactggttcgcacatatgggcgcccgcgaaccagttattcgttactcatcagttccagttcggttcagcaaaaattgtgcaaataaattgcggaaagtcggattgtttatgtgggaatcggcagcgaaaagcgactcggcggcagtaacaactagagtgaatgaagtgagcactgccactcccacgcacactactgtgcagtctgtgtgcgccaactgtgaattgcgaagtgcgaattccgtacttcggattgcggattccccccctcccttaaagcacttggaaaaccaacacctggcgcacgtacacgcacacgcacacttgtcctgctagcgaaagaaaaatccctgtcagctggtgcagcgattcccgaagcaactccgaggagcaggacaccgtggaaagaggcgacaactgaagctggtcttcagtgaacacagagtccagtgagcaagtgtgagcaagtaaacaagtgatacagcgcttggcaggagtcacagattatctgagcgaccacctggatgcccggctttcacctcaatgagatgggtgaaatggtcctggacgccatcgacgacatcggcgtggtcgatgtgtacgacttggcctccgacattggcaaggagtacgagcggatcatggaccgcttcggcacggacgccgtcagcgggctgatgcccaagatcatcaacaccctggagctgttggaggcgctggccacgaagaacgagcgcgagaacgccaccatccaggagctgcgcgataaggtggcccagctggagagcgagaagctggagaaggccgagttccggcggcggttcgacaaggagctggagctgatcgaagagcagtggcgcagcgagaccaacgagctggtcgatctcgtctcctcgctgcaagacgagaacaagcggctggtaaagcagactcaggatctgcagtcatcgtccgcccagagctccggcctgggggccagtctcaccgagagcattatcagcatgaccaaccacgagctgcacagcgctctttcggatactcaagtgctgcaacggctgaaggagcagatatacaagcagcgcgacgagttgaagcaccgcgagcgtgagctgcaggacaagtacagcgagctggagcacgtgagtgtccttaaggataggtgctcatattcccagctaacgtattcttaactaacccttcccagctcaatatccaggcggagcgtctgaaggcatcagagcgagatacccggcgccgccacaagctgatgcaggcccaagtgaagacgctgtgcgaggagcgcgccgactttcttgcccagctgcaggaccagagccgggagatcaaccaactgcgcaagcgattgggcctggccgaaaaggagaatgaggatttggtggcctcgtacgacgatggccagaacgatcccaaccggccgcggtacaccacgcgcgagctgaaagagttgattagcgagcgcgatgagctgctgaccaccatcgacaccctcaacgagcagctggcggagctgaagccaccaagccaggcgaagggcaagcggcagcgtcacttctccagctccgacgatagcgatgaggacgacgatggtcacgtggcggacaacgatgatgacgacgacgaggaggaggcggctgccgaggcgaacgagctggagccaccagcggccggagaaacgtgagtgagcccatttctgttacatcctttagttttgtggtccctcaccagagaaaacaagaatttatgaacgaccgcttgagtcaaagtgattaacgaacaagcattttcagcctgagtcattcttttgttgttgctcagtgctaacaatattcaaatagaccctatgatgcaaacgtttaattggcaggtgattcagagcttaaacgtatatatttgcgtgttttttcgcaaggtcagcaggtaactggtaaatggcacaattgggagtcaaacaaatcgttggattcggatctatatgttgattatttttgagtttttatagctaattactatccctagttatgattacttaagtacatacatagtgcatcgcttttcaggccacctggacacgatgcgcccgtgcagggccctttgccctacgagccggacgatgcgccctggaagaagagctccgagtcgggaatacgcaaattgtaagtggcattcaatcggcgtagagctctcgattcactttctgcattgtagcttccggaagctgttctcggacccgtcggacggcagcaacacgttcccgaaacgttccttggccacgctctccaagatggcgctgtcggccacgcccggttccgtttccgcctccgcagcggcgaagtaagcgccccttaaagcatccgagttggcgtgcatttcacttttcgtttgttttctgtttttccgtttccgttccattccgttccgttccgtttgcactgccccccgcacccctgcatcttgcatcctaatttattatttattttttacttttacgtcttacgattacgtttacatttagtttaggcaacagcctgtatctgaccctgtccctcgccattcacctgctccgcctgagctgtacatacatagtttacacactcgattgctgtgccctcataattctaagttgttatgcaattttgtttacgtaatacgcgttttattcgtaactcgtaacccctaactgtactggatatatttaatacgaatccactttgtatttttcgtaccttcgatttattctaacttgattaacgactaccacataagactccaaacataccacagcccccacatgtgcacgtgtttcaaaaatcaagatcgagaacgaaaacgagaacgaaaacgatatcgagattgtgcaaagattgccgagtgagtttttaatgaatttagacaaaaacaagcttagaaagacaaacagtcctcccaggtgcagatgcagagaaaacgattcggtgagatgaggagacgagacgaggaggactctggttctgggaccccagattttagaaagtctaggtagaacgggaagattttgcttcaattatccgtagtgtaactgtccctaagacccctgcatctatctagatcttcggctatcgccagcccgtatgagtattttagcactctcatagcagttgccccaagcggccttataaatatattacaaatttatcaaaatacgcaaaccttagagcgaaagaaacctaaaagtatatataattgatatataattagcaaacgttacaaccttagcgcattgtttgttgacttgaattgaactaactaacgaaaccaatctcagcatagtagattccattgatagcattcgattgcac

SEQ ID NO: 24023 - DNA, 1745 bp, DROSOPHILA
atgtgggaatcggcagcgaaaagcgactcggcggcagtaacaactagagtgaatgaagtgagcactgccactcccacgcacactactgtgcagtctgtgtgcgccaactgtgaattgcgaagtgcgaattccgtacttcggattgcggattccccccctcccttaaagcacttggaaaaccaacacctggcgcacgtacacgcacacgcacacttgtcctgctagcgaaagaaaaatccctgtcagctggtgcagcgattcccgaagcaactccgaggagcaggacaccgtggaaagaggcgacaactgaagctggtcttcagtgaacacagagtccagtgagcaagtgtgagcaagtaaacaagtgatacagcgcttggcaggagtcacagattatctgagcgaccacctggatgcccggctttcacctcaatgagatgggtgaaatggtcctggacgccatcgacgacatcggcgtggtcgatgtgtacgacttggcctccgacattggcaaggagtacgagcggatcatggaccgcttcggcacggacgccgtcagcgggctgatgcccaagatcatcaacaccctggagctgttggaggcgctggccacgaagaacgagcgcgagaacgccaccatccaggagctgcgcgataaggtggcccagctggagagcgagaagctggagaaggccgagttccggcggcggttcgacaaggagctggagctgatcgaagagcagtggcgcagcgagaccaacgagctggtcgatctcgtctcctcgctgcaagacgagaacaagcggctggtaaagcagactcaggatctgcagtcatcgtccgcccagagctccggcctgggggccagtctcaccgagagcattatcagcatgaccaaccacgagctgcacagcgctctttcggatactcaagtgctgcaacggctgaaggagcagatatacaagcagcgcgacgagttgaagcaccgcgagcgtgagctgcaggacaagtacagcgagctggagcacctcaatatccaggcggagcgtctgaaggcatcagagcgagatacccggcgccgccacaagctgatgcaggcccaagtgaagacgctgtgcgaggagcgcgccgactttcttgcccagctgcaggaccagagccgggagatcaaccaactgcgcaagcgattgggcctggccgaaaaggagaatgaggatttggtggcctcgtacgacgatggccagaacgatcccaaccggccgcggtacaccacgcgcgagctgaaagagttgattagcgagcgcgatgagctgctgaccaccatcgacaccctcaacgagcagctggcggagctgaagccaccaagccaggcgaagggcaagcggcagcgtcacttctccagctccgacgatagcgatgaggacgacgatggtcacgtggcggacaacgatgatgacgacgacgaggaggaggcggctgccgaggcgaacgagctggagccaccagcggccggagaaacgccacctggacacgatgcgcccgtgcagggccctttgccctacgagccggacgatgcgccctggaagaagagctccgagtcgggaatacgcaaattcttccggaagctgttctcggacccgtcggacggcagcaacacgttcccgaaacgttccttggccacgctctccaagatggcgctgtcggccacgcccggttccgtttccgcctccgcagcggcgaagtaa

SEQ ID NO: 24024 - protein, 443 aa, DROSOPHILA
MPGFHLNEMGEMVLDAIDDIGVVDVYDLASDIGKEYERIMDRFGTDAVSGLMPKIINTLELLEALATKNERENATIQELRDKVAQLESEKLEKAEFRRRFDKELELIEEQWRSETNELVDLVSSLQDENKRLVKQTQDLQSSSAQSSGLGASLTESIISMTNHELHSALSDTQVLQRLKEQIYKQRDELKHRERELQDKYSELEHLNIQAERLKASERDTRRRHKLMQAQVKTLCEERADFLAQLQDQSREINQLRKRLGLAEKENEDLVASYDDGQNDPNRPRYTTRELKELISERDELLTTIDTLNEQLAELKPPSQAKGKRQRHFSSSDDSDEDDDGHVADNDDDDDEEEAAAEANELEPPAAGETPPGHDAPVQGPLPYEPDDAPWKKSSESGIRKFFRKLFSDPSDGSNTFPKRSLATLSKMALSATPGSVSASAAAK

SEQ ID NO: 24025 - DNA, 7582 bp, DROSOPHILA
cactaccggccacatctgctaccacatcaccgcgcagcagggcagcggcgagggagccgtcttcaccggcgacaccctcttccagggcggatgcggccgcttcttcgagggcactcccgaggaaatgtacgaggcgctgtgcacaaagctctccgccttgccggacgccacaaaggtgttctgtggccacgagtacacgctgcagaacatgagcttcgcccgtcacgtcgagcccgacaacgaggtcatccagcagaggatcgagtgggccaagcaccggcgcgcctcccaggatcccactgtgccctccaccattggcgaggagaagtcctggaacccctttatgcgcgttcacgaagccaccgtgcagaagcacgctggcggagccaccgatcccgtcgtcaccatgggcaagctgcgcaaggaaaaggacaccttcaaagcctgatctatttcctcgaaagtttcgaaacttgtgatttaatattggattttaatggttaataaaattaacgatgtgtgtgaagtgcggacaatggatttttaattattcgcaatttatcggattaaaactttttttgttttattcaaattatgacataaatttatttcttcagctttatttaaaagaatttatttttggtattttggtctagcaacaccctagagaagagggtactggttgattccaactttattcatagagcaatgaacttaacaaattttttaaatccaaagattttagcaaatttcgtaaaatttgaatcacaacggttttggttaggcgttagtgccttttgggcatatcaaaaatacttttggtatttctagcgatctatcgccaacgatctggcaacaccgtctgccattaacacaaaaatcgcggcgtctctccaatgggattttgaaataaaaacaagttaacagcacggcgcgatgaacgcaaacaaacgcagaagttcggtgggttcttcgaaaattaattgattgagaagcgctcatggtagacctactcttcttgcagctgcgtaaggtgccgaccaaggaagatgaggcgaccacaacaacgtccgcgatcaaacaacaaatcaagcgacgcatcagtttcagtggcaagaagtccgtgaggtacgtacagtagatatatgcgatgtacaacgctcacccgccctccacatagggaattcgtaaacaccaaggagaccaacaactgggacgactcgtacgaggtgtcggaacaccatgctgaggacagctcgggatcgaagtgctgcagcacaggatcagcatcagtagcgagggtttccgaacatgccgacaaggagaacattcccctgcccagccactgcgagcgggaacatgtcgatctgtccgtgaatctgcaggccagcgtggatttcaccctgctgccctgcgaaatgatggacaaatcgaggaagacatcctcaatctctgctgtgtccttttgcatgacctccgaggagcgaaaactgttgcaaagcagtctcagcgaccgccagctggtagacaagaccatggatctgatatccggatctctcgtcaaccgccaccaaatcgcgtcgagcgtttgtgaggaatcctccatcaaagtggcaacaaacaaactggagaaggtggtattcacgccagctgtcaaggctgtgagtgactccttcatggacatcacgccattgggatttactgatcccaatcctgctgctcccgctccagctccagttgcaactctatatcctccaactcaacaaagtttaatggagctcgaagaggacagcattgtaagggagatgcgtgagtccaccaaaaaccagacaaaaactccggcgcagaaatcgcttttcatggacgtgggggagaccaagaataaaacccaacagggagctggaggtgcatccttctcattaaatggttagtattatctcagttaaatcccttcccaatagtttctaattagcaagttttcggttgtcacattattttgcagtttccaataaccgagatcgttcgccatcgaactcctttgagagccttaatagcaccatgaactttacgagagatgagtcgatgctgataccattcgacatgatttcggggaaaaacataagcaagaaactcaattttcgtcaactcaacgaagacctggagacgggtaagatccagatatttccgaacgggccaaaaacgccgaccacggatcgtaaggccaagaaaaatcggttttggtgcggccttgaagaggagagcgcgggagataatagtccaaagaaagatataagaagcatagtgccacgaggaatgttaaatttcagtgagaacatgaccttgacgccgacgaaaacaagtccagttggaaagaacaaggagaaactaaaggcggcggatgagaagcagaagtatcgactatcccaggcggatgagatgatgcttgacaatacaaacttcttggcccacgccagactaggcgacgaaacgcagtcgagaaatacgtcgaagaactcgacaagaagggagacaacttgcgaaacctcggaactgaatttggaatatcctacgttaagtcaggactttcaacccattccgagttccaagactcgtaaaactgattttatggctgaagaaatgcagctcagtcagacaaattaccctgctattcctgcattgaaaactgctacctcgcgtcgcaccttacatctcaatgaatctatggatcatgaaacaacgaaatccacgtacgttaggaaggagatatcggttaccacgcaggagactatctacgaaaaatccacaaccaacgagcagaacagcaaccaaaatcgcaacacatgggcctgcactaaaaccaagcgcagggcgacgcttttgatgcaggaaagcatggaggaggacatcattagccctctcaaaaacttacaattaaagcccaatgcggctcctatgaatacagggcaatccaaagtgaaccatacgctgtatctagcagaaccactggaggaagtggacataaaccaaagtaatatgttaccaactaaaaatgttgcccctagagaacaacttaaagcgaggaaaacgctgctattagaggaacctatggaagaggaaatgagcagtaacattggttacaattccaaaagaaagactctccacttagcggaacctctggtggtggagggagaggatttcattttggaaaagcacataccaataaaagtagtcgcgcatcaagaaaacaaatccaagggtagacaaactcttttgttcgaggagcccgtggaggaggaaatatttcacaatgcgaaagatttaccggaatgtgctttaaagggaaacaagactggacctcagaaatacagtcaattaaaccaggggaagagtttcacttcgcaaagcagatccaaagctaggcaaaccctcctgatcgaagaacccatggaggaggacacggaatttaacaataaatataatattgccaaacctggagagaaccacataagaaagatcgctaaatccagacaaactctccttttgtcagaacctttagaggaggaaatgtgtcttcccccgccaaagaataagtcaatagtgtcgcaaaaaacaatagataaatcaaccgagcagcagcgatcaaaatcgaggcacacgctattattatccgaacctattgaagaagaacatattcagcaggacttgccagctgaaaaggaggatagtttagctagacagcaaagattcaagccaaggcaaacgctcatcatggcagagcccatcgaagaagatgttggagaaacggaacgtagggtgcaaactaacatcactggttcgtcaacttccagaccaagacacactcttttgatgtccgaaccgattgaagaagaactaactaacgaagataaaagtacgaatgccagcacaaatagaacgttaagatcgaggcgaaccattttgatggcggaaccgatagaggaagagggcaataagtctatcgctgaaaaaataggtcaatttactaaagaatcttctgaagaagcggtatttcaaacttccaaatctcgtcaaactctgctgatggcagagcctatagaggaagatgttttcaatcagtcaaatgatcagccaaagccacttcctatatctaaggataaaatcactaggaagacctctagacgacacacgcttattactgccgaacccattgaagaggatttgagtgttcgtaagccgctggaaaattcaaaggagtcatctttgaccgccagaattattcagtcattcgccgagcccattgaaaatgccctattttcaattactgatcaaatagctaaacagcaattttccgaatcggttcaaactcctcccaaggaacccctaaactatctccaccagaagccgcggaataccctcatctcgcatgaaactattcaggaggatttagaacccgtaaatgaaaactcatcagtggggcctctgaggtccaggtacagaaagacccttatcatggcagagcccattgaagaagatgttaataaccacaatatgaccaaacaaaatgggatctgtgactctttaaatgttccacagtccggtggatatatggctgccaaaacaagacaatccgtgcatataccggtacccattgaggaggatcatattccgggccaacagcaaagagaatccgaacctgcggtgaagggcagaactacgctgctgactgagtccatagaagaagatgtacccgcgcaacacactcgaatttctaaaaataaatcaatgggctcgaaggtttcggcggagcctatcatcgaggatttggattccaacagaccagaaatttcacaatccgtggaagagactttaccccaaagaagccaggttcctgatgttccgtcatccagaagacatacgctacttttatcggaacccatggaagaggatgaggggatattcggacataactaccccataaggaccaagcaccaaatttccgaaaagctagaaaaaccagaaggacccattcattcatctaaaaattccgtagaaaacgaagagataggcactcctcccagtgccaagactcagcaatccattgctatgtccgaatcaatggactttcaaagcccgcagtttaggccgaggggtccggactttaatgcaatcacgccgggaatgtccttgactgaatttgtggatcaggaagagatgtgcaagaccccgattcacaaaagagttctcctgacttcccatcggaaaaaattgtccatgtaccaaccagtgccgatagaccttgaggcgaatgcctccggctttggaactccaaaaaatctcgtccaactaaagcgcctacccacgcatctcacgcccaaccttccggagtccaagaaacgaaacacgcatctgtttccgaatagcaacatggacatcgaattggaggaggatcaggaaggttcttgggggacaaaaagtattcagatgcacacagggacaagtaaatcacgcaggacctacacggtagaccagttggacgcgtcggtgcagccagtaagggactacaatcctgtagtgactgagatgaacaaacagggtggtcttaatatgctggagctgccacgaaaatcgacctataacatggatctagaggagaaacccatcactatctccgatgttaataattacttccatgagcaaaaggagcagcagcgccagtctagcgaaagagagagcggcagctccaacgatagaaccttcaagagctacgcagcaacaatctcaaaattcatcaatctgaccgggaacacaaccatctttgcagccgcagaagatttgggtggtgaggggaaggaccagccccaccagatagataacgagcacctaagtctggtttccacgctggcggaggaaacagacgatgatggcgacgagaaggaggaggaagaagagcagaagcaaaaacagcatctcttacaacctgaaatctgcgaggctcaactgaattcaatggtaaaagctggcagcgaaggctcctgcaaaaagtgcaggaattgcaatcatactttgagcgaaacaaggctaagtagcgagtcatttgtcctgccacctcggaaattgtgggacttttcaaggctacagcaacggttgcgcaatataaggcagaggccgtcgtggaaggaagtgaacacttactgggagatcgaggaggaggctcgtctgtccaggaaccaagactccgacgattcaatggagcagaccagggtggaggaggaggccaccaagtggaacaaagcggcgcttcttgaaatgtgcaagctgtgagtaccgaatacacttggaattttgaatcattttttaacatttactatttctacaacagaagaacagaagagaaggacatagccatgcccccggaatccttctttacgagactcaaacgtttgctaaccgaacagcagcccaactggatcttcgactaccagcgtaaagtgtcccagcaaatgatattttacaaccgacagctgaccacgatccgaatcgtggtgaactaccaaatcgaagacttagtagaggagtccaccattagcgtgtgttccattcaactagacaatgacgtgcccactcccaaggaccaatggtcatcgcgtgaacactttttaaacttccacctaagtctccgcctgccgatgaatcctagcgacgagatcgagggcagtgatgagacggctttcttgaaatttctcaacggcattgatcgcagaattgcagaagtcaagcaaaagttacacaaagttttagatcttctagcgcagaagagagcgaggctaacaaggtataagcttctccaaggtgtatctcaatacattactaatttaagtgatccctttttagagaagcaaatcgaactattgtcagaaagatagtgcgaaagtgcatcgaccaggaacccatcgtgcgtctcgagaagatcactttccttattgaaatcggtaatattgaggacgtttccttcacggacatcctacgccccgaactgcatctcttcaatgaaaacattcagtatctgcccaagggaattcctttcctcgaagcctttctcaccgatcccgagcagtaccttagaaaataaatgcgtatgttagactaccttttaaattgttttaaattaaaataaatgcattcgtctgcgttttttaacgaattcacattgaaagtgtatgcgaatgggcaaggatttccactgaaatcgagcttatttataagagcaaccattactataagtcctttgaacgaaataaaacaaataaagagcaaggaaggattttgtttgaatttaagtttactcgcttctcgtactcgtttacaataattaaaataataataaaacttaaaagtaatttagtttcctcttgcgtggctgctgaaaattcgtttcgttcatccggatcacttggaagctggaactagttgagtgcgtgtttgcttgcatttgctttctttatgtttatttcacgaagacaacacagacatattaagatccaaaatatatatacgttatatatatatatatatatatatatat

SEQ ID NO: 24026 - DNA, 5880 bp, DROSOPHILA
atggtagacctactcttcttgcagctgcgtaaggtgccgaccaaggaagatgaggcgaccacaacaacgtccgcgatcaaacaacaaatcaagcgacgcatcagtttcagtggcaagaagtccgtgagggaattcgtaaacaccaaggagaccaacaactgggacgactcgtacgaggtgtcggaacaccatgctgaggacagctcgggatcgaagtgctgcagcacaggatcagcatcagtagcgagggtttccgaacatgccgacaaggagaacattcccctgcccagccactgcgagcgggaacatgtcgatctgtccgtgaatctgcaggccagcgtggatttcaccctgctgccctgcgaaatgatggacaaatcgaggaagacatcctcaatctctgctgtgtccttttgcatgacctccgaggagcgaaaactgttgcaaagcagtctcagcgaccgccagctggtagacaagaccatggatctgatatccggatctctcgtcaaccgccaccaaatcgcgtcgagcgtttgtgaggaatcctccatcaaagtggcaacaaacaaactggagaaggtggtattcacgccagctgtcaaggctgtgagtgactccttcatggacatcacgccattgggatttactgatcccaatcctgctgctcccgctccagctccagttgcaactctatatcctccaactcaacaaagtttaatggagctcgaagaggacagcattgtaagggagatgcgtgagtccaccaaaaaccagacaaaaactccggcgcagaaatcgcttttcatggacgtgggggagaccaagaataaaacccaacagggagctggaggtgcatccttctcattaaatgtttccaataaccgagatcgttcgccatcgaactcctttgagagccttaatagcaccatgaactttacgagagatgagtcgatgctgataccattcgacatgatttcggggaaaaacataagcaagaaactcaattttcgtcaactcaacgaagacctggagacgggtaagatccagatatttccgaacgggccaaaaacgccgaccacggatcgtaaggccaagaaaaatcggttttggtgcggccttgaagaggagagcgcgggagataatagtccaaagaaagatataagaagcatagtgccacgaggaatgttaaatttcagtgagaacatgaccttgacgccgacgaaaacaagtccagttggaaagaacaaggagaaactaaaggcggcggatgagaagcagaagtatcgactatcccaggcggatgagatgatgcttgacaatacaaacttcttggcccacgccagactaggcgacgaaacgcagtcgagaaatacgtcgaagaactcgacaagaagggagacaacttgcgaaacctcggaactgaatttggaatatcctacgttaagtcaggactttcaacccattccgagttccaagactcgtaaaactgattttatggctgaagaaatgcagctcagtcagacaaattaccctgctattcctgcattgaaaactgctacctcgcgtcgcaccttacatctcaatgaatctatggatcatgaaacaacgaaatccacgtacgttaggaaggagatatcggttaccacgcaggagactatctacgaaaaatccacaaccaacgagcagaacagcaaccaaaatcgcaacacatgggcctgcactaaaaccaagcgcagggcgacgcttttgatgcaggaaagcatggaggaggacatcattagccctctcaaaaacttacaattaaagcccaatgcggctcctatgaatacagggcaatccaaagtgaaccatacgctgtatctagcagaaccactggaggaagtggacataaaccaaagtaatatgttaccaactaaaaatgttgcccctagagaacaacttaaagcgaggaaaacgctgctattagaggaacctatggaagaggaaatgagcagtaacattggttacaattccaaaagaaagactctccacttagcggaacctctggtggtggagggagaggatttcattttggaaaagcacataccaataaaagtagtcgcgcatcaagaaaacaaatccaagggtagacaaactcttttgttcgaggagcccgtggaggaggaaatatttcacaatgcgaaagatttaccggaatgtgctttaaagggaaacaagactggacctcagaaatacagtcaattaaaccaggggaagagtttcacttcgcaaagcagatccaaagctaggcaaaccctcctgatcgaagaacccatggaggaggacacggaatttaacaataaatataatattgccaaacctggagagaaccacataagaaagatcgctaaatccagacaaactctccttttgtcagaacctttagaggaggaaatgtgtcttcccccgccaaagaataagtcaatagtgtcgcaaaaaacaatagataaatcaaccgagcagcagcgatcaaaatcgaggcacacgctattattatccgaacctattgaagaagaacatattcagcaggacttgccagctgaaaaggaggatagtttagctagacagcaaagattcaagccaaggcaaacgctcatcatggcagagcccatcgaagaagatgttggagaaacggaacgtagggtgcaaactaacatcactggttcgtcaacttccagaccaagacacactcttttgatgtccgaaccgattgaagaagaactaactaacgaagataaaagtacgaatgccagcacaaatagaacgttaagatcgaggcgaaccattttgatggcggaaccgatagaggaagagggcaataagtctatcgctgaaaaaataggtcaatttactaaagaatcttctgaagaagcggtatttcaaacttccaaatctcgtcaaactctgctgatggcagagcctatagaggaagatgttttcaatcagtcaaatgatcagccaaagccacttcctatatctaaggataaaatcactaggaagacctctagacgacacacgcttattactgccgaacccattgaagaggatttgagtgttcgtaagccgctggaaaattcaaaggagtcatctttgaccgccagaattattcagtcattcgccgagcccattgaaaatgccctattttcaattactgatcaaatagctaaacagcaattttccgaatcggttcaaactcctcccaaggaacccctaaactatctccaccagaagccgcggaataccctcatctcgcatgaaactattcaggaggatttagaacccgtaaatgaaaactcatcagtggggcctctgaggtccaggtacagaaagacccttatcatggcagagcccattgaagaagatgttaataaccacaatatgaccaaacaaaatgggatctgtgactctttaaatgttccacagtccggtggatatatggctgccaaaacaagacaatccgtgcatataccggtacccattgaggaggatcatattccgggccaacagcaaagagaatccgaacctgcggtgaagggcagaactacgctgctgactgagtccatagaagaagatgtacccgcgcaacacactcgaatttctaaaaataaatcaatgggctcgaaggtttcggcggagcctatcatcgaggatttggattccaacagaccagaaatttcacaatccgtggaagagactttaccccaaagaagccaggttcctgatgttccgtcatccagaagacatacgctacttttatcggaacccatggaagaggatgaggggatattcggacataactaccccataaggaccaagcaccaaatttccgaaaagctagaaaaaccagaaggacccattcattcatctaaaaattccgtagaaaacgaagagataggcactcctcccagtgccaagactcagcaatccattgctatgtccgaatcaatggactttcaaagcccgcagtttaggccgaggggtccggactttaatgcaatcacgccgggaatgtccttgactgaatttgtggatcaggaagagatgtgcaagaccccgattcacaaaagagttctcctgacttcccatcggaaaaaattgtccatgtaccaaccagtgccgatagaccttgaggcgaatgcctccggctttggaactccaaaaaatctcgtccaactaaagcgcctacccacgcatctcacgcccaaccttccggagtccaagaaacgaaacacgcatctgtttccgaatagcaacatggacatcgaattggaggaggatcaggaaggttcttgggggacaaaaagtattcagatgcacacagggacaagtaaatcacgcaggacctacacggtagaccagttggacgcgtcggtgcagccagtaagggactacaatcctgtagtgactgagatgaacaaacagggtggtcttaatatgctggagctgccacgaaaatcgacctataacatggatctagaggagaaacccatcactatctccgatgttaataattacttccatgagcaaaaggagcagcagcgccagtctagcgaaagagagagcggcagctccaacgatagaaccttcaagagctacgcagcaacaatctcaaaattcatcaatctgaccgggaacacaaccatctttgcagccgcagaagatttgggtggtgaggggaaggaccagccccaccagatagataacgagcacctaagtctggtttccacgctggcggaggaaacagacgatgatggcgacgagaaggaggaggaagaagagcagaagcaaaaacagcatctcttacaacctgaaatctgcgaggctcaactgaattcaatggtaaaagctggcagcgaaggctcctgcaaaaagtgcaggaattgcaatcatactttgagcgaaacaaggctaagtagcgagtcatttgtcctgccacctcggaaattgtgggacttttcaaggctacagcaacggttgcgcaatataaggcagaggccgtcgtggaaggaagtgaacacttactgggagatcgaggaggaggctcgtctgtccaggaaccaagactccgacgattcaatggagcagaccagggtggaggaggaggccaccaagtggaacaaagcggcgcttcttgaaatgtgcaagctaagaacagaagagaaggacatagccatgcccccggaatccttctttacgagactcaaacgtttgctaaccgaacagcagcccaactggatcttcgactaccagcgtaaagtgtcccagcaaatgatattttacaaccgacagctgaccacgatccgaatcgtggtgaactaccaaatcgaagacttagtagaggagtccaccattagcgtgtgttccattcaactagacaatgacgtgcccactcccaaggaccaatggtcatcgcgtgaacactttttaaacttccacctaagtctccgcctgccgatgaatcctagcgacgagatcgagggcagtgatgagacggctttcttgaaatttctcaacggcattgatcgcagaattgcagaagtcaagcaaaagttacacaaagttttagatcttctagcgcagaagagagcgaggctaacaagagaagcaaatcgaactattgtcagaaagatagtgcgaaagtgcatcgaccaggaacccatcgtgcgtctcgagaagatcactttccttattgaaatcggtaatattgaggacgtttccttcacggacatcctacgccccgaactgcatctcttcaatgaaaacattcagtatctgcccaagggaattcctttcctcgaagcctttctcaccgatcccgagcagtaccttagaaaataa

SEQ ID NO: 24027 - protein, 1959 aa, DROSOPHILA
MVDLLFLQLRKVPTKEDEATTTTSAIKQQIKRRISFSGKKSVREFVNTKETNNWDDSYEVSEHHAEDSSGSKCCSTGSASVARVSEHADKENIPLPSHCEREHVDLSVNLQASVDFTLLPCEMMDKSRKTSSISAVSFCMTSEERKLLQSSLSDRQLVDKTMDLISGSLVNRHQIASSVCEESSIKVATNKLEKVVFTPAVKAVSDSFMDITPLGFTDPNPAAPAPAPVATLYPPTQQSLMELEEDSIVREMRESTKNQTKTPAQKSLFMDVGETKNKTQQGAGGASFSLNVSNNRDRSPSNSFESLNSTMNFTRDESMLIPFDMISGKNISKKLNFRQLNEDLETGKIQIFPNGPKTPTTDRKAKKNRFWCGLEEESAGDNSPKKDIRSIVPRGMLNFSENMTLTPTKTSPVGKNKEKLKAADEKQKYRLSQADEMMLDNTNFLAHARLGDETQSRNTSKNSTRRETTCETSELNLEYPTLSQDFQPIPSSKTRKTDFMAEEMQLSQTNYPAIPALKTATSRRTLHLNESMDHETTKSTYVRKEISVTTQETIYEKSTTNEQNSNQNRNTWACTKTKRRATLLMQESMEEDIISPLKNLQLKPNAAPMNTGQSKVNHTLYLAEPLEEVDINQSNMLPTKNVAPREQLKARKTLLLEEPMEEEMSSNIGYNSKRKTLHLAEPLVVEGEDFILEKHIPIKVVAHQENKSKGRQTLLFEEPVEEEIFHNAKDLPECALKGNKTGPQKYSQLNQGKSFTSQSRSKARQTLLIEEPMEEDTEFNNKYNIAKPGENHIRKIAKSRQTLLLSEPLEEEMCLPPPKNKSIVSQKTIDKSTEQQRSKSRHTLLLSEPIEEEHIQQDLPAEKEDSLARQQRFKPRQTLIMAEPIEEDVGETERRVQTNITGSSTSRPRHTLLMSEPIEEELTNEDKSTNASTNRTLRSRRTILMAEPIEEEGNKSIAEKIGQFTKESSEEAVFQTSKSRQTLLMAEPIEEDVFNQSNDQPKPLPISKDKITRKTSRRHTLITAEPIEEDLSVRKPLENSKESSLTARIIQSFAEPIENALFSITDQIAKQQFSESVQTPPKEPLNYLHQKPRNTLISHETIQEDLEPVNENSSVGPLRSRYRKTLIMAEPIEEDVNNHNMTKQNGICDSLNVPQSGGYMAAKTRQSVHIPVPIEEDHIPGQQQRESEPAVKGRTTLLTESIEEDVPAQHTRISKNKSMGSKVSAEPIIEDLDSNRPEISQSVEETLPQRSQVPDVPSSRRHTLLLSEPMEEDEGIFGHNYPIRTKHQISEKLEKPEGPIHSSKNSVENEEIGTPPSAKTQQSIAMSESMDFQSPQFRPRGPDFNAITPGMSLTEFVDQEEMCKTPIHKRVLLTSHRKKLSMYQPVPIDLEANASGFGTPKNLVQLKRLPTHLTPNLPESKKRNTHLFPNSNMDIELEEDQEGSWGTKSIQMHTGTSKSRRTYTVDQLDASVQPVRDYNPVVTEMNKQGGLNMLELPRKSTYNMDLEEKPITISDVNNYFHEQKEQQRQSSERESGSSNDRTFKSYAATISKFINLTGNTTIFAAAEDLGGEGKDQPHQIDNEHLSLVSTLAEETDDDGDEKEEEEEQKQKQHLLQPEICEAQLNSMVKAGSEGSCKKCRNCNHTLSETRLSSESFVLPPRKLWDFSRLQQRLRNIRQRPSWKEVNTYWEIEEEARLSRNQDSDDSMEQTRVEEEATKWNKAALLEMCKLRTEEKDIAMPPESFFTRLKRLLTEQQPNWIFDYQRKVSQQMIFYNRQLTTIRIVVNYQIEDLVEESTISVCSIQLDNDVPTPKDQWSSREHFLNFHLSLRLPMNPSDEIEGSDETAFLKFLNGIDRRIAEVKQKLHKVLDLLAQKRARLTREANRTIVRKIVRKCIDQEPIVRLEKITFLIEIGNIEDVSFTDILRPELHLFNENIQYLPKGIPFLEAFLTDPEQYLRK

SEQ ID NO: 24028 - DNA, 2423 bp, DROSOPHILA
ttagcggtgtaatttgatttaacaaaaaaaaactctttaaaatggtaagttacgatattataactttgattaaactaaaaattaatggagcacattctgaattttttatataaaatttactgttgactaaatataaatataaatataattatttacccttgctatgaaaaaacacaatttatataaatataaattccacaagcgataaagtataaagtattaagtttgtaaagtggttggaaataagctgtcaagggaaagtgatttttgatatatttttttttttgatatagatagtgtctatctacgtatgagacaaataggaacttaattgtcatcactgccgttaatctgcagatcattttcaaaacattaaaatgtagacgacaacgtgcgctatgtggattttaataaccagacagtgaagaagatattaccttaaaattttttaatttatcattaacttagtatttattgcaataacacccgctacccgttactcgtagagtaaaagggtatactctattcgttaaaaagtatgtaacttgcagaaggaagcgatttctaccacataaagcatagacatacattctttatcaggaacaatagccgagtcgatctagccatacatataagggatatattgttctacatcgctaaagtagagtcttcgaacatttatggtaaatcagttgcatacggacagacgggctaccgagcaaaagttgacttcgttacaaaaaatgcacataagaaaacgtaccctttttgtgcatgaaagacatgcatctgtatgcaatatatttttggaaatacaacatacccgtccaccaaacgagtataattatgacattactcttgtagacaccaggctgacatgaacatatagttcattatcttaaagattttattatatatccatacttctttcaggccgatggagaatacgacaaggaacaattgagaagtagtataaaattaaacttttatttactatttaaaaaacgacgtattagtccttaggaacgccttcaaggctttcgaccacgacggtgcaggatcgatcgaacatgctgatgtatctagcattcttgaaattttgggtcagaaattagaaccacctgcggtaaaggcccttattaaagaggtcgataaaggaacaactggtaaattggattttagccagttctgcaaactggcagctcgctttattgaagttgaggaagatgtgggagctcttcaaaatgagttaaaagaggccttccgtgtatatgataaagaggggaaaggatacctgacagttgcaacactaagaggcattcttcacgaattggacgataagctttctaaccaagacttagatatgattatagaagaaattgatgcggatggatccggtacggttgattttgacggtaagtagtttaatataattaatcaaacattcaataataacgttttcattgcagaattcatgcaagttatgacaggtaatacatgatacccttaaacaaatattagttccacctatgtaaaaaaacacattcaaacaaaacaatattattctgaccttctttacggtttgccgtttaagggtgaagtgacgataccacccacgtgcaaaaaataatcaacttgtatgactacaattgatattgcatatattgcataaattataaattcataatataaaatttacgcaaacggcgcccgtttttctaaaataattcctgtccaccaaaacattttctattaaacgatttattatcgtattgccttgtaaggatgtgttttttttttatacttggtttttaatcgtcaacataacggcataagcaacatcagttatgaccgtaaaatgttgcttatgccgttagacgattaaaaactaagtgtgctaaggtctctatacctaagacaagagagaagaccacagtccagttatgaaatcctaaagaaaaatgaaaaaaaaaaattgggcgtggcagtttgagcggcttgtaggcgttgaagtgctgatggcaaaaagttttttggcaaatcgatagaaattgtcaagcttattacaaatttaaaaatattataacatatatttttttttttttgggtatgcgtgccacgcatatgcatggcaatggctgggatccaacgtagggtcttttctttaagcttttccgggtttaaggttcttaggaccacgattcctgtgatcgattctgatccatatgggcatgtccgaatgtatgtccctaaacatctccgcttctggggagaatcctctgttacatccaatacctcgtgtttttgtagggttgcgttaatcgctgctttaccgtgccactttttatacaacatgcaaaatgcaacatttggtacaaaaggaatcaatattatttactgacgtgccaaatgttcattggcaa

SEQ ID NO: 24029 - DNA, 423 bp, DROSOPHILA
aaaaacgacgtattagtccttaggaacgccttcaaggctttcgaccacgacggtgcaggatcgatcgaacatgctgatgtatctagcattcttgaaattttgggtcagaaattagaaccacctgcggtaaaggcccttattaaagaggtcgataaaggaacaactggtaaattggattttagccagttctgcaaactggcagctcgctttattgaagttgaggaagatgtgggagctcttcaaaatgagttaaaagaggccttccgtgtatatgataaagaggggaaaggatacctgacagttgcaacactaagaggcattcttcacgaattggacgataagctttctaaccaagacttagatatgattatagaagaaattgatgcggatggatccggtacggttgattttgacggtaagtag

SEQ ID NO: 24030 - protein, 140 aa, DROSOPHILA
KNDVLVLRNAFKAFDHDGAGSIEHADVSSILEILGQKLEPPAVKALIKEVDKGTTGKLDFSQFCKLAARFIEVEEDVGALQNELKEAFRVYDKEGKGYLTVATLRGILHELDDKLSNQDLDMIIEEIDADGSGTVDFDGK

SEQ ID NO: 24031 - DNA, 3004 bp, DROSOPHILA
tcccaggccacaggaggttcagataccttgaaatacaaattccattgtttttaaaaatgtagtttttaatatttttgtgtaacctgcaatttattcaatgcaagctgaaagttaaaagttttcggaggttttggaaaacctagatattttagggcaatatataaagagaatatataatatatatataataataaataatatatattatataatatataatatatataataaagaataaactaagctatcttttaaagtttgtacctaataacttaaatacctccacatttacattgatattttatggtatatggtatatggtatacgtatacgcacttttatgtaaaccggttaacagttttgtaataaaattaacagtgtcggtgttagccgccggtgaagctgttattacagcgctgttggccgcctcagataatcttaacgaaactggcgtgcagcacgatagattcgaatccgctgtacatccatttccccttagccaaacgaaacgcactttttaaccttcaaaccagagattcgatgagtgctctcatttgagtgctgcatactcttctggttataaaaaggctaaacataccattgagaacaaatattgatggtaacttaacagaagcacaagagtattaaaagtatattattatatttccttgcatatctttttctataacgctgtcatagactggaaatctatatgattcggagtgattcttttgcaattaaattaacctaaactacataagtagcacctattattctagcaaaatagctatatttccagctaaggccagactatcagcaaattagctaaatggacaacgctggtgcgcgaccgctctctctctcacaaatcatgcgcagtatcagaataaatgagagagcgacgcattttaactgaaaaagagagaatatgaagcatattgtttttctctcatatttgcagcgacttgcgctctctagctctctctctctctcccacagactcggttcgtcgttcgttttgagctcattcgtcttttgaaattcgcctcgcacggtcggaattgtcgtcgcggaaaatgtggatatacgaaaagtagcgaaaacagcgcgttgcttcagtcgaaaaatatagaaaatcgtcgggaatcaggcagcgaatgatacctgcgtctaacgaattctgacatagttttacgatcgtcgcgcaaacaaacacaccgcgtcaattcaaaaacaccgtttttcccgtcgcgttcctgtgctccccatcgtgtgtgtcccgtgttttcagtgtacgactactgaaaaggcccaagaaatattattgcggcctcggcggcagattgtgattgagctgggaccagcagcccgcccgcagattaaccgtctggaaatggcccagtagaaatgtttttgagtgcagtgcgtccagtgccatccgcagccgcatccgcatcagcaagtgcatgaataatcgcgagtagccaaacgcataccaagtctcttcttcctgctcccgtgcggagtcctcctcctcttcttcttctcctgtccggctgtctggccaaaagcccccaagccgccaagattaagttctcaaagcagcacgcccatcacgcgtaccgccacacggacaacatctacgacggcggcacggacacggacgacgacgaatgtccgctggaggcgaccgccatgaatccctacgagtatgagtcgactctagactgccgcgacgtgggcggcggccccactccggctcacgcccacccacacgcccaaggacgtacgctccccatgagcggccacgggcggccgacgacggacctcggtccggtccacggcagccagacgctccagcaccaaaaccaacagaacctgcaggccgcccaagccgccgcccagtcgtcccactacgactacgagtaccagcacttggcccaccgtccgccggacacggccaacaacacagcgcagcggacacacggaagacaaggtgagtgagtatgccgaccccagtgggcagtgtggtcagtggaatcaaaccgaaagctacaactccggaatttagtggcccaaatagagcgtctggaagtgatttaaaaaagtttaggatgtgcggaaatactttacaatgcataaattggattaaatgaatttgtaacttaaattatgtttggaaatcagtgaaaaatataaaagcgtttctgataagagtaccatgctgcttaaacatactgagatccgttttccatcgctttcgtatacatcaccgaattctttgacagacgtgcctaaatcaaatgagctaattgatatcaatattttaagaaaatggagaacatttggttattagctacgtacgttgagagaggatagactggttctaaaaccattcattgctacttggcatttgtgtatttttagtattagtcaaaaagttaaaagcaaattatgtatgtgcaaaaggattccaatgtttctcaaacgcaattcaagtgagctaccgtgtcatctgctagttacagaaattattccttttttcggtgacaaaatcgtgcgggttgcgaattccagcaagttgcgacaagtttgaacaaattacgccccttatcggcgaatgcggccaaacattttgcctaaattaaacaaattaaggcggcagtcccaatgggagtgggatttggacttcgcctgacattgagcccgctcttgtttcgcatttcataatttccctttttccgactgagcgcgttttttcacgatttgtctgattaataaagcgagagccacaatagccagcgcacaaagcgcagttgaaaaggatactctctgtcagccgacaggaattagggggaatcccagacgatgtccccgctctgtgaaaaaatgcctgcggctggaaaatgctcgagacttctgagaggagttgggttacagtagcctgcctgattgtacactgacagaaatcagggcactaagttatgttgatatagattttgaa

SEQ ID NO: 24032 - DNA, 1004 bp, DROSOPHILA
ctcggttcgtcgttcgttttgagctcattcgtcttttgaaattcgcctcgcacggtcggaattgtcgtcgcggaaaatgtggatatacgaaaagtagcgaaaacagcgcgttgcttcagtcgaaaaatatagaaaatcgtcgggaatcaggcagcgaatgatacctgcgtctaacgaattctgacatagttttacgatcgtcgcgcaaacaaacacaccgcgtcaattcaaaaacaccgtttttcccgtcgcgttcctgtgctccccatcgtgtgtgtcccgtgttttcagtgtacgactactgaaaaggcccaagaaatattattgcggcctcggcggcagattgtgattgagctgggaccagcagcccgcccgcagattaaccgtctggaaatggcccagtagaaatgtttttgagtgcagtgcgtccagtgccatccgcagccgcatccgcatcagcaagtgcatgaataatcgcgagtagccaaacgcataccaagtctcttcttcctgctcccgtgcggagtcctcctcctcttcttcttctcctgtccggctgtctggccaaaagcccccaagccgccaagattaagttctcaaagcagcacgcccatcacgcgtaccgccacacggacaacatctacgacggcggcacggacacggacgacgacgaatgtccgctggaggcgaccgccatgaatccctacgagtatgagtcgactctagactgccgcgacgtgggcggcggccccactccggctcacgcccacccacacgcccaaggacgtacgctccccatgagcggccacgggcggccgacgacggacctcggtccggtccacggcagccagacgctccagcaccaaaaccaacagaacctgcaggccgcccaagccgccgcccagtcgtcccactacgactacgagtaccagcacttggcccaccgtccgccggacacggccaacaacacagcgcagcggacacacggaagacaaggtgagtga

SEQ ID NO: 24033 - protein, 102 aa, DROSOPHILA
MNPYEYESTLDCRDVGGGPTPAHAHPHAQGRTLPMSGHGRPTTDLGPVHGSQTLQHQNQQNLQAAQAAAQSSHYDYEYQHLAHRPPDTANNTAQRTHGRQGE

SEQ ID NO: 24034 - DNA, 2717 bp, DROSOPHILA
gcaggcagagctcttcccgcagaatatggttcgatttgataggccccgtgaggctttgcttaaaacttttgaccagttggactccagcaactgggaagtaaacgtgtccggcttgaaaagcatggtacgtttgattcgctaccatgccgagacattggacaatcagatgcacatgacctgcatccagctcacccgctcagtccgaaatctgcgctcccaagtagctcgagcttcctgccaagcagctgcggagctgttctcgctgaagtccaccagccttcagcaggaatgtgacgacttggtatgtgccctcctgcaccgcaccgccgacacgaataggtttctccgtgctgacgccaatcgagccctggagtcgatggtggaccatgctcagccgcagaagattctaaacattcttgcgacaaaaggagctcaacatcaaaatgccttggtgcgcacgacatcagcaaagctgctcttcagactagttgagcgtctgggcagtgaccggatctatgcaatgggccgcgagagccgcgacaagttttttgtggttggagcgaatcttcttctcgaaggcagtctagagacccgcagctacgcaaagtccttgttccgggctttatccgaaaatcataattatcagcggctgcttttggaggtgataccaccacgcacctacagaaatgttgaaaagactcttaggagcatcacacgttgactatggcagatcaagatctgtacagcataggtttagtatccaaagccactggaagcttacaggattagggtgttcgctaataaattagagtcaagtattaagaataattatacagtacactaataaaacacaatacaccacagagtaaactgcttcatttgatacataattttctgcagatatccagctcattaaacgattaaagacggtaacttttgattttggttttgagtaactgaaggactagggtatacataaagacgaaaatgtggtgaaatcttaaagcaatctgcgtttgttgttggagcgttggtccgatcttctgctgcctccctgcatgtgctggtggtgttgctgtggttttagccggttgcgttccattacggagctgtcgctccggcgccgttgatcggcgttgtgtccaaaaggattgcgatcgtacggcttgccgttatgcaaactgtgtcgggcgtgacgcagtggcgatggctgcggtagagcctccatcatgaactgattgcgcagacgactttggttgtaggcaggtagctgcttgccgccctgctgcttgatggtgactttcttttggaacagttcaaggccctggtacaagtctagggcaaaaggcaccgcacacaggcgttggtatgtgacaaacccgaaattccggggacgcccattgttatcggtcggtatccgcactccttcgatggggccagcttgcaggaacacctcgtaaaggatctcctccgtcacgcgctcgtcgagattcccgcagaacagagtccgttgctcctcgtcctcctcctcatcgtcgtcgtcctccagttgcccaaccaactggtcaccgttttcattgggcaggaaagggtaaattggctgctcttggtgctggccagatggaataccgtatctgtaaccatctatgttcgtttccgaaatcgtcatgaccgacgcaccactatacatttgctgcattagtaactgcaagtccatttatcttcgacaagtaaacacacaacaaatcggacgtagtgatggcagaagataacatcggtaatgtgtgagctgtttaagaactagttactagcgcgaactacctaagaactagatcctagtggggagtttatagtctttaaaatcttcggttattaagaactagttcctagtggggagtttcgagtctttaaactttcccgtaatgaggtgaaatataactttgcttccgcggtgcataagcattgctgataacaaagacattttaattattcgtcccgccggctgatgttctcgattgttgtcgatgccgcctctttttattgagcttcccttgtagtgctaccttcgcacacttcatctatcaactcggcgatataaatcaaaccgaatatttactcaggggactctggatacaagcacaaacacaacgccacaaattcaattgagaggtgagaattcgcgacggaccgacccaagtgtacccttcattcatcaacattattgaatgtttgggcttaaactgtttgggctgaaaaaccttaaacttttaattggcaatttgaacactacaatttttcgtacaaataaaatggaagtgggaaaagatgatcgggacattgtttaaagaagagaagctttcaagctcatcgagtgagtactgagtacgttctatgagcgttatcaatgccacttgagctaatatttcgcgtagcgtcgcaatttgacaaataaactagaccaccacatagaaaagagcactacgcttgtggatttaaatacctttcaaattgtgcacagctcagggtagaaaagcacgtttacgcggaatcgtcgtcgaacctattcagtcgccttttacgcgtgtagcagtacaatccgctccagaaatgggagaagttccgaaaatcaagaacttgccacaggtgatcgagcctcacttgccagaagggtgtacgctggactcgtactccactagctacctaaccaagcccgggga

SEQ ID NO: 24035 - DNA, 717 bp, DROSOPHILA
atggacttgcagttactaatgcagcaaatgtatagtggtgcgtcggtcatgacgatttcggaaacgaacatagatggttacagatacggtattccatctggccagcaccaagagcagccaatttaccctttcctgcccaatgaaaacggtgaccagttggttgggcaactggaggacgacgacgatgaggaggaggacgaggagcaacggactctgttctgcgggaatctcgacgagcgcgtgacggaggagatcctttacgaggtgttcctgcaagctggccccatcgaaggagtgcggataccgaccgataacaatgggcgtccccggaatttcgggtttgtcacataccaacgcctgtgtgcggtgccttttgccctagacttgtaccagggccttgaactgttccaaaagaaagtcaccatcaagcagcagggcggcaagcagctacctgcctacaaccaaagtcgtctgcgcaatcagttcatgatggaggctctaccgcagccatcgccactgcgtcacgcccgacacagtttgcataacggcaagccgtacgatcgcaatccttttggacacaacgccgatcaacggcgccggagcgacagctccgtaatggaacgcaaccggctaaaaccacagcaacaccaccagcacatgcagggaggcagcagaagatcggaccaacgctccaacaacaaacgcagattgctttaa

SEQ ID NO: 24036 - protein, 238 aa, DROSOPHILA
MDLQLLMQQMYSGASVMTISETNIDGYRYGIPSGQHQEQPIYPFLPNENGDQLVGQLEDDDDEEEDEEQRTLFCGNLDERVTEEILYEVFLQAGPIEGVRIPTDNNGRPRNFGFVTYQRLCAVPFALDLYQGLELFQKKVTIKQQGGKQLPAYNQSRLRNQFMMEALPQPSPLRHARHSLHNGKPYDRNPFGHNADQRRRSDSSVMERNRLKPQQHHQHMQGGSRRSDQRSNNKRRLL

SEQ ID NO: 24037 - DNA, 2615 bp, DROSOPHILA
cccgagcagaggagctgttgacccctacgcgagccctgaacgctgttcacgaagttgccatgccccttgaaccgccgttgccgctggcccgtggctatgtcccaaaaggccagagttttatcagtggagcaggtaaaaatgtgcgatccatccggcgtaaagtgagcttccataacagcaccgctgtgtcccgacatggccatcacattctcgcagtcttcgtacacttgccagatgtctgaaatccatattaattgttttacatgctatttctataatcaaagatgttcaagaactacaaattcatttgcgcccaaaaatgtgacgatataggctctcatacacggcactattgtatgaatgcatagatagcttggtattcatacgactttatcacacatttattccaaattttactcacagatttgcctatcgaacccagaagaaagcaataactccccctcgggatggaattccgctgtgaaaatctctccctcatgtccttctaattgcattatgggcgcctgcaggtttgaggtacgcctcactccctaaaaattatagtaaaagcatattcaaagtttatcaaaatttacttagtgcttcttcttgctagcacgcttaccgattcaaggagcgctttgtccctgtttgtgtaggccatcagatcatttttgctacgctttgcctcttgggccaaaattacgctattattgggtcttttggtacccataattaagattttgtttgtaaaaacagaagccttataattttttttcttccgctcaagctgtatggctgtgtgaccagagttcgaaatataatattaccgacatggctgttagcgattaattcagatatttctgaatagatgtggctactttcagtgagaacaaaggaagtgaaagtcggcaactctggcaaaaatactgaaaaacattttaccagaattgtttctcattttatttttacacaatttgcagttttacaatgtgaaactaaccaagaaaaacgggtctccgtctagtaggcatcaacgcgtgggggatccgcaaaaaattcttgtcccttacgctcccccttgagccactgcttgtagcgttcgtttcgcattgcctgaaagaggaatttttagcattttagacaaaattacagatcgttagggatatgaagctacggaaaaactcacatggaagcgcatcagttgcttctgcatgccgacgcactcctgaaagtcggagatcaggtcggcgcactcccgttttccacgctccaggccataggcctcgaagcactccatcattttcatctcgaattttccgcacttgtcgtaggtctggtggttaattaggcacccggtcagatcggttaagggcaggcgtagaaagggggtaagcgacattttgtctgtggagcgaagcacacacactgtgacgtaacaataaacaaggggtttaagccttcaagccgttagcagtctctggcccccaagaatttcaatgtattctctacaacgttaagtagagtatatcctgatcacacaccttaaattgttggcaatacccaaggaattgtcttatattgccttaattccagcacaaaaacaagactgtcatcgatttctgatatcgggtatcgtttttttcgagattcgacagctgatagtgttggttagcgcgcgaaccgcttccacgttttgtttataattttaattacacgagaagctatgaaaaaccaggatttggtggaatatttaaggtcgtgcggggtgtgcgaaatttgccagctgcgttacctgaaggccagaggcgcggagtatagaaacatcaatgagactttgcaaaaggtaagaacggtttaatttgaatttgttgacaactaattgatgtctaacttgtccgtttaaatgcccagttggatgtaaaactaaatgaaaatgtggaaaacgaagagcttgttatatccgaagggagtcaaccatctaaaagggcccgtctgggcgtgtgttcaacgtgcctgggtttattctccaaagactttcagaatgagctgctcagcagcattttggcatcggatttcgcgaaatacgattgccagaaaatcgttctggcgatttgtctaccgatgtcgcttcagttgagacagctggccatgtggtttgccttgcgaagaagatttggaccatctatagacgaaaacaatcccccagacgtgcctataaaagaggctgtcaagctgatcctacaccctataatctgtgaaaagctggccaaggtttacgatgccaacggtctgatgatcaatatagacctcacgcacagtctggaaggcgaagaggtggaaaaactggtcaaattaaacaaagaagcctttcccgccaaggcctcgcatcaaaagcgcattgaaatttcgcgaggtttactagagaaacagtatcaaccctccaaagttaaggcggaaacctatgagaaatattttcagataccctgctctaacgtagaggaatctataaaacttacttccatagacctgcagggaccattgatttgtgtagctggcagatatcgaaagctgagcagggaactttcacatactccctggattttgaatggcca

SEQ ID NO: 24038 - DNA, 542 bp, DROSOPHILA
tgacagtcttgtttttgtgctggaattaaggcaatataagacaattccttgggtattgccaacaatttaaggtgtgtgatcaggatatactctacttaacgttgtagagaatacattgaaattcttgggggccagagactgctaacggcttgaaggcttaaaccccttgtttattgttacgtcacagtgtgtgtgcttcgctccacagacaaaatgtcgcttaccccctttctacgcctgcccttaaccgatctgaccgggtgcctaattaaccaccagacctacgacaagtgcggaaaattcgagatgaaaatgatggagtgcttcgaggcctatggcctggagcgtggaaaacgggagtgcgccgacctgatctccgactttcaggagtgcgtcggcatgcagaagcaactgatgcgcttccatgcaatgcgaaacgaacgctacaagcagtggctcaagggggagcgtaagggacaagaattttttgcggatcccccacgcgttgatgcctactagacggagacccgtttttcttggtt

SEQ ID NO: 24039 - protein, 101 aa, DROSOPHILA
MSLTPFLRLPLTDLTGCLINHQTYDKCGKFEMKMMECFEAYGLERGKRECADLISDFQECVGMQKQLMRFHAMRNERYKQWLKGERKGQEFFADPPRVDAY

SEQ ID NO: 24040 - DNA, 4340 bp, DROSOPHILA
tgtgattacttttagggtacttttggaacagaagattcatgtctcacaggcgcacaccgcatagcgcagctgctcgttattgttgcgctgcacaaagtcccgcatcagctggataagttgtaccggctccggattcgcggtggacgcactgtgcagtttggccaggagcacatagagcacgcccagcgagtgctgctgcatgtctagcgtctccagcacgttgtccagaatgctccagttgcgggctagcagcgacagcgactccggcagctcctcggccagctcccgatagcttcctgtgatgaaaagccagccagcaaagttagttgcgaatcgctttaatatcaaaacaaaggcggcaacgagcccggtttcttgaggatcgttcttcgccggtcggccaacttaccggacgcactcagtgtgcgcacttgattcacatagttttccagcgcgctgcccattttaggtaactccgagactactttttggcctattaacttgcaaaactgcgaaaaataatttcgcgaaataacaaatgactgccgacggattagagctgggaataaaacgatgaatattcggtgctgtcgatttcttatcgattagtggcctaaagacagcgttgttctacactggctctgtaataacgcgccatctataacttataacactatcactcagctggaaaaatttagaacaggcacacaaaaattaaaggattaagacacttgatgctcttctttgtactctatactatataaatttaattcgcgcacttaccattagaatcagcgttatgccatgtttataatttaatttatgaaattttaagaaaattattctaaaacaactagttcaaatttcgattagaatcagcgttatgccatgtttataatttagtttatgaaattttaagaaaattattctaaaacaactatttcaaatttcgatagtgcagccgcgatagtgctcactattttcgataacactttgttgctgttattgaattgctgttaatatcccaatacgaaatgtaactaatataaaatggaaaattctgcgcgaatcgtatatgtgtgcagtctctgccttcgtcaatatgatctccaggaggatcttcgaggacatctcgtctactttcacggctatgagcccatctcaacgcccagtgtcaaaaacaaaactgcgaagacttcaactaaggaacaaactgcagccggcagcaacagccaggataagcaaaccgttgtggagcgatcggagaactcggaacccccggcaagtgaactgcagcccatgcctttcaaggactttcggctggtgctaagggccaacatgttagagccgtatgtatgtccatattattaccataagcttctgacaaactcgtttgttaaaggtgctcctttggaaaggaatgccccttcaagttccaagatgctaccaaaatggagctccactgtagttgccataagggtggcagtttttcctgctgcgaatgtggcatggaactgcccaactggcggcggtgctcggctcacctgtggaaagcccaccaggtggatgtggacctactagtgtgtcccgttttcgaatgcaactacaagtcgcccatatccgctctcgtgtggcgccacatgcaggttcacaaaaagtggcgacccagggtgctccggtcactggctgccgttcagcggagaagaaagctcaaggaacagtccgcagagatggccgcgcaacctgctgctctgccaccatcgtcaaagaaaaacaaatactatgccgagaagacttgcgagatttgcaatcgcaagtttgtcaacggtaaaacgctctctaaacacgtgaagactgttcacaacaaaatcaagccatttatctgcaatgtgtgtggcaaaaagacggctcgcaaggctagcttaatagtgagttcagatagcactttacgatcttcttgctacctaatactctttccagattcacatgcgtcagcacacgggcgagaagccgctgcaatgtggcgaatgcaagttctccactcgcgatcccagtgtcctgcacaagcatcggcagcgtcatgatagccaggacacaaggagcagcctgaaatgtagtcagtgcgactacttctgcatccaagccaatgctcttaagcgccacatgcggctcaatcatgccgaagcctatagggacttgtgctgtgatatctgcagcttcacctcaattaatgtagaacgactacgagcccacaaacaggatcatcgacagggcttgatcacaaattgtgaggattctatggatgcacgtgccgctggcttcaagtatcctcgaaaagtgggcgacaagaacggggaggtatgtcccctgatcttctcatcatcttttatcatttgtataagctacagtttattttgcagatttcagctgactgttttatgccgttggagagcgtggattcattgccccatgaaccagctctggatacgggtggtgtaaccataccagctcctccatctgaagatactcaatttcccacgtacttaaaggactaaaattataacattttaagttgatagattaggggtaagcgttgagttgattcacttcccattttttattgattactttgtttttatgtcctatgtatttatgtacaattcaatttgttgaatatggcgtgtccaatgcgctgtaaagagttttgtataaaataatgttctcatgcagtttgttttggggatttaaatgcttgtttattaagttgttcagttttccatttaaatttaatatcattttagaatctgatatgatttttttgttcaacattcgaattatttagtcatgctggtttaccgtgttccgtttaattatcagttacgctttactttaaactaatttaaaatttaaaaatctactctgccagcgataatcatccggtttcagttcggtttcaagatcagcgccgttaaatctagtttacgacagaaatgttttcatttgggcagttcactaataacttgtgtaagttgctaatatttaatttgatttaattagttcagtagttgagctttactttggtttaatatatatttcttttcgttcgcatttaatcagctacaggacttcgcagaccaagtgatctggagaatccaaaagttatgcaactcctgtccacttgtttgctatagtaatgaaaataagttactaccgagttacaaaatagatttaaacgtttattgtctgagtttgaatcgaatatcaaaacatattcactatttgagagtgcaactgagtagtacagcaaaatggaaaataaaacactcaatataaaattgttaatatcatacagcttctatttgttttatttacagttcttgaaaaggaagaagagtttaaacaaaaatataatttcgactgattcacactctgttgtgttgtattttccgagtccctgatccctgctccctcctttttggccaggccgtgctttttgctttgctttcgatccccgagccttagatcttggtttcaacgacgggttttttcttcgacacaaaagggatgttcaaagagagaatacaaaatagaaaatgattcgattaagtcagctgccattgagcccagagccaacatacgaggataaccatgcaaagtttggtgtggttttgattttgatttgatttgattttgatctgatttggtttggtttggtttagtggtgagggagcaggcgctagatggtgtggcatgaagcgaactgtgcactttggagacaacaacattaacaacaatgggcgtgagttctgaatgacttcgattcgactgggttttttgagtactttgaatacgacgagatacctataaattgttgccttgatttagctttgattatgctgatattatccatgatcactacaacgtctattaaacaactaacgaattcatctagcttgtatgtatattgacatattcgactaaccactgcgtccctctggcgactaaattacgtttacgatgcatccatcaatcttaaaatgtaaaacatgttccacttacgatctactctgggaatggtcgattaatcatctcccttccgtcagcttactcctttggatttttactatttttgttttgtttttgattttattacttgtttgttttgtgcgccgcataataaatgctgtgtgagtttcttaaacgttctccaaaaaaactaactctttcccatctaaactcgtgatgatgatcatcacttgtctgtcggtttcgattagcatagtacgatacacttaaaggctattaggaaacagttgtatctacataggtttatgagtact

SEQ ID NO: 24041 - DNA, 1740 bp, DROSOPHILA
tgttattgaattgctgttaatatcccaatacgaaatgtaactaatataaaatggaaaattctgcgcgaatcgtatatgtgtgcagtctctgccttcgtcaatatgatctccaggaggatcttcgaggacatctcgtctactttcacggctatgagcccatctcaacgcccagtgtcaaaaacaaaactgcgaagacttcaactaaggaacaaactgcagccggcagcaacagccaggataagcaaaccgttgtggagcgatcggagaactcggaacccccggcaagtgaactgcagcccatgcctttcaaggactttcggctggtgctaagggccaacatgttagagccgtgctcctttggaaaggaatgccccttcaagttccaagatgctaccaaaatggagctccactgtagttgccataagggtggcagtttttcctgctgcgaatgtggcatggaactgcccaactggcggcggtgctcggctcacctgtggaaagcccaccaggtggatgtggacctactagtgtgtcccgttttcgaatgcaactacaagtcgcccatatccgctctcgtgtggcgccacatgcaggttcacaaaaagtggcgacccagggtgctccggtcactggctgccgttcagcggagaagaaagctcaaggaacagtccgcagagatggccgcgcaacctgctgctctgccaccatcgtcaaagaaaaacaaatactatgccgagaagacttgcgagatttgcaatcgcaagtttgtcaacggtaaaacgctctctaaacacgtgaagactgttcacaacaaaatcaagccatttatctgcaatgtgtgtggcaaaaagacggctcgcaaggctagcttaataattcacatgcgtcagcacacgggcgagaagccgctgcaatgtggcgaatgcaagttctccactcgcgatcccagtgtcctgcacaagcatcggcagcgtcatgatagccaggacacaaggagcagcctgaaatgtagtcagtgcgactacttctgcatccaagccaatgctcttaagcgccacatgcggctcaatcatgccgaagcctatagggacttgtgctgtgatatctgcagcttcacctcaattaatgtagaacgactacgagcccacaaacaggatcatcgacagggcttgatcacaaattgtgaggattctatggatgcacgtgccgctggcttcaagtatcctcgaaaagtgggcgacaagaacggggagatttcagctgactgttttatgccgttggagagcgtggattcattgccccatgaaccagctctggatacgggtggtgtaaccataccagctcctccatctgaagatactcaatttcccacgtacttaaaggactaaaattataacattttaagttgatagattagggcgataatcatccggtttcagttcggtttcaagatcagcgccgttaaatctagtttacgacagaaatgttttcatttgggcagttcactaataacttgtctacaggacttcgcagaccaagtgatctggagaatccaaaagttatgcaactcctgtccacttgtttgctatagtaatgaaaataagttactaccgagttacaaaatagatttaaacgtttattgtctgagtttgaatcgaatatcaaaacatattcactatttgagagtgcaactgagtagtacagcaaaatggaaaataaaacactcaatataaaattgtt

SEQ ID NO: 24042 - protein, 445 aa, DROSOPHILA
MENSARIVYVCSLCLRQYDLQEDLRGHLVYFHGYEPISTPSVKNKTAKTSTKEQTAAGSNSQDKQTVVERSENSEPPASELQPMPFKDFRLVLRANMLEPCSFGKECPFKFQDATKMELHCSCHKGGSFSCCECGMELPNWRRCSAHLWKAHQVDVDLLVCPVFECNYKSPISALVWRHMQVHKKWRPRVLRSLAAVQRRRKLKEQSAEMAAQPAALPPSSKKNKYYAEKTCEICNRKFVNGKTLSKHVKTVHNKIKPFICNVCGKKTARKASLIIHMRQHTGEKPLQCGECKFSTRDPSVLHKHRQRHDSQDTRSSLKCSQCDYFCIQANALKRHMRLNHAEAYRDLCCDICSFTSINVERLRAHKQDHRQGLITNCEDSMDARAAGFKYPRKVGDKNGEISADCFMPLESVDSLPHEPALDTGGVTIPAPPSEDTQFPTYLKD

SEQ ID NO: 24043 - DNA, 2527 bp, DROSOPHILA
aggcaaatggaccagacgtggaggagcccaccataaaaggccgcataaatctcagcgaaagttgccgaaaattaaaagtgaaaattgctttagatgtagtactccagcggagaaagtaaaaatattaagaatgcgaataaaaggttaaaataaaaaaattatgcagctaaggtattaaatataagataagtttaagccgggttgcttatttcaaaatgttcaagatctaacaatataaacaagagaaagtgcttgaacttatagttacaatagttaatagagagaatgctatagtggagttccttgactatcatatatccgttactcagctagagtataaatgtgaacgctaaatttcatcatttttcttgcatatcgatagatattagggaataaaatgagaaagaattttaaaattgttcaaaagtgtgagcgttagttaagggcgttagaatgggcgtggcaaaaagtttttctgatcaagaattttttcttttggctcggaagcgcttccttccgcctgttacacatttctcaaggaatctagaatacccttttactcaatgagtgagtggtataattaaatccattgtttcaagttgattaacgattattacacacttatacgacttaacttcggattttaaggtcaatttaacgtagcaagcattaacgttctaataacgttcttagtgattgtcaagcttaattttttgtcttcctcaatatgttcaagttcttttttacctttcggaaaatactttgtaatatgcaaaacaagttctgtgccaacaaatgcagactaaatgagactgttaacacccgctgcatatgacatgattaatggtattttagtctatctagtttgcttgtgggttgcaagctcaagatcaagatcatctgttcctctgccatggctgcaacatgacttggctaaacccaatctagttactatataagctgggcttcggttgggtttaaggcatcagttacttggaagtcactaccagctacggatatccagttcatcatgcgcttcgctctacttgccgttctcctcatcggagtgatctttgcctttgtttccgccggcggtggcggtggtggcggaggtggccaaggaggttggcagaagaatggaggaggaggaggaggaggtggtcaaggaggctggcaaaagggcggcggcggcggaggaggtggcaaacatggaggtggtggcggaggaggtggcaagcatggaggtggaaacggcggtggtggaaagcacggtggcggcggtggaggcggtggaggtggtggaaagcatggaggcggcggctggtaaacaccaaagatccccaagcgaatcacagaaaacactccagcaaccacccgatacaaaatgatttttttggcgacgttgtcctactaaaaacaaaacctgtctcgcctcttttccattctcaattgttttaacgatgtgttttcattacttccttgtttaatttaaaaataaacctattttcctgcaatacaaaaagccaacatattttactgggggtggtccacacttaagctcacaagtactcgcaaccttagcttcctgctgcagataaaatccattttcgggactttggcgtgccactcaagagaacctgcataaagctgcacaaattgacttgtttatgcgataatttcgtggagaaactcgagcaattcgattatttagtgatttcgagggatttctaaagattgccaggggaaaggctcagggaaaaaaagagggtaagagggtaaagagagtagacggtctgggcagctcacagctgtttttagcttcacatgcctcggaaaataaaacaagatttatttagttggttcggcattaactgttgcccttttgttatggccatgatgccccttccttaaccgacgggaactcttctataacgactttgtatgcatgtgtgtgttccgaaggagccagcacataaaactcggatgggttttcttttcattaaaagcggatttacgcacacacacaaagtggggaaaaggtggagaaagacacaggacacaggacgcaggaacgagacgggaagtgcgagcagcttattgcacaataaacacgaacccaaccccaagccaaaacccaaccccacaccacagatgcacacaaattatgaggctggccaggcgaaggaaagtccctttggtgttcggatgctgagtcagctacgaggagtttttctttcttcggcactgacaaaaaataaccaaaatgcttcagttttaatacatattcatatatcaaagatgagatattcgtaaaaataataatctggcatataagttacactaaggattttagaattttttttaaaatttttttttattaggtttttttaatgaacattgttagagtgcacatctacataaagttattgaacgacagtgtgtaaaatcagtttctgtgtaaggacggaaaaagattgcgtatacccacaaaggcagggatatgtgtggtggcctttgcgtgtgctag

SEQ ID NO: 24044 - DNA, 527 bp, DROSOPHILA
tcactaccagctacggatatccagttcatcatgcgcttcgctctacttgccgttctcctcatcggagtgatctttgcctttgtttccgccggcggtggcggtggtggcggaggtggccaaggaggttggcagaagaatggaggaggaggaggaggaggtggtcaaggaggctggcaaaagggcggcggcggcggaggaggtggcaaacatggaggtggtggcggaggaggtggcaagcatggaggtggaaacggcggtggtggaaagcacggtggcggcggtggaggcggtggaggtggtggaaagcatggaggcggcggctggtaaacaccaaagatccccaagcgaatcacagaaaacactccagcaaccacccgatacaaaatgatttttttggcgacgttgtcctactaaaaacaaaacctgtctcgcctcttttccattctcaattgttttaacgatgtgttttcattacttccttgtttaatttaaaaataaacctattttcctgcaatacaaaaagccaa

SEQ ID NO: 24045 - protein, 98 aa, DROSOPHILA
MRFALLAVLLIGVIFAFVSAGGGGGGGGGQGGWQKNGGGGGGGGQGGWQKGGGGGGGGKHGGGGGGGGKHGGGNGGGGKHGGGGGGGGGGGKHGGGGW

SEQ ID NO: 24046 - DNA, 5768 bp, DROSOPHILA
atctcgtacataccccaggtcctctgttcttaaaatactttgatctgtacattttcaggatggggcaaaagcttaacctacttaattagttgagatcatgattaggcatattaactgactaacgaaaaaggccagtccgttaaggcagtttgagcatacataaattgcgaacaataattgtatttaatgtacgaaattgtctttaaaatatatggataccgagagaagtgcagagggtataggctataaattacaaatcgaatgcagacaacaaagacaattgtacacaaagaaataattatggcaagccgatatacatacatgataaaacatccatataaatatatataataactaataatattacgagtaaaaagcgatttcaataaaaatgaaaatataaaaaaataaacgtgttatttaattttggatttttaacagaaagtaggtgaggtaacgggtttggcgagggaagagtattttaatgctttgaactagtcaaacccatgaataactgtaactctatattagaacctaatatgcattactatacttttaaatttgtaattctaccatattaaagaaatactaaagcccgggaaaaaatcaaaatcaacaaagctgcataaggtttaaaacttttttgaaaagttgacaacatttatttcagtttcgattcgttttcaattaaataccaatagctccgtaagcttaacataaggcgcgtcccaaggggttttccgtgaagatagattttcctgaatgctggttgatgaatttggagtaaggagcgggggatagttcatagcctgctgatagtttcggtgcatcttggcttcgagttagaacaagcaattttccgcttaggttttcatcgatagactttagtgcagtagtccttttttggtgatcaacaacgtaaatattaaagttaactccatacaatccaaacaagtgctccaactcagagcgaagtgtaggcagtgaaataatttccttgctaacgttgtgctgcagaaatagagacgctttgctgctatttccaaatcgtggcaccagatcttctgccaaggatatatttaaccaaggcaaattaggaagctgtaattcctcagtcgaacaaatagtcaactttaagggaactcctttaagatcgacaagctcactagctattaaacgcttcttggacgcctgctcagatgaatagggagcaaactccgacttaatggccgtcttgattatgctggcatagttggacaaaactttggctagctgagcctgagcctccaggacctcctgcttagctttgttatcggcagctagctcatggaagataagaacgggatcggtcggtataagttgagccttcttttttagtttctggactctatttatgacctcacgagccaagccctcttcaagcaattcttcgttaggcgtcatgtccaacagtaccaaaacctcattatcgctgtgagcctcaaagtttcctccaacctgctcagatgtgcagtaaatgatgcgaacttcatcaagttcaattctttgatccagaatgtcaaagtaaccctgcgaaacttgcttctgaatttcatcatccctgagagccttgatagcagccataaccgctttgaaattgcccttaagccgctgacctagcgcctgtaaaattaagtaatccattttgttatctttataggtaagaaattcataataaacaaaccttgtggtcaggctctgctctcaatgttacaccatatttctccttatcagagcttagcgtaagttttcgaacattgagttcgctaagaatgaagtcctgcaaggtcttgattgcctccaggatttgcgagtccttgtgaattgctatgatctccgaaacaggatacttaacaggcaaggttcttcgatcccgcattacacgacccagctcgacaactgattgcatcaaagccaccgagcgctcaatatcgtttcgaataaattttttctgactgaccggcatcatctggtagtgaactgagtcagcatgctctagggttccggctggctggaacaataccagccgctggaatatgtactccgtaaggtaaggcgtgaaaggagccatcattttaaccattgtgtatagaacatcgtaaagcgtgtcaagtgattgaatgcactgatcagctcccaattcacccttgatgcgacgtcgatttagtcgaacatacctgtaagagaattgttcacgcgttaactaactcatgcttaaatcattaaattttatagaacataccaattggtaagttgatcaatgaactttgtcagccggggtacgacagtgtacaggcgatacattttcatctcagtggcaaagaactcgagtaaggattccttaaaagacaaaatccacacatctataacggaggccttgtccatattctttaagtggcgttcacgatcataagtatattgtccatttcctgccaaatcctccttctcatatcgaacgatattttgtagtaagaatcggtatgcattgtaccacggtaggaacacatctttgattatgtcgcgcacaccttcttccttaaaacgcagactctcggcccttacgacgggcgaattgataaggtacagtcggagagcatccgctccatacttatggaccacctccattggatcgggatagttcttcttgcgcttcgacattttttgaccatcagcagctaagaccagtccacttgcaatgaggtttttaaatggtgccttattaaatagcgccgtcgaaatcacaaggagtgtgtaaaaccagcctcgggtctgatcgataccctctgctataaagtcagccgggaaattgttcataaagtccttttcgttttcaaaagggaaatgctgttgtgcgaacggcattgaacctgattcaaaccaacagtcaaaaacaggagctatgcgacgcagtggtggatttccaggaactgccgatggtatttcaatgtggtcgatactttctctatgaagatcctcgacttgaacgccggaaagctcggctaactgcttgatactgccgataacgacggtctcatcaccgctaggcgacctccagataggaatcggcgtgccccagtagcgattgcgggagatctagatatataatttgatttaaaaacataacaaaaaagtttcctttacaaaacttacagcccaatctctggcctctttcagccagtttccaaaacgtttctccttgacgaagtccggcacccagtacgtttgggaactgcaatcaagcaggtttttagacatgtgctcgacgcgcacaaaccaggaaggaaccgccttatagataagaggcgtgtctgaccgccagcagaatgggtagctatgcttcacctggccactggaaaccaagtttcctcgtgccttcagcgcggccattatttgcttatcagaatctttgacgtattggccctcgaaatcgcttgcctcgttagtaaaccgtcctgcctcgtccactgggcagagaacctcactggactttgtgatgaggcccgcagcgaggcacacacgataatcgtcttctccgaagtagggagcattgtgcacaatacccgtaccggaatcctcagtcacgtactcgtcgaccaggacacgataagctttcacctcagctcctcgcttcgcaaagtaagggaaaagcggcttgtagtgaaggtccttaagggttttgccaacaaacttttccttcacttcgtactccgtctccgatttgtacacgtaagagagacgagactctgcgagaacaaaaagtcggtcgctctttacgtcgcgcacttttacataggtcatcgtcggatgaacacagcatgcgaagtttgagggcagtgtccatggcgtggtggtccacactaggaagaaggtattgggcaacgaaacggcctccagtgcaactactacgcaagggtccacaacctccttgtagttttggttggcctcgaagttcgaaagggacgttgtgcaggcggtggaatagggcatcaccttaacgccctggtagaccagacccttgtcgaacagttgcttgaagatccaccaaatggactccatgtaccatgggtacaacgtcttgtaatcgttcttgaagtcaatccagcgacccacgcgcgtcaccacattctcccactcatctgcgtaacgcatgacaatcttccggcactcggcattgtaggctgcgattcccatcttggccacgtcctcaggacccttgatattcagcagcttgtcaatctcgaactccacgggcagtccgtggcaatcccagccgaagcgacggtccacatggtatccctgctggtatgcgtaccgtgtgacgatgtccttgatggtgccagcaagaatgtgtccgtagtggggcagcccggttgcaaagggcggtccatcgtagaacgtgtatcttggaggtggaaaattagcacaaaatttggcgatcggctgatgcaatcgtatgcggcacttacttgggctttcccttcgacagctggctgcacttttcaaagatattttcgtgtcgccatttctgcagtacgttctcctcctcggccgggaaattaatgttctctggcacccgacacacgtcgttccgctctagtttttttcccatggctgtcaaagttcactgttgtattatttatcaagtaacagagcttattcgcccaccttttatatcagaaattcaactgacttgcggcgtttttgcgtggcacacaacgtgcccgaggtacggaactagtggttcattaatcgctctctagctcatgggttcgcgatatcgatagtaggttccgatgagcggcatccttgataatcagctgacgacagcactgaaaaaaaaagaaaggcttatttactattaacaactttaataaatttgttagccataagaataaaaaactgaactgtaagttactaagtaagaaagccattggcaattgaatgaataaactatgcaatagttttgaaagcaattattcctgacttagacaaataattctaataaattaaaaccccaaataccagctattattaatttgtagtataaccaaattactgtaatatataattataaaaaaattatcttaaattatattaagccatatgttttttttctcagcagtatattttctttttaacaatcaatagtttagcatatatatggtagctatcgttatcgatagcaatatatctttgctatcagcccattggtcatcactaacgcgaaaacaagaggaagagtaatgtgtacacttttgtgtcgctccttttcggccaatttaacaaacgaaaaagtataagtactgggcaaatcagcacttgcacgcctcccaatacgtctcgccagcgcacacctgtgttctgggctccaccggaaactcgccttcagccattcgacgtcgccaacagtcatcggatatggcacgcccaatttttccgaaccagcagaagatagctgagaaactaatcatcttgaatgaccgcggcctgggcattcttacgcggatatacaacatcaagaaagcatgcggcgacaccaagtcgaagccaggcttcctctccgagaagtcgttggaatcgagcatcaagtttatcgtgaagcggttccccaacatcgacgtcaaagggctcaatgctattgtaaacatcaaagcggagattattaagtcgctgtccctgtattaccacacattcgtggacctacttgatttcaaggacaatgtatgcga

SEQ ID NO: 24047 - DNA, 3366 bp, DROSOPHILA
tacctcgggcacgttgtgtgccacgcaaaaacgccgcaagtcagttgaatttctgatataaaaggtgggcgaataagctctgttacttgataaataatacaacagtgaactttgacagccatgggaaaaaaactagagcggaacgacgtgtgtcgggtgccagagaacattaatttcccggccgaggaggagaacgtactgcagaaatggcgacacgaaaatatctttgaaaagtgcagccagctgtcgaagggaaagcccaaatacacgttctacgatggaccgccctttgcaaccgggctgccccactacggacacattcttgctggcaccatcaaggacatcgtcacacggtacgcataccagcagggataccatgtggaccgtcgcttcggctgggattgccacggactgcccgtggagttcgagattgacaagctgctgaatatcaagggtcctgaggacgtggccaagatgggaatcgcagcctacaatgccgagtgccggaagattgtcatgcgttacgcagatgagtgggagaatgtggtgacgcgcgtgggtcgctggattgacttcaagaacgattacaagacgttgtacccatggtacatggagtccatttggtggatcttcaagcaactgttcgacaagggtctggtctaccagggcgttaaggtgatgccctattccaccgcctgcacaacgtccctttcgaacttcgaggccaaccaaaactacaaggaggttgtggacccttgcgtagtagttgcactggaggccgtttcgttgcccaataccttcttcctagtgtggaccaccacgccatggacactgccctcaaacttcgcatgctgtgttcatccgacgatgacctatgtaaaagtgcgcgacgtaaagagcgaccgactttttgttctcgcagagtctcgtctctcttacgtgtacaaatcggagacggagtacgaagtgaaggaaaagtttgttggcaaaacccttaaggaccttcactacaagccgcttttcccttactttgcgaagcgaggagctgaggtgaaagcttatcgtgtcctggtcgacgagtacgtgactgaggattccggtacgggtattgtgcacaatgctccctacttcggagaagacgattatcgtgtgtgcctcgctgcgggcctcatcacaaagtccagtgaggttctctgcccagtggacgaggcaggacggtttactaacgaggcaagcgatttcgagggccaatacgtcaaagattctgataagcaaataatggccgcgctgaaggcacgaggaaacttggtttccagtggccaggtgaagcatagctacccattctgctggcggtcagacacgcctcttatctataaggcggttccttcctggtttgtgcgcgtcgagcacatgtctaaaaacctgcttgattgcagttcccaaacgtactgggtgccggacttcgtcaaggagaaacgttttggaaactggctgaaagaggccagagattgggctatctcccgcaatcgctactggggcacgccgattcctatctggaggtcgcctagcggtgatgagaccgtcgttatcggcagtatcaagcagttagccgagctttccggcgttcaagtcgaggatcttcatagagaaagtatcgaccacattgaaataccatcggcagttcctggaaatccaccactgcgtcgcatagctcctgtttttgactgttggtttgaatcaggttcaatgccgttcgcacaacagcatttcccttttgaaaacgaaaaggactttatgaacaatttcccggctgactttatagcagagggtatcgatcagacccgaggctggttttacacactccttgtgatttcgacggcgctatttaataaggcaccatttaaaaacctcattgcaagtggactggtcttagctgctgatggtcaaaaaatgtcgaagcgcaagaagaactatcccgatccaatggaggtggtccataagtatggagcggatgctctccgactgtaccttatcaattcgcccgtcgtaagggccgagagtctgcgttttaaggaagaaggtgtgcgcgacataatcaaagatgtgttcctaccgtggtacaatgcataccgattcttactacaaaatatcgttcgatatgagaaggaggatttggcaggaaatggacaatatacttatgatcgtgaacgccacttaaagaatatggacaaggcctccgttatagatgtgtggattttgtcttttaaggaatccttactcgagttctttgccactgagatgaaaatgtatcgcctgtacactgtcgtaccccggctgacaaagttcattgatcaacttaccaattggtatgttcgactaaatcgacgtcgcatcaagggtgaattgggagctgatcagtgcattcaatcacttgacacgctttacgatgttctatacacaatggttaaaatgatggctcctttcacgccttaccttacggagtacatattccagcggctggtattgttccagccagccggaaccctagagcatgctgactcagttcactaccagatgatgccggtcagtcagaaaaaatttattcgaaacgatattgagcgctcggtggctttgatgcaatcagttgtcgagctgggtcgtgtaatgcgggatcgaagaaccttgcctgttaagtatcctgtttcggagatcatagcaattcacaaggactcgcaaatcctggaggcaatcaagaccttgcaggacttcattcttagcgaactcaatgttcgaaaacttacgctaagctctgataaggagaaatatggtgtaacattgagagcagagcctgaccacaaggcgctaggtcagcggcttaagggcaatttcaaagcggttatggctgctatcaaggctctcagggatgatgaaattcagaagcaagtttcgcagggttactttgacattctggatcaaagaattgaacttgatgaagttcgcatcatttactgcacatctgagcaggttggaggaaactttgaggctcacagcgataatgaggttttggtactgttggacatgacgcctaacgaagaattgcttgaagagggcttggctcgtgaggtcataaatagagtccagaaactaaaaaagaaggctcaacttataccgaccgatcccgttcttatcttccatgagctagctgccgataacaaagctaagcaggaggtcctggaggctcaggctcagctagccaaagttttgtccaactatgccagcataatcaagacggccattaagtcggagtttgctccctattcatctgagcaggcgtccaagaagcgtttaatagctacacaacgttag

SEQ ID NO: 24048 - protein, 1081 aa, DROSOPHILA
MGKKLERNDVCRVPENINFPAEEENVLQKWRHENIFEKCSQLSKGKPKYTFYDGPPFATGLPHYGHILAGTIKDIVTRYAYQQGYHVDRRFGWDCHGLPVEFEIDKLLNIKGPEDVAKMGIAAYNAECRKIVMRYADEWENVVTRVGRWIDFKNDYKTLYPWYMESIWWIFKQLFDKGLVYQGVKVMPYSTACTTSLSNFEANQNYKEVVDPCVVVALEAVSLPNTFFLVWTTTPWTLPSNFACCVHPTMTYVKVRDVKSDRLFVLAESRLSYVYKSETEYEVKEKFVGKTLKDLHYKPLFPYFAKRGAEVKAYRVLVDEYVTEDSGTGIVHNAPYFGEDDYRVCLAAGLITKSSEVLCPVDEAGRFTNEASDFEGQYVKDSDKQIMAALKARGNLVSSGQVKHSYPFCWRSDTPLIYKAVPSWFVRVEHMSKNLLDCSSQTYWVPDFVKEKRFGNWLKEARDWAISRNRYWGTPIPIWRSPSGDETVVIGSIKQLAELSGVQVEDLHRESIDHIEIPSAVPGNPPLRRIAPVFDCWFESGSMPFAQQHFPFENEKDFMNNFPADFIAEGIDQTRGWFYTLLVISTALFNKAPFKNLIASGLVLAADGQKMSKRKKNYPDPMEVVHKYGADALRLYLINSPVVRAESLRFKEEGVRDIIKDVFLPWYNAYRFLLQNIVRYEKEDLAGNGQYTYDRERHLKNMDKASVIDVWILSFKESLLEFFATEMKMYRLYTVVPRLTKFIDQLTNWYVRLNRRRIKGELGADQCIQSLDTLYDVLYTMVKMMAPFTPYLTEYIFQRLVLFQPAGTLEHADSVHYQMMPVSQKKFIRNDIERSVALMQSVVELGRVMRDRRTLPVKYPVSEIIAIHKDSQILEAIKTLQDFILSELNVRKLTLSSDKEKYGVTLRAEPDHKALGQRLKGNFKAVMAAIKALRDDEIQKQVSQGYFDILDQRIELDEVRIIYCTSEQVGGNFEAHSDNEVLVLLDMTPNEELLEEGLAREVINRVQKLKKKAQLIPTDPVLIFHELAADNKAKQEVLEAQAQLAKVLSNYASIIKTAIKSEFAPYSSEQASKKRLIATQR

SEQ ID NO: 24049 - DNA, 5759 bp, DROSOPHILA
atctcgtacataccccaggtcctctgttcttaaaatactttgatctgtacattttcaggatggggcaaaagcttaacctacttaattagttgagatcatgattaggcatattaactgactaacgaaaaaggccagtccgttaaggcagtttgagcatacataaattgcgaacaataattgtatttaatgtacgaaattgtctttaaaatatatggataccgagagaagtgcagagggtataggctataaattacaaatcgaatgcagacaacaaagacaattgtacacaaagaaataattatggcaagccgatatacatacatgataaaacatccatataaatatatataataactaataatattacgagtaaaaagcgatttcaataaaaatgaaaatataaaaaaataaacgtgttatttaattttggatttttaacagaaagtaggtgaggtaacgggtttggcgagggaagagtattttaatgctttgaactagtcaaacccatgaataactgtaactctatattagaacctaatatgcattactatacttttaaatttgtaattctaccatattaaagaaatactaaagcccgggaaaaaatcaaaatcaacaaagctgcataaggtttaaaacttttttgaaaagttgacaacatttatttcagtttcgattcgttttcaattaaataccaatagctccgtaagcttaacataaggcgcgtcccaaggggttttccgtgaagatagattttcctgaatgctggttgatgaatttggagtaaggagcgggggatagttcatagcctgctgatagtttcggtgcatcttggcttcgagttagaacaagcaattttccgcttaggttttcatcgatagactttagtgcagtagtccttttttggtgatcaacaacgtaaatattaaagttaactccatacaatccaaacaagtgctccaactcagagcgaagtgtaggcagtgaaataatttccttgctaacgttgtgctgcagaaatagagacgctttgctgctatttccaaatcgtggcaccagatcttctgccaaggatatatttaaccaaggcaaattaggaagctgtaattcctcagtcgaacaaatagtcaactttaagggaactcctttaagatcgacaagctcactagctattaaacgcttcttggacgcctgctcagatgaatagggagcaaactccgacttaatggccgtcttgattatgctggcatagttggacaaaactttggctagctgagcctgagcctccaggacctcctgcttagctttgttatcggcagctagctcatggaagataagaacgggatcggtcggtataagttgagccttcttttttagtttctggactctatttatgacctcacgagccaagccctcttcaagcaattcttcgttaggcgtcatgtccaacagtaccaaaacctcattatcgctgtgagcctcaaagtttcctccaacctgctcagatgtgcagtaaatgatgcgaacttcatcaagttcaattctttgatccagaatgtcaaagtaaccctgcgaaacttgcttctgaatttcatcatccctgagagccttgatagcagccataaccgctttgaaattgcccttaagccgctgacctagcgcctgtaaaattaagtaatccattttgttatctttataggtaagaaattcataataaacaaaccttgtggtcaggctctgctctcaatgttacaccatatttctccttatcagagcttagcgtaagttttcgaacattgagttcgctaagaatgaagtcctgcaaggtcttgattgcctccaggatttgcgagtccttgtgaattgctatgatctccgaaacaggatacttaacaggcaaggttcttcgatcccgcattacacgacccagctcgacaactgattgcatcaaagccaccgagcgctcaatatcgtttcgaataaattttttctgactgaccggcatcatctggtagtgaactgagtcagcatgctctagggttccggctggctggaacaataccagccgctggaatatgtactccgtaaggtaaggcgtgaaaggagccatcattttaaccattgtgtatagaacatcgtaaagcgtgtcaagtgattgaatgcactgatcagctcccaattcacccttgatgcgacgtcgatttagtcgaacatacctgtaagagaattgttcacgcgttaactaactcatgcttaaatcattaaattttatagaacataccaattggtaagttgatcaatgaactttgtcagccggggtacgacagtgtacaggcgatacattttcatctcagtggcaaagaactcgagtaaggattccttaaaagacaaaatccacacatctataacggaggccttgtccatattctttaagtggcgttcacgatcataagtatattgtccatttcctgccaaatcctccttctcatatcgaacgatattttgtagtaagaatcggtatgcattgtaccacggtaggaacacatctttgattatgtcgcgcacaccttcttccttaaaacgcagactctcggcccttacgacgggcgaattgataaggtacagtcggagagcatccgctccatacttatggaccacctccattggatcgggatagttcttcttgcgcttcgacattttttgaccatcagcagctaagaccagtccacttgcaatgaggtttttaaatggtgccttattaaatagcgccgtcgaaatcacaaggagtgtgtaaaaccagcctcgggtctgatcgataccctctgctataaagtcagccgggaaattgttcataaagtccttttcgttttcaaaagggaaatgctgttgtgcgaacggcattgaacctgattcaaaccaacagtcaaaaacaggagctatgcgacgcagtggtggatttccaggaactgccgatggtatttcaatgtggtcgatactttctctatgaagatcctcgacttgaacgccggaaagctcggctaactgcttgatactgccgataacgacggtctcatcaccgctaggcgacctccagataggaatcggcgtgccccagtagcgattgcgggagatctagatatataatttgatttaaaaacataacaaaaaagtttcctttacaaaacttacagcccaatctctggcctctttcagccagtttccaaaacgtttctccttgacgaagtccggcacccagtacgtttgggaactgcaatcaagcaggtttttagacatgtgctcgacgcgcacaaaccaggaaggaaccgccttatagataagaggcgtgtctgaccgccagcagaatgggtagctatgcttcacctggccactggaaaccaagtttcctcgtgccttcagcgcggccattatttgcttatcagaatctttgacgtattggccctcgaaatcgcttgcctcgttagtaaaccgtcctgcctcgtccactgggcagagaacctcactggactttgtgatgaggcccgcagcgaggcacacacgataatcgtcttctccgaagtagggagcattgtgcacaatacccgtaccggaatcctcagtcacgtactcgtcgaccaggacacgataagctttcacctcagctcctcgcttcgcaaagtaagggaaaagcggcttgtagtgaaggtccttaagggttttgccaacaaacttttccttcacttcgtactccgtctccgatttgtacacgtaagagagacgagactctgcgagaacaaaaagtcggtcgctctttacgtcgcgcacttttacataggtcatcgtcggatgaacacagcatgcgaagtttgagggcagtgtccatggcgtggtggtccacactaggaagaaggtattgggcaacgaaacggcctccagtgcaactactacgcaagggtccacaacctccttgtagttttggttggcctcgaagttcgaaagggacgttgtgcaggcggtggaatagggcatcaccttaacgccctggtagaccagacccttgtcgaacagttgcttgaagatccaccaaatggactccatgtaccatgggtacaacgtcttgtaatcgttcttgaagtcaatccagcgacccacgcgcgtcaccacattctcccactcatctgcgtaacgcatgacaatcttccggcactcggcattgtaggctgcgattcccatcttggccacgtcctcaggacccttgatattcagcagcttgtcaatctcgaactccacgggcagtccgtggcaatcccagccgaagcgacggtccacatggtatccctgctggtatgcgtaccgtgtgacgatgtccttgatggtgccagcaagaatgtgtccgtagtggggcagcccggttgcaaagggcggtccatcgtagaacgtgtatcttggaggtggaaaattagcacaaaatttggcgatcggctgatgcaatcgtatgcggcacttacttgggctttcccttcgacagctggctgcacttttcaaagatattttcgtgtcgccatttctgcagtacgttctcctcctcggccgggaaattaatgttctctggcacccgacacacgtcgttccgctctagtttttttcccatggctgtcaaagttcactgttgtattatttatcaagtaacagagcttattcgcccaccttttatatcagaaattcaactgacttgcggcgtttttgcgtggcacacaacgtgcccgaggtacggaactagtggttcattaatcgctctctagctcatgggttcgcgatatcgatagtaggttccgatgagcggcatccttgataatcagctgacgacagcactgaaaaaaaaagaaaggcttatttactattaacaactttaataaatttgttagccataagaataaaaaactgaactgtaagttactaagtaagaaagccattggcaattgaatgaataaactatgcaatagttttgaaagcaattattcctgacttagacaaataattctaataaattaaaaccccaaataccagctattattaatttgtagtataaccaaattactgtaatatataattataaaaaaattatcttaaattatattaagccatatgttttttttctcagcagtatattttctttttaacaatcaatagtttagcatatatatggtagctatcgttatcgatagcaatatatctttgctatcagcccattggtcatcactaacgcgaaaacaagaggaagagtaatgtgtacacttttgtgtcgctccttttcggccaatttaacaaacgaaaaagtataagtactgggcaaatcagcacttgcacgcctcccaatacgtctcgccagcgcacacctgtgttctgggctccaccggaaactcgccttcagccattcgacgtcgccaacagtcatcggatatggcacgcccaatttttccgaaccagcagaagatagctgagaaactaatcatcttgaatgaccgcggcctgggcattcttacgcggatatacaacatcaagaaagcatgcggcgacaccaagtcgaagccaggcttcctctccgagaagtcgttggaatcgagcatcaagtttatcgtgaagcggttccccaacatcgacgtcaaagggctcaatgctattgtaaacatcaaagcggagattattaagtcgctgtccctgtattaccacacattcgtggacctacttgatttcaaggacaa

SEQ ID NO: 24050 - DNA, 3278 bp, DROSOPHILA
cacgttgtgtgccacgcaaaaacgccgcaaccatgggaaaaaaactagagcggaacgacgtgtgtcgggtgccagagaacattaatttcccggccgaggaggagaacgtactgcagaaatggcgacacgaaaatatctttgaaaagtgcagccagctgtcgaagggaaagcccaaatacacgttctacgatggaccgccctttgcaaccgggctgccccactacggacacattcttgctggcaccatcaaggacatcgtcacacggtacgcataccagcagggataccatgtggaccgtcgcttcggctgggattgccacggactgcccgtggagttcgagattgacaagctgctgaatatcaagggtcctgaggacgtggccaagatgggaatcgcagcctacaatgccgagtgccggaagattgtcatgcgttacgcagatgagtgggagaatgtggtgacgcgcgtgggtcgctggattgacttcaagaacgattacaagacgttgtacccatggtacatggagtccatttggtggatcttcaagcaactgttcgacaagggtctggtctaccagggcgttaaggtgatgccctattccaccgcctgcacaacgtccctttcgaacttcgaggccaaccaaaactacaaggaggttgtggacccttgcgtagtagttgcactggaggccgtttcgttgcccaataccttcttcctagtgtggaccaccacgccatggacactgccctcaaacttcgcatgctgtgttcatccgacgatgacctatgtaaaagtgcgcgacgtaaagagcgaccgactttttgttctcgcagagtctcgtctctcttacgtgtacaaatcggagacggagtacgaagtgaaggaaaagtttgttggcaaaacccttaaggaccttcactacaagccgcttttcccttactttgcgaagcgaggagctgaggtgaaagcttatcgtgtcctggtcgacgagtacgtgactgaggattccggtacgggtattgtgcacaatgctccctacttcggagaagacgattatcgtgtgtgcctcgctgcgggcctcatcacaaagtccagtgaggttctctgcccagtggacgaggcaggacggtttactaacgaggcaagcgatttcgagggccaatacgtcaaagattctgataagcaaataatggccgcgctgaaggcacgaggaaacttggtttccagtggccaggtgaagcatagctacccattctgctggcggtcagacacgcctcttatctataaggcggttccttcctggtttgtgcgcgtcgagcacatgtctaaaaacctgcttgattgcagttcccaaacgtactgggtgccggacttcgtcaaggagaaacgttttggaaactggctgaaagaggccagagattgggctatctcccgcaatcgctactggggcacgccgattcctatctggaggtcgcctagcggtgatgagaccgtcgttatcggcagtatcaagcagttagccgagctttccggcgttcaagtcgaggatcttcatagagaaagtatcgaccacattgaaataccatcggcagttcctggaaatccaccactgcgtcgcatagctcctgtttttgactgttggtttgaatcaggttcaatgccgttcgcacaacagcatttcccttttgaaaacgaaaaggactttatgaacaatttcccggctgactttatagcagagggtatcgatcagacccgaggctggttttacacactccttgtgatttcgacggcgctatttaataaggcaccatttaaaaacctcattgcaagtggactggtcttagctgctgatggtcaaaaaatgtcgaagcgcaagaagaactatcccgatccaatggaggtggtccataagtatggagcggatgctctccgactgtaccttatcaattcgcccgtcgtaagggccgagagtctgcgttttaaggaagaaggtgtgcgcgacataatcaaagatgtgttcctaccgtggtacaatgcataccgattcttactacaaaatatcgttcgatatgagaaggaggatttggcaggaaatggacaatatacttatgatcgtgaacgccacttaaagaatatggacaaggcctccgttatagatgtgtggattttgtcttttaaggaatccttactcgagttctttgccactgagatgaaaatgtatcgcctgtacactgtcgtaccccggctgacaaagttcattgatcaacttaccaattggtatgttcgactaaatcgacgtcgcatcaagggtgaattgggagctgatcagtgcattcaatcacttgacacgctttacgatgttctatacacaatggttaaaatgatggctcctttcacgccttaccttacggagtacatattccagcggctggtattgttccagccagccggaaccctagagcatgctgactcagttcactaccagatgatgccggtcagtcagaaaaaatttattcgaaacgatattgagcgctcggtggctttgatgcaatcagttgtcgagctgggtcgtgtaatgcgggatcgaagaaccttgcctgttaagtatcctgtttcggagatcatagcaattcacaaggactcgcaaatcctggaggcaatcaagaccttgcaggacttcattcttagcgaactcaatgttcgaaaacttacgctaagctctgataaggagaaatatggtgtaacattgagagcagagcctgaccacaaggcgctaggtcagcggcttaagggcaatttcaaagcggttatggctgctatcaaggctctcagggatgatgaaattcagaagcaagtttcgcagggttactttgacattctggatcaaagaattgaacttgatgaagttcgcatcatttactgcacatctgagcaggttggaggaaactttgaggctcacagcgataatgaggttttggtactgttggacatgacgcctaacgaagaattgcttgaagagggcttggctcgtgaggtcataaatagagtccagaaactaaaaaagaaggctcaacttataccgaccgatcccgttcttatcttccatgagctagctgccgataacaaagctaagcaggaggtcctggaggctcaggctcagctagccaaagttttgtccaactatgccagcataatcaagacggccattaagtcggagtttgctccctattcatctgagcaggcgtccaagaagcgtttaatagctacacaacgttag

SEQ ID NO: 24051 - protein, 1081 aa, DROSOPHILA; identical to SEQ ID NO: 24048

SEQ ID NO: 24052 - DNA, 2654 bp, DROSOPHILA
tggtcaacccactttgttggcgattttctaatatatgcaatttacatgggggctttaacaattgcaatctatcattttacaatatggtaccaagtggttgtaatgcttctacttattggatttgcctgcctgccatttgtgtacctatgtagtttattgtttagtttgcctaatattgcatttgctggaatctttgcgatcctggtaatgacgggtgagtaacgaaaacataaagctgataatacaaatttgtatgaaataaaacaatcgatctttacaactaagggctggggatgtagattgtctaagatatctataaaaagctaaactgcaaataaatgcagataccatttgaaagtatataataatccaacttcatatttctgtgtaggtggaatgctattttcctttatgtacatgttgaccctaatcacggatgtcaattttacaactgtatttgcgatacttccaatgtacgtcggtacctttggcctatttaaatgcctcgcgtggcgtgaatattgcaaccgtgaagtacttcctccgatcgaagaacttgattgtaaattcggaaattgtaacgtgttctgtgcgtgcaaacgtaagtatttttaatttacattatgcattctacttgattaacttgttttactgttgagcagctgaacgtacttggatggaggtatggctactgatggtccactgcttggtttggtttatatttctttggttttcgaactttggatacgaaattggctacagatttaagccaaagctatccaaccggatttggcataataatgagaaacacattcgtgttctggacgaagaaagacgagtgggtctaatcccgaaatacgagcatgaggattatccaataatagttgaccaggttacgaagaactactgccgcgcaaaaaatgccgttcaattagtgtcattcgcgataagaccgtatgtactatattaaactaacgaatatcctaaatagctttgccatatgattctaaatagcggcgacacttttggccttctgggtgcacaaggagctggaaagacatctattttccaaatgattgctggcgagacatccatgtcccatggaaacatctatgtgagaggacacagtctgagggaacacaggaatgctgccaaaatggaggtcggcttctgtccccaaggcgataatgcccccaaatatctcactggtcggcagctgctgagaatccattgtctgctccacggagtgccgaaagatcatatcaaggcggtgtccgagcaaatggccatcgaatttaactttaaggatcaactggacaggccgattcatacatatagtggtggaaagaagagaaaactgaatattgctctcgctatcgatagcgggtcggtactttgtcttgatgatacaaatggtagtgtcgatcacgcgacccaaaggtttatttggagaaagctggaggctgtaaagagaagcggcagaccggtactcctgaccacccagagcatggaggaggccaatgcagtgtgctcgagagtggctttcctggtcgccggcgagatgatgtttatcggatcgctgcagcaggtgcgatcagaagtatctaataccatagtgataaggcttagggtcaatcccagtgacggaaagtaagtaccgtgaaatttatcagaacacatattggatattcacgaatcacacattttctgttaactcgtaaatatttaatattacagactgaaacgaagatttcaacaactaatagctgatatggcagaactctttccattggctacattacagtaagatccaattaattacgcagtgaacgatatagtctaatctctagtctattttaatattttaagcgaagcccttgaaacttgtctcatatatcacataaatattaatgttacaacgttggccaacttgttctaccaaatggaaaagatacgaaatgaaggactcctggaggactattccataacgcaggtttccttggacgaaatttacagaatactgaatgatgaagaagatccgaatctcgtagacctagactctactcataatagcgaagttttagaggacatacgagacacaacgagagacacaacgagagggacaacgagagacacaaatttagtatcagatgagggtatacaaaaagaaaaggttaaacggaaaaaagtggaagaggaagatagagataggcaggaaagtaccgaaactagtaaaccgaaagtaaagagaagtcccgcaactcaatctgatagtactgataccgatgaaatggaagtagaaaaaggcgaaaaattaaaaaagaaaacttcaacattttttcaagattgaaaatcgaacattttgtaagtccttatatttttctagagttcaagaagtatttatactttatcacgcctcaacttgcataactttaaaaccaaagacgaggacatagcagtatttgtattcattaaggaatttccgcaagttttcccggcttcattttcccccatccttttggtcctgcacttaagcttttcggtgtgcctggctgacatttgagggcaacggttgattaaaatgtcaaatgccttgcatattttaaatgccatcgcgtcaagcctcgaggaaaattcatccgaaaactgaggcg

SEQ ID NO: 24053 - DNA, 654 bp, DROSOPHILA
atgattctaaatagcggcgacacttttggccttctgggtgcacaaggagctggaaagacatctattttccaaatgattgctggcgagacatccatgtcccatggaaacatctatgtgagaggacacagtctgagggaacacaggaatgctgccaaaatggaggtcggcttctgtccccaaggcgataatgcccccaaatatctcactggtcggcagctgctgagaatccattgtctgctccacggagtgccgaaagatcatatcaaggcggtgtccgagcaaatggccatcgaatttaactttaaggatcaactggacaggccgattcatacatatagtggtggaaagaagagaaaactgaatattgctctcgctatcgatagcgggtcggtactttgtcttgatgatacaaatggtagtgtcgatcacgcgacccaaaggtttatttggagaaagctggaggctgtaaagagaagcggcagaccggtactcctgaccacccagagcatggaggaggccaatgcagtgtgctcgagagtggctttcctggtcgccggcgagatgatgtttatcggatcgctgcagcaggtgcgatcagaagtatctaataccatagtgataaggcttagggtcaatcccagtgacggaaagtaa

SEQ ID NO: 24054 - protein, 217 aa, DROSOPHILA
MILNSGDTFGLLGAQGAGKTSIFQMIAGETSMSHGNIYVRGHSLREHRNAAKMEVGFCPQGDNAPKYLTGRQLLRIHCLLHGVPKDHIKAVSEQMAIEFNFKDQLDRPIHTYSGGKKRKLNIALAIDSGSVLCLDDTNGSVDHATQRFIWRKLEAVKRSGRPVLLTTQSMEEANAVCSRVAFLVAGEMMFIGSLQQVRSEVSNTIVIRLRVNPSDGK

SEQ ID NO: 24055 - DNA, 2473 bp, DROSOPHILA
acagccacgtaattggtcttcaaaatcagagcaaattgaaacagttgttggcattgccccgctggccatttcctttccttccttttaaaagtctccccaggaacccagaccccacaacatcatcccgcatccatattcctggccaaaagtttgcggagctaccgcttcccaaagacttgtgtcaccggcagaaatgccggaaatccaagcggaaacccaaaagaaaactcaactcaagtcgactcgactccagttgcaagtaccgaaatatgtcaatttttcaccggaaaaaagcaagaaagcaagtaaatgcaaacaaacaaacacgcacactcaaaagcagatacagatacagatacagatacagatacagatacaaatacagataacagatacacttacagccggggaaagtgcaaagtctatcaggtggggatggaaaaaatagatggaaagcaaaacgctggaggacattcgaatggaaatgcggggagtttgtgcggtgcaaaggccaaatctaaagtacgataaatactacgagaaaagtgtttacaaacgtatacatagggcgtctgttttggatttccgtttgctttgcctacgagcgacatgtggtcacactggtccgaatggaaaagtgtgaatagagtagaaaaaactgcacaacactcgatggcattttttttttttttttcgatctcacttgtttcgatttccgattgcattggctcgtttttaaacgttctgaaaatatttaaacgcttgatagttgattatatttaatgtttctatttgctttattcactttatcgacaccttttattgaattgcattttaagtgcttccattaaaatagtaattactttcttgtaaatcaacagaaggtttcacttgccgcttaaaaatacgtgccagttgatcctcaactcagttttccaaaataggcttatgaaaatccaaaacagcaaacgccatgcaaattacatatttaccaattaattatgaacatatgtaatagatgttgtttttttttttttcggtgtatggaaatagtcaaatacaatttttgtaagcgaattaaggagtttgtcatttggaaattttgagaaaattacttcgaatgaatgcggcgaattggcagagcgaaaataaaatgaaaaattcgttgcaagaaacgagcacacttaagattaagctaaaattaaacgaatcgaaaggcgaacccaaagtggaaaataagaccgaaaaaagcggcggagagtcccaaaataaaacggaaatggccgaaaaaaaagaaagcacttgatgtagagaattatttgtaggtacttctgagagcaacgggcaaattaatacggttccgttgggttgctctgaaaaaaaagaaaataaaaaaaaaacacacaaaaacatgcagtaaaatagtataaatgtaaaccaaaataaagaattatgaataaaaagaaaccctttcaagacatttaaattggcccttagtctcaatgggtaaggggaggaaatgcagtggaaaataggggaatatgccggctggaaaatggcttgcatcaaggcttaacattttggtttttcatcatcttaatccatctgaacttttcgaggagaccctataccattatttctaaaccatcgaatccgatgtcagagtattgtagcccctacacacagtattcactttccttttctgccgatttccattttttatttcgtttccctttttgcgctttgagttttccggtttttttttaatttttcctctgcttttgcctgttttttttttcggttatttttgagtgcgcgacgcgtgaaaagctgctggaggcgtattttgtaaattgaaaaacaagagggctgggtccactgagtgctttcgactcgatggcgctagcggaataccctaaccaagagtgggaccccgaaatatgcgaataatgaatgcgctgggcccacgtgtcgtatacgtaatcaagtatacgcaacttttgggttccaaaagctaagcaaaggcaagtataaaacaagtagtaagttcttaaattaaatcataccacactttatatcatattttgtaccaaactgccggaaatgcccggcacttctctaatcaaaagtccgtggccgttggtttcgtttcaacgtaagtggattgttggccagaatggtggctcgatgtccgtaattcgctcagacggagaatatcgtgtatgtgcgtgtgtgtgctcaagttgggcattccgtagctcctggttctggtcgctggtcactgcttttcgtccaggccgcaactggagtcctcctgaccagcgaggcgtcccttttagccttgggtggtacgctccgttgttcttctttctgattttgcttttttttcgttttggcttctttgcgctaccaatttttgcgtgcggcatgcaaagggcagtctggaaaactgtggcaactgaactgaaaatag

SEQ ID NO: 24056 - DNA, 473 bp, DROSOPHILA
aaagggtttctttttattcataattctttattttggtttacatttatactattttactgcatgtttttgtgtgttttttttttattttcttttttttcagagcaacccaacggaaccgtattaatttgcccgttgctctcagaagtacctacaaataattctctacatcaagtgctttcttttttttcggccatttccgttttattttgggactctccgccgcttttttcggtcttattttccactttgggttcgcctttcgattcgtttaattttagcttaatcttaagtgtgctcgtttcttgcaacgaatttttcattttattttcgctctgccaattcgccgcattcattcgaagtaattttctcaaaatttccaaatgacaaactccttaattcgcttacaaaaattgtatttgactatttccatacaccgaaaaaaaaaaaaacaacatctattacatatgttcata

SEQ ID NO: 24057 - protein, 107 aa, DROSOPHILA
MFLCVFFLFSFFSEQPNGTVLICPLLSEVPTNNSLHQVLSFFSAISVLFWDSPPLFSVLFSTLGSPFDSFNFSLILSVLVSCNEFFILFSLCQFAAFIRSNFLKISK

SEQ ID NO: 24058 - DNA, 1384 bp, DROSOPHILA
tccagttcacatacgcatttatttattttcaatttttcatctagcttatgttcgccgagctgtgttgttgtcgtattaaatgtgtttagaaaacattgataatttatcgttctatcgtacttattatggaatgcatcttcttgttagcgtatatactttgctcgatatatgtggcttctatttgagacgcccaacacttttgtttgctcaacagccacgagacacagaaagtataatcaaataaacaacgagagagcgtttttagttgcatagtattattaattattatatggaatacacacaaatctaaactaagcgcttgctacatgtaaatggccaaaaaaaaaagagaacaaaaaaaaaataagaaggaaaacgagagagtaataataataaacataattgtaaattcacattatcataggactataactaaacataataaatacattacgtggtctacgcacatcgagagattaacaaatccaatacagatacgaaagagatatggaatcaattaaattaaatatatatatataaaattaatcataataatcgtgtaaattgtaaatatcacaagcagacgtcacttgcatcgttgataaatgtatgcctatatgccattctataattatgcggatgtgtaattatgttctgccttaaatcgtgtgaaattgtttaggttgcttaggtctggggatttttctaatgtgattttccttgtggttttccggcgtgaaggaaagctcagcgcttttgctatttgtgttgtgcctctctttctggcgcccgcctgccgtctctttctacgttacttttgagttcgcctttgagttggcattagttgagttgcttcattagttttgagttttgagtctcgcttttgcatttgttcaataactattaacgttaccttatatttaactaacaatttctatagaaagtttcgaatgagtacaatattttcaacatttcatcgcattagttatattgttgtttcgtttagcatttgcttggtgccaacccgcttttcttttgctcattgctgatcatctttgatttctgatttccgatttctgatttctgatctctgtttactgatctctgatgtctgatttcaagcgtttcatttgatttcgatctgggccttcctacgtacatataaataaataaatgatcaatgtctgttgatttgtttgctaaacatttatgtatatatgtgtatatatatatgatgtatatttgtgtataattaaaattgactttttacaattcatttttcaaagatctcccttagccgctgctttcctatgagcaaaaaatatacaaacacaaacggaacaaagggtatttggaaaagtacgaattaaatattacgctgagg

SEQ ID NO: 24059 - DNA, 384 bp, DROSOPHILA
cctcagcgtaatatttaattcgtacttttccaaataccctttgttccgtttgtgtttgtatattttttgctcataggaaagcagcggctaagggagatctttgaaaaatgaattgtaaaaagtcaattttaattatacacaaatatacatcatatatatatacacatatatacataaatgtttagcaaacaaatcaacagacattgatcatttatttatttatatgtacgtaggaaggcccagatcgaaatcaaatgaaacgcttgaaatcagacatcagagatcagtaaacagagatcagaaatcagaaatcggaaatcagaaatcaaagatgatcagcaatgagcaaaagaaaagcgggttggcaccaagcaaatgctaaac

SEQ ID NO: 24060 - protein, 52 aa, DROSOPHILA
MYVGRPRSKSNETLEIRHQRSVNRDQKSEIGNQKSKMISNEQKKSGLAPSKC

SEQ ID NO: 24061 - DNA, 5773 bp, DROSOPHILA
atctcgtacataccccaggtcctctgttcttaaaatactttgatctgtacattttcaggatggggcaaaagcttaacctacttaattagttgagatcatgattaggcatattaactgactaacgaaaaaggccagtccgttaaggcagtttgagcatacataaattgcgaacaataattgtatttaatgtacgaaattgtctttaaaatatatggataccgagagaagtgcagagggtataggctataaattacaaatcgaatgcagacaacaaagacaattgtacacaaagaaataattatggcaagccgatatacatacatgataaaacatccatataaatatatataataactaataatattacgagtaaaaagcgatttcaataaaaatgaaaatataaaaaaataaacgtgttatttaattttggatttttaacagaaagtaggtgaggtaacgggtttggcgagggaagagtattttaatgctttgaactagtcaaacccatgaataactgtaactctatattagaacctaatatgcattactatacttttaaatttgtaattctaccatattaaagaaatactaaagcccgggaaaaaatcaaaatcaacaaagctgcataaggtttaaaacttttttgaaaagttgacaacatttatttcagtttcgattcgttttcaattaaataccaatagctccgtaagcttaacataaggcgcgtcccaaggggttttccgtgaagatagattttcctgaatgctggttgatgaatttggagtaaggagcgggggatagttcatagcctgctgatagtttcggtgcatcttggcttcgagttagaacaagcaattttccgcttaggttttcatcgatagactttagtgcagtagtccttttttggtgatcaacaacgtaaatattaaagttaactccatacaatccaaacaagtgctccaactcagagcgaagtgtaggcagtgaaataatttccttgctaacgttgtgctgcagaaatagagacgctttgctgctatttccaaatcgtggcaccagatcttctgccaaggatatatttaaccaaggcaaattaggaagctgtaattcctcagtcgaacaaatagtcaactttaagggaactcctttaagatcgacaagctcactagctattaaacgcttcttggacgcctgctcagatgaatagggagcaaactccgacttaatggccgtcttgattatgctggcatagttggacaaaactttggctagctgagcctgagcctccaggacctcctgcttagctttgttatcggcagctagctcatggaagataagaacgggatcggtcggtataagttgagccttcttttttagtttctggactctatttatgacctcacgagccaagccctcttcaagcaattcttcgttaggcgtcatgtccaacagtaccaaaacctcattatcgctgtgagcctcaaagtttcctccaacctgctcagatgtgcagtaaatgatgcgaacttcatcaagttcaattctttgatccagaatgtcaaagtaaccctgcgaaacttgcttctgaatttcatcatccctgagagccttgatagcagccataaccgctttgaaattgcccttaagccgctgacctagcgcctgtaaaattaagtaatccattttgttatctttataggtaagaaattcataataaacaaaccttgtggtcaggctctgctctcaatgttacaccatatttctccttatcagagcttagcgtaagttttcgaacattgagttcgctaagaatgaagtcctgcaaggtcttgattgcctccaggatttgcgagtccttgtgaattgctatgatctccgaaacaggatacttaacaggcaaggttcttcgatcccgcattacacgacccagctcgacaactgattgcatcaaagccaccgagcgctcaatatcgtttcgaataaattttttctgactgaccggcatcatctggtagtgaactgagtcagcatgctctagggttccggctggctggaacaataccagccgctggaatatgtactccgtaaggtaaggcgtgaaaggagccatcattttaaccattgtgtatagaacatcgtaaagcgtgtcaagtgattgaatgcactgatcagctcccaattcacccttgatgcgacgtcgatttagtcgaacatacctgtaagagaattgttcacgcgttaactaactcatgcttaaatcattaaattttatagaacataccaattggtaagttgatcaatgaactttgtcagccggggtacgacagtgtacaggcgatacattttcatctcagtggcaaagaactcgagtaaggattccttaaaagacaaaatccacacatctataacggaggccttgtccatattctttaagtggcgttcacgatcataagtatattgtccatttcctgccaaatcctccttctcatatcgaacgatattttgtagtaagaatcggtatgcattgtaccacggtaggaacacatctttgattatgtcgcgcacaccttcttccttaaaacgcagactctcggcccttacgacgggcgaattgataaggtacagtcggagagcatccgctccatacttatggaccacctccattggatcgggatagttcttcttgcgcttcgacattttttgaccatcagcagctaagaccagtccacttgcaatgaggtttttaaatggtgccttattaaatagcgccgtcgaaatcacaaggagtgtgtaaaaccagcctcgggtctgatcgataccctctgctataaagtcagccgggaaattgttcataaagtccttttcgttttcaaaagggaaatgctgttgtgcgaacggcattgaacctgattcaaaccaacagtcaaaaacaggagctatgcgacgcagtggtggatttccaggaactgccgatggtatttcaatgtggtcgatactttctctatgaagatcctcgacttgaacgccggaaagctcggctaactgcttgatactgccgataacgacggtctcatcaccgctaggcgacctccagataggaatcggcgtgccccagtagcgattgcgggagatctagatatataatttgatttaaaaacataacaaaaaagtttcctttacaaaacttacagcccaatctctggcctctttcagccagtttccaaaacgtttctccttgacgaagtccggcacccagtacgtttgggaactgcaatcaagcaggtttttagacatgtgctcgacgcgcacaaaccaggaaggaaccgccttatagataagaggcgtgtctgaccgccagcagaatgggtagctatgcttcacctggccactggaaaccaagtttcctcgtgccttcagcgcggccattatttgcttatcagaatctttgacgtattggccctcgaaatcgcttgcctcgttagtaaaccgtcctgcctcgtccactgggcagagaacctcactggactttgtgatgaggcccgcagcgaggcacacacgataatcgtcttctccgaagtagggagcattgtgcacaatacccgtaccggaatcctcagtcacgtactcgtcgaccaggacacgataagctttcacctcagctcctcgcttcgcaaagtaagggaaaagcggcttgtagtgaaggtccttaagggttttgccaacaaacttttccttcacttcgtactccgtctccgatttgtacacgtaagagagacgagactctgcgagaacaaaaagtcggtcgctctttacgtcgcgcacttttacataggtcatcgtcggatgaacacagcatgcgaagtttgagggcagtgtccatggcgtggtggtccacactaggaagaaggtattgggcaacgaaacggcctccagtgcaactactacgcaagggtccacaacctccttgtagttttggttggcctcgaagttcgaaagggacgttgtgcaggcggtggaatagggcatcaccttaacgccctggtagaccagacccttgtcgaacagttgcttgaagatccaccaaatggactccatgtaccatgggtacaacgtcttgtaatcgttcttgaagtcaatccagcgacccacgcgcgtcaccacattctcccactcatctgcgtaacgcatgacaatcttccggcactcggcattgtaggctgcgattcccatcttggccacgtcctcaggacccttgatattcagcagcttgtcaatctcgaactccacgggcagtccgtggcaatcccagccgaagcgacggtccacatggtatccctgctggtatgcgtaccgtgtgacgatgtccttgatggtgccagcaagaatgtgtccgtagtggggcagcccggttgcaaagggcggtccatcgtagaacgtgtatcttggaggtggaaaattagcacaaaatttggcgatcggctgatgcaatcgtatgcggcacttacttgggctttcccttcgacagctggctgcacttttcaaagatattttcgtgtcgccatttctgcagtacgttctcctcctcggccgggaaattaatgttctctggcacccgacacacgtcgttccgctctagtttttttcccatggctgtcaaagttcactgttgtattatttatcaagtaacagagcttattcgcccaccttttatatcagaaattcaactgacttgcggcgtttttgcgtggcacacaacgtgcccgaggtacggaactagtggttcattaatcgctctctagctcatgggttcgcgatatcgatagtaggttccgatgagcggcatccttgataatcagctgacgacagcactgaaaaaaaaagaaaggcttatttactattaacaactttaataaatttgttagccataagaataaaaaactgaactgtaagttactaagtaagaaagccattggcaattgaatgaataaactatgcaatagttttgaaagcaattattcctgacttagacaaataattctaataaattaaaaccccaaataccagctattattaatttgtagtataaccaaattactgtaatatataattataaaaaaattatcttaaattatattaagccatatgttttttttctcagcagtatattttctttttaacaatcaatagtttagcatatatatggtagctatcgttatcgatagcaatatatctttgctatcagcccattggtcatcactaacgcgaaaacaagaggaagagtaatgtgtacacttttgtgtcgctccttttcggccaatttaacaaacgaaaaagtataagtactgggcaaatcagcacttgcacgcctcccaatacgtctcgccagcgcacacctgtgttctgggctccaccggaaactcgccttcagccattcgacgtcgccaacagtcatcggatatggcacgcccaatttttccgaaccagcagaagatagctgagaaactaatcatcttgaatgaccgcggcctgggcattcttacgcggatatacaacatcaagaaagcatgcggcgacaccaagtcgaagccaggcttcctctccgagaagtcgttggaatcgagcatcaagtttatcgtgaagcggttccccaacatcgacgtcaaagggctcaatgctattgtaaacatcaaagcggagattattaagtcgctgtccctgtattaccacacattcgtggacctacttgatttcaaggacaatgtatgcgaactgc

SEQ ID NO: 24062 - DNA, 3317 bp, DROSOPHILA
ttccgtacctcgggcacgttgtgtgccacgcaaaaacgccgcaagtcagttgaatttctgatataaaagccatgggaaaaaaactagagcggaacgacgtgtgtcgggtgccagagaacattaatttcccggccgaggaggagaacgtactgcagaaatggcgacacgaaaatatctttgaaaagtgcagccagctgtcgaagggaaagcccaaatacacgttctacgatggaccgccctttgcaaccgggctgccccactacggacacattcttgctggcaccatcaaggacatcgtcacacggtacgcataccagcagggataccatgtggaccgtcgcttcggctgggattgccacggactgcccgtggagttcgagattgacaagctgctgaatatcaagggtcctgaggacgtggccaagatgggaatcgcagcctacaatgccgagtgccggaagattgtcatgcgttacgcagatgagtgggagaatgtggtgacgcgcgtgggtcgctggattgacttcaagaacgattacaagacgttgtacccatggtacatggagtccatttggtggatcttcaagcaactgttcgacaagggtctggtctaccagggcgttaaggtgatgccctattccaccgcctgcacaacgtccctttcgaacttcgaggccaaccaaaactacaaggaggttgtggacccttgcgtagtagttgcactggaggccgtttcgttgcccaataccttcttcctagtgtggaccaccacgccatggacactgccctcaaacttcgcatgctgtgttcatccgacgatgacctatgtaaaagtgcgcgacgtaaagagcgaccgactttttgttctcgcagagtctcgtctctcttacgtgtacaaatcggagacggagtacgaagtgaaggaaaagtttgttggcaaaacccttaaggaccttcactacaagccgcttttcccttactttgcgaagcgaggagctgaggtgaaagcttatcgtgtcctggtcgacgagtacgtgactgaggattccggtacgggtattgtgcacaatgctccctacttcggagaagacgattatcgtgtgtgcctcgctgcgggcctcatcacaaagtccagtgaggttctctgcccagtggacgaggcaggacggtttactaacgaggcaagcgatttcgagggccaatacgtcaaagattctgataagcaaataatggccgcgctgaaggcacgaggaaacttggtttccagtggccaggtgaagcatagctacccattctgctggcggtcagacacgcctcttatctataaggcggttccttcctggtttgtgcgcgtcgagcacatgtctaaaaacctgcttgattgcagttcccaaacgtactgggtgccggacttcgtcaaggagaaacgttttggaaactggctgaaagaggccagagattgggctatctcccgcaatcgctactggggcacgccgattcctatctggaggtcgcctagcggtgatgagaccgtcgttatcggcagtatcaagcagttagccgagctttccggcgttcaagtcgaggatcttcatagagaaagtatcgaccacattgaaataccatcggcagttcctggaaatccaccactgcgtcgcatagctcctgtttttgactgttggtttgaatcaggttcaatgccgttcgcacaacagcatttcccttttgaaaacgaaaaggactttatgaacaatttcccggctgactttatagcagagggtatcgatcagacccgaggctggttttacacactccttgtgatttcgacggcgctatttaataaggcaccatttaaaaacctcattgcaagtggactggtcttagctgctgatggtcaaaaaatgtcgaagcgcaagaagaactatcccgatccaatggaggtggtccataagtatggagcggatgctctccgactgtaccttatcaattcgcccgtcgtaagggccgagagtctgcgttttaaggaagaaggtgtgcgcgacataatcaaagatgtgttcctaccgtggtacaatgcataccgattcttactacaaaatatcgttcgatatgagaaggaggatttggcaggaaatggacaatatacttatgatcgtgaacgccacttaaagaatatggacaaggcctccgttatagatgtgtggattttgtcttttaaggaatccttactcgagttctttgccactgagatgaaaatgtatcgcctgtacactgtcgtaccccggctgacaaagttcattgatcaacttaccaattggtatgttcgactaaatcgacgtcgcatcaagggtgaattgggagctgatcagtgcattcaatcacttgacacgctttacgatgttctatacacaatggttaaaatgatggctcctttcacgccttaccttacggagtacatattccagcggctggtattgttccagccagccggaaccctagagcatgctgactcagttcactaccagatgatgccggtcagtcagaaaaaatttattcgaaacgatattgagcgctcggtggctttgatgcaatcagttgtcgagctgggtcgtgtaatgcgggatcgaagaaccttgcctgttaagtatcctgtttcggagatcatagcaattcacaaggactcgcaaatcctggaggcaatcaagaccttgcaggacttcattcttagcgaactcaatgttcgaaaacttacgctaagctctgataaggagaaatatggtgtaacattgagagcagagcctgaccacaaggcgctaggtcagcggcttaagggcaatttcaaagcggttatggctgctatcaaggctctcagggatgatgaaattcagaagcaagtttcgcagggttactttgacattctggatcaaagaattgaacttgatgaagttcgcatcatttactgcacatctgagcaggttggaggaaactttgaggctcacagcgataatgaggttttggtactgttggacatgacgcctaacgaagaattgcttgaagagggcttggctcgtgaggtcataaatagagtccagaaactaaaaaagaaggctcaacttataccgaccgatcccgttcttatcttccatgagctagctgccgataacaaagctaagcaggaggtcctggaggctcaggctcagctagccaaagttttgtccaactatgccagcataatcaagacggccattaagtcggagtttgctccctattcatctgagcaggcgtccaagaagcgtttaatagctacacaacgttag

SEQ ID NO: 24063 - protein, 1081 aa, DROSOPHILA; identical to SEQ ID NO: 24048

SEQ ID NO: 24064 - DNA, 2770 bp, DROSOPHILA
ccacggcgagcagggagaatttggaaaacatggctaaaagtctcagattccacttcttactgaatacctcggttgcagagctcagtgattttatacccatttctcgagcttcttatctcttttgaaagcaattgcctcttgttggaggaaatgtcgcatgtcgctaatttgttgtttccggtaattggtaaatatttcttaatttaatctcaaacaaagtaaattacatttatcagaaatcgtttccaatcggtagcagtaacaagggttcaatttttacttcaaattgaaaaaatgttgttcatggacttttaaaaatatctttgcttttggagaaaagttcaatttgtatcataaactgaaaccagcgtagacaatgtgccgaaatataaattcaaatttatcgtttttgaattgcaagccaattcagtacctaaagtaactaaagaagagtttatttgttatcagatacccgttacttagctggatgggcgtggcaacgccatggaacaaacttgttctggaatctgcgttatgatttctatgatttcttatagtagagatacgcttataaggacagactgacagacagatgggcggacatggtcaaatagactcggttaggtgttacatactcttcatggaatcaagtatgccgccttactctacgactaaggggtataaaaactgatgtatacggattaaagcagtttttgttataagacgtgaaactgtgaattttttagcatatttttttaaattttttttttttaaattaaataattcaccgactgatgttatgattaaaattaatatagttttatttttcgtatggcagctattaacaatagctgatacaataatcttaggtactgtcatgctttcataaataagttggtaccctctatattttattcaatcctgtcatctattaaacaactaagctccacagtgaatagcttgcattcctatattatttatttatataaaacagagaattcaattgcctgatatatttattgattgactttcttttaacgaagtaaaggtgctgcggttgttattgttgttgttgttgttgttgctgtggttgttgtagggtaagtcaatggattacaagttgtggtggttggtccgttcttgaggcagttgttcaaaagctcgtaggtatcggaggtgtcttccacataggagcgatttgcgtcattgatgcaaacactcttccggctctctaggatcgtatattgctcctggatctgaactgcaatctgcgtggcattggccgaaatggcatagaaggtcttggagctctcggccgagttggtggaggcgcattcgaggcgggagaccacggtgtccagcggctgctgctcaagagtccagacctggcaattggagttgggatacgagcagccgatgttggcggacctgagaaggatctggcgatcctcggcatacttctcgctgatatgggatgtgcaattgtcataggccgagatgcaagccgtaaagttagtttcgaactgatccgcaattttggccaatttgggcttgtagatcgagaagcactgcgtggagtgatctgagtggacttcggccagctccctgctctgcagctgcagctcctggatgtgggcgtctggtctaaagggaatttgcagcttcacagccagcgagaggcccagggaaaggcagaagaccaagatcttggcttgctttgcgaacatcttggccaggttagttgacggtggatgtgacacccagacgtatttatactcccatttatcattatctttttaattacacattaatgttatatattttcaattactgataatgatggctctaaaggtttgatggatggcaatgttaaacgagagtagataagctcatgttttactgccaaaaacctttaagctttcttgatacacttttgaaaaacaccttcatattgagctgataatgaataagtcgtccaatcctttagctagtttcagaggtataggatttaatcgtttaaacttgattaatattcactcaaagtcttttatttacagcgataaaagttcacgaatacagggtgctcgaggtgatctgaatcttgactcgagtcctagagcacgtagttcgtgctgggaaactcccagttgggatcacccaggcaggctaccatgtcggcgtagcactcgccgtggttggtgttgtaggtccggtaggcttcgatttggcatctggatagcgtttccgagattacggacacctcggcgagcaggctggtttggttgtcggatgcgttgtaggaagctttctccagttccttggatgccgaaggaccctgcgattgggtggtgatattattaatgctattaagcgcaaaaagttatacaaaatacggcttaaaacactttaaaatactcattagagtatgcgtggaagatcatagattaagccaccattgtacgaatcactcaccccagaggccaagcactcgaaggcatcggagttcgaggtcctgccattgcaggtcaggagggaaaggcaggtgtccctcacggatacggacagctcgtcgcgggaactgcggtagcttgagtcgatcagggagaaggccccgtcgtaattgtccttgcacgcggtgaagtcctcgttgtacttgtccacgtgacccttaaggagcgggctgtagtagtccacgcattcgacgttgaagagatccgatcgcatggccggagaactgagcaggagctccaccagcgaggactccctctcg

SEQ ID NO: 24065 - DNA, 770 bp, DROSOPHILA
atacgtctgggtgtcacatccaccgtcaactaacctggccaagatgttcgcaaagcaagccaagatcttggtcttctgcctttccctgggcctctcgctggctgtgaagctgcaaattccctttagaccagacgcccacatccaggagctgcagctgcagagcagggagctggccgaagtccactcagatcactccacgcagtgcttctcgatctacaagcccaaattggccaaaattgcggatcagttcgaaactaactttacggcttgcatctcggcctatgacaattgcacatcccatatcagcgagaagtatgccgaggatcgccagatccttctcaggtccgccaacatcggctgctcgtatcccaactccaattgccaggtctggactcttgagcagcagccgctggacaccgtggtctcccgcctcgaatgcgcctccaccaactcggccgagagctccaagaccttctatgccatttcggccaatgccacgcagattgcagttcagatccaggagcaatatacgatcctagagagccggaagagtgtttgcatcaatgacgcaaatcgctcctatgtggaagacacctccgatacctacgagcttttgaacaactgcctcaagaacggaccaaccaccacaacttgtaatccattgacttaccctacaacaaccacagcaacaacaacaacaacaacaataacaaccgcagcacctttacttcgttaaaagaaagtcaatcaataaatatatcaggcaattg

SEQ ID NO: 24066 - protein, 230 aa, DROSOPHILA
MFAKQAKILVFCLSLGLSLAVKLQIPFRPDAHIQELQLQSRELAEVHSDHSTQCFSIYKPKLAKIADQFETNFTACISAYDNCTSHISEKYAEDRQILLRSANIGCSYPNSNCQVWTLEQQPLDTVVSRLECASTNSAESSKTFYAISANATQIAVQIQEQYTILESRKSVCINDANRSYVEDTSDTYELLNNCLKNGPTTTTCNPLTYPTTTTATTTTTTITTAAPLLR

SEQ ID NO: 24067 - DNA, 3813 bp, DROSOPHILA
taggagatactgaaagtcctcctggctgcgcttaatgcctttggttgagactaggatgtccctcatcagtggcgccacattggtaacaatggacgtcttttgatcaccgaagtaatcataatttttcagggtttcggatcgctggaagatcgaccaaatgcggcggtacatgtagcaatccgcatgcagccaaattgccgaaaaccactgccttctgtcctctccaagacccttgaggaacgagttccagctgtcagtgtccggcgacttgacgcgaattatctggaactccctgttgttgattatatcatcgcgcagcagctccaggctccagatggtgcgcttcaaatcgaaatgggcatagtccccgcactgttcaattatatccgcctcacgatcctgtaggaatgtgatcaaatccctcaaaaatgcgggcgatcttcgcttgaaggtggcaaaagctaggctgcgcaggaatctggcggaaagttcgtcattctctccaggcggattgtatatgatcagattcttctcgttgaatcgctgttccttcaactgctcaatggcggcaagattggtggtttccgtcacatcggtgtggctagttaagtcagcactatgcatttcgcctaaaacgtagaatttcgaagccctctttgccaggaaaatatttcgattccaaattaatattttcctaaactttaatagccctaataggacaactgacgttcatatgagtgagtgtctgtgcttactaagcaatgccaaaggctttggagtacaactaaattgctaaaggcaatgcaaacgttttaaatgtgtttaaaaacattttataaaaactaaattagtcatagttgaagtgttaatgattaaattgagtataatttcgttttggatctcgcataggtcactctgaatttcaacaattaagctaagcttataacgactaaaacaattcaactagtttgctgttccttgtcctgatttccttctttctctacttgctggcaaactgtattacgccatactcgccagtcaacatccactccttatccttggcaaacagttggtccgccacgcctgcacccaatccgcagatcagatccgctttaattgtgcgcagagtgcagagattggaaggacgaaagccttaacagggatataaaacgtgtaagtactggaagaattactgtcaagatagactcacccctcaagcaagtttcgaaggactccgtgctgtcccaggagaagtcgcctaacaacttgcgatagttgaggtcacccttgaagataaccagttgcgcctccttcaggcggtcgtagagtgagggatttacctctggcatgcgatagaactcgtagggactcgtccaaaagtgttccagtggcgaaagctcgaacttgccctcggtcgtcaaacgctgccatttttttccgacctcactcagcacaggatccggatggtcggccagaaattgaagtgcccagtggaagtcgtgctccatcacgtccgaaatgaaccaaggaatggccttgggattgaagcgcaccttggcagccaatcccttgtcgataatgtactcagccagaatgagatccgtgtacagctcatagccggcgttgtcgaaaatgatgtccacaatgccctctccggaggctccgtccagggctttccatacctccgcggtgccgtcgattagtagcttctcctccaaatccgtaacttggtcaaaggcattgccagtgggcttcacctgtttgccggaggttatggacagatcgcatcggttgccccacaaattgagtttgatcaactggcggaaggtgtccgagtttcgttcattgtgccgcgtagccttggccaccgccagcatggcgtccacgctcagtttggtcgccgtctgtttctgctggctgaagtagtcgtaggcggccagatgggctgtggcccggaaaatagatgagattttgcggtacatataacactcggcgtacagccagcagacggaaaagtaggttctcttctccttgggcagtttttccaggaatgcattccacacttcagagtcggaatctgaaaggcacagattcgttattcttatcaaagaaattcattttgcgcagggtaaatgaaataataatatataaaacgcaatcaattatgagttcaatgctattaaaagaaattaaaacagtacacttatatgattgccaacccaatgagcacccaaatacctaccattttcaccaaagggcagtaaaggaccgttgctcaggatgtcatcccgcagctgtctaacctcctttgtagtttgttcaatatcggcttccgctgcctggaatgcaatttgatatcaaaggtttaagctcaaggtcaaggtagaagtgcacacaactacccaccgcgccatatgtggccaggaggacgtccttgtccttgactagggaatccgcgatggtggccaaggtcgaaggcagacgcacacggaaggtgtagtaggcaaagctcctgcaataaatgacttttaagtaataatcataattcaattccacagcttggatgtgtgggtaacgatgggtcggcgtatttgttacatatgcgcgggccatttagacaccatctatagtaggcgctatatttagccctactcactgcttatagagggccgccagctcggtgtggggcggggttggtccgtccacgattccattctttgcgtcaaaatccgtttcgctgcccatttcgaggatctgtttgttgctccagccgaattgtactgctgcggaaagtttataaattgataaagtggcgcgtagtgtgaccgctttggcggtgatggaaaataccgaaattggaaccgataatttacaaggcgatactttttgaattttcaaaatttgttacttatgtttcaagttttttattgtttcatagcaaaaaaggtacatatatgtatatatttaagacgtctttggcttctagatatgtaacgactatttattaccaataatttaagctgaccagcctgtacaagattaatagccaaattcacgagctccgtcaacgaactgaatgaccccataactgcccgagaccatccagcgcggatccttcacactcagcgcctggccaacgccctcgggcaggccggagataacttcgctcttgacccgccgcagcacacaaatgttgctgggaaggaagccacggaggcaggtgctgagttcctgggtggggtcccagcagacgtcctgcagcagcttgcgatagttgagctctcccttgaagaccaccagcttggatagctgcagggaactatacaaatctggatccatttgcgccatgctgcaatagtcaaagatgtaattaggaggcactgaatatgcagtcatatccggaatgcgaacctgtaaaacgaatgtggtgatgtccagaaatgcgagattggcgccagttcgaactttccctcatcgatgaattgtaggaacttctttcctatcagacttataatgtagtccgcatgctcactcaagtactccagcgtccacttgaagtcccgctccgtcacatcggtgacaaaccaagggtgggccttcacatggaaccgcaccttgtcggccagtcccttctcaatcatgaactcagccagtataaagtcgctaaagagttcgtagcctgcattgtccagtataaagtccacctgcttatgcttcttcagtttagggttttccaagcacctccaaatctccgctgcctggttaaccagtacgcgctcatcggtgtttgccactttctccagcacctggcgg

SEQ ID NO: 24068 - DNA, 1379 bp, DROSOPHILA
ccactttatcaatttataaactttccgcagcagtacaattcggctggagcaacaaacagatcctcgaaatgggcagcgaaacggattttgacgcaaagaatggaatcgtggacggaccaaccccgccccacaccgagctggcggccctctataagcagagctttgcctactacaccttccgtgtgcgtctgccttcgaccttggccaccatcgcggattccctagtcaaggacaaggacgtcctcctggccacatatggcgcggcagcggaagccgatattgaacaaactacaaaggaggttagacagctgcgggatgacatcctgagcaacggtcctttactgccctttggtgaaaatgattccgactctgaagtgtggaatgcattcctggaaaaactgcccaaggagaagagaacctacttttccgtctgctggctgtacgccgagtgttatatgtaccgcaaaatctcatctattttccgggccacagcccatctggccgcctacgactacttcagccagcagaaacagacggcgaccaaactgagcgtggacgccatgctggcggtggccaaggctacgcggcacaatgaacgaaactcggacaccttccgccagttgatcaaactcaatttgtggggcaaccgatgcgatctgtccataacctccggcaaacaggtgaagcccactggcaatgcctttgaccaagttacggatttggaggagaagctactaatcgacggcaccgcggaggtatggaaagccctggacggagcctccggagagggcattgtggacatcattttcgacaacgccggctatgagctgtacacggatctcattctggctgagtacattatcgacaagggattggctgccaaggtgcgcttcaatcccaaggccattccttggttcatttcggacgtgatggagcacgacttccactgggcacttcaatttctggccgaccatccggatcctgtgctgagtgaggtcggaaaaaaatggcagcgtttgacgaccgagggcaagttcgagctttcgccactggaacacttttggacgagtccctacgagttctatcgcatgccagaggtaaatccctcactctacgaccgcctgaaggaggcgcaactggttatcttcaagggtgacctcaactatcgcaagttgttaggcgacttctcctgggacagcacggagtccttcgaaacttgcttgaggggctttcgtccttccaatctctgcactctgcgcacaattaaagcggatctgatctgcggattgggtgcaggcgtggcggaccaactgtttgccaaggataaggagtggatgttgactggcgagtatggcgtaatacagtttgccagcaagtag

SEQ ID NO: 24069 - protein, 436 aa, DROSOPHILA
MGSETDFDAKNGIVDGPTPPHTELAALYKQSFAYYTFRVRLPSTLATIADSLVKDKDVLLATYGAAAEADIEQTTKEVRQLRDDILSNGPLLPFGENDSDSEVWNAFLEKLPKEKRTYFSVCWLYAECYMYRKISSIFRATAHLAAYDYFSQQKQTATKLSVDAMLAVAKATRHNERNSDTFRQLIKLNLWGNRCDLSITSGKQVKPTGNAFDQVTDLEEKLLIDGTAEVWKALDGASGEGIVDIIFDNAGYELYTDLILAEYIIDKGLAAKVRFNPKAIPWFISDVMEHDFHWALQFLADHPDPVLSEVGKKWQRLTTEGKFELSPLEHFWTSPYEFYRMPEVNPSLYDRLKEAQLVIFKGDLNYRKLLGDFSWDSTESFETCLRGFRPSNLCTLRTIKADLICGLGAGVADQLFAKDKEWMLTGEYGVIQFASK

SEQ ID NO: 24070 - DNA, 3454 bp, DROSOPHILA
attccaccagtacatccttcccttcgagtcgccgcgcttgagcgcctactgcacggagctgacgggcatccagcagaagactgtggacagcggaatgccgctgcggacggcgatcgtgatgtttaacgaatggctgcgcaatgagatgcgagcccgcaaccttaccttgcccaagatgaacaagtcaaacatactgggcaactgtgcattcgtcacctggacggactgggacttcggcatctgcttggcgaaggagtgcagccgcaaagggatacgcaagccggcctactttaatcagtggatcgacgtgcgggccatttatcggtcgtggtacaagtaccgtccgtgcaacttcacggatgccctgtcgcacgtgggtctggcattcgagggcaaggcccactcggggatcgacgatgccaagaatctgggcgcactcatgtgcaagatggtgcgcgacggggcgctattctcgatcaccaaagatctgacgccatatcagcagcttaatcccaggttcgtgttgtgagttccagcggccagcaatccctccaaaacttgaaacggaacgcagaatatccatttagttactggattttatttaaatattaatataaaacgcaatgaaaggattggtatggagaataactaaagagaacatgcacgaaaatttaaatttcttcttttttttttttttgccctgattttatattttattgtaacggcaattgataagacttgaacaattcgaagcatcgcagcgatcatacatacaaataaatttataaatagctataaatatggcttagagcatacatatttttctaccattcatacttgataatgcttagttatagtctacaatacggaatgcaatacttatcttaacgacttacaccgcctaccatttaggagataaattaataaaacgacaatagctacatataaatatgggctgttaattgggaaatctaatgagaccgactatcattttttgtgttcaaacgataatgtcactcgagagtcgatgcttgatggccacctgtacgacggccttgtcgccagtgaccatccactcgggattctcctcgcttagcttctccaccgtgcagatgggcagtccacaatagatatcggacttaatgacgcgcagggcacagacgctggatggttgaaagccgcgcaggcagtcggaaaactgggtagtgggtttgttgttgatgtcgccgagcagtttccggtagttgagatctcctttaaagatcaccagggatgcctggctaatgtagacatacaggcaaggttgcacccgcttcatctggctgtagtcgtgaccacttgtccagaagtagcttttgtcgcacaggataaaggaacgatccctgatatagccacgtatccgcttaccaaaggcattcaattcctggaactcgtgcttgcgtagaaactttactagccagttaaagtccttgtgcgtgcaatccgagatgaaccacggtatagccttcacatggaaccgcacccgactggccaagcccgattctatgatgtactcgcccagcagcagatccgcaaagagctcaaatcccgcattgtcgcacacgatgtccacgtagacgggcgcactggcctcgatgagatcctgccaaacatcgaacgactgatccgccagcaaatcaatgtcgtatttggcaatctgtttatagattttgtcatgcgcaccccttcttgtgatgtttaggtcaccgtgattggaccacgtagatagttttaggagatactgaaagtcctcctggctgcgcttaatgcctttggttgagactaggatgtccctcatcagtggcgccacattggtaacaatggacgtcttttgatcaccgaagtaatcataatttttcagggtttcggatcgctggaagatcgaccaaatgcggcggtacatgtagcaatccgcatgcagccaaattgccgaaaaccactgccttctgtcctctccaagacccttgaggaacgagttccagctgtcagtgtccggcgacttgacgcgaattatctggaactccctgttgttgattatatcatcgcgcagcagctccaggctccagatggtgcgcttcaaatcgaaatgggcatagtccccgcactgttcaattatatccgcctcacgatcctgtaggaatgtgatcaaatccctcaaaaatgcgggcgatcttcgcttgaaggtggcaaaagctaggctgcgcaggaatctggcggaaagttcgtcattctctccaggcggattgtatatgatcagattcttctcgttgaatcgctgttccttcaactgctcaatggcggcaagattggtggtttccgtcacatcggtgtggctagttaagtcagcactatgcatttcgcctaaaacgtagaatttcgaagccctctttgccaggaaaatatttcgattccaaattaatattttcctaaactttaatagccctaataggacaactgacgttcatatgagtgagtgtctgtgcttactaagcaatgccaaaggctttggagtacaactaaattgctaaaggcaatgcaaacgttttaaatgtgtttaaaaacattttataaaaactaaattagtcatagttgaagtgttaatgattaaattgagtataatttcgttttggatctcgcataggtcactctgaatttcaacaattaagctaagcttataacgactaaaacaattcaactagtttgctgttccttgtcctgatttccttctttctctacttgctggcaaactgtattacgccatactcgccagtcaacatccactccttatccttggcaaacagttggtccgccacgcctgcacccaatccgcagatcagatccgctttaattgtgcgcagagtgcagagattggaaggacgaaagccttaacagggatataaaacgtgtaagtactggaagaattactgtcaagatagactcacccctcaagcaagtttcgaaggactccgtgctgtcccaggagaagtcgcctaacaacttgcgatagttgaggtcacccttgaagataaccagttgcgcctccttcaggcggtcgtagagtgagggatttacctctggcatgcgatagaactcgtagggactcgtccaaaagtgttccagtggcgaaagctcgaacttgccctcggtcgtcaaacgctgccatttttttccgacctcactcagcacaggatccggatggtcggccagaaattgaagtgcccagtggaagtcgtgctccatcacgtccgaaatgaaccaaggaatggccttgggattgaagcgcaccttggcagccaatcccttgtcgataatgtactcagccagaatgagatccgtgtacagctcatagccggcgttgtcgaaaatgatgtccacaatgccctctccggaggctccgtccagggctttccatacc

SEQ ID NO: 24071 - DNA, 1454 bp, DROSOPHILA
tttggaatcgaaatattttcctggcaaagagggcttcgaaattctacgttttaggcgaaatgcatagtgctgacttaactagccacaccgatgtgacggaaaccaccaatcttgccgccattgagcagttgaaggaacagcgattcaacgagaagaatctgatcatatacaatccgcctggagagaatgacgaactttccgccagattcctgcgcagcctagcttttgccaccttcaagcgaagatcgcccgcatttttgagggatttgatcacattcctacaggatcgtgaggcggatataattgaacagtgcggggactatgcccatttcgatttgaagcgcaccatctggagcctggagctgctgcgcgatgatataatcaacaacagggagttccagataattcgcgtcaagtcgccggacactgacagctggaactcgttcctcaagggtcttggagaggacagaaggcagtggttttcggcaatttggctgcatgcggattgctacatgtaccgccgcatttggtcgatcttccagcgatccgaaaccctgaaaaattatgattacttcggtgatcaaaagacgtccattgttaccaatgtggcgccactgatgagggacatcctagtctcaaccaaaggcattaagcgcagccaggaggactttcagtatctcctaaaactatctacgtggtccaatcacggtgacctaaacatcacaagaaggggtgcgcatgacaaaatctataaacagattgccaaatacgacattgatttgctggcggatcagtcgttcgatgtttggcaggatctcatcgaggccagtgcgcccgtctacgtggacatcgtgtgcgacaatgcgggatttgagctctttgcggatctgctgctgggcgagtacatcatagaatcgggcttggccagtcgggtgcggttccatgtgaaggctataccgtggttcatctcggattgcacgcacaaggactttaactggctagtaaagtttctacgcaagcacgagttccaggaattgaatgcctttggtaagcggatacgtggctatatcagggatcgttcctttatcctgtgcgacaaaagctacttctggacaagtggtcacgactacagccagatgaagcgggtgcaaccttgcctgtatgtctacattagccaggcatccctggtgatctttaaaggagatctcaactaccggaaactgctcggcgacatcaacaacaaacccactacccagttttccgactgcctgcgcggctttcaaccatccagcgtctgtgccctgcgcgtcattaagtccgatatctattgtggactgcccatctgcacggtggagaagctaagcgaggagaatcccgagtggatggtcactggcgacaaggccgtcgtacaggtggccatcaagcatcgactctcgagtgacattatcgtttga

SEQ ID NO: 24072 - protein, 464 aa, DROSOPHILA
MHSADLTSHTDVTETTNLAAIEQLKEQRFNEKNLIIYNPPGENDELSARFLRSLAFATFKRRSPAFLRDLITFLQDREADIIEQCGDYAHFDLKRTIWSLELLRDDIINNREFQIIRVKSPDTDSWNSFLKGLGEDRRQWFSAIWLHADCYMYRRIWSIFQRSETLKNYDYFGDQKTSIVTNVAPLMRDILVSTKGIKRSQEDFQYLLKLSTWSNHGDLNITRRGAHDKIYKQIAKYDIDLLADQSFDVWQDLIEASAPVYVDIVCDNAGFELFADLLLGEYIIESGLASRVRFHVKAIPWFISDCTHKDFNWLVKFLRKHEFQELNAFGKRIRGYIRDRSFILCDKSYFWTSGHDYSQMKRVQPCLYVYISQASLVIFKGDLNYRKLLGDINNKPTTQFSDCLRGFQPSSVCALRVIKSDIYCGLPICTVEKLSEENPEWMVTGDKAVVQVAIKHRLSSDIIV

SEQ ID NO: 24073 - DNA, 4543 bp, DROSOPHILA
gcttaaaaccactgaaactttgccagtcatctcatcgaaagagttgctccaagcgaggatgtcgtccatatagtgcaacatgttgtctttgcggtgaatcttctgaatgcggtcgatttgcgatccgctaacagctaagcttaaagactgatgaatgacgaacgatactaacacaaatatttttcagaaacttttaatattcgttaatcgtaatgttggagaggtaagagccgtaccaagatgctgaacataggatggataggcccaagtcctttttgaatgcgagggcactaatacgcagacgtaacaactatatgcatttgtttttatttttctgtttgtgtgcgtgtactaaacatgccttcttctactcttactgaccatatcgtttgtattttctgatcgcattttttctcatctcatttctctcattatcttacatagacatcaaacagtcttgaattacttaaatatccaaagtaggcatatttaaaacagttaactttggtacttttcgaatttgttgaacctccttccgagcttagaattctcacctttattacctatgagctctttgttgggatcttcattcagaacgtcgttcactacattgagcctttcacatgtcggtcaacgcaaaacttacatgtcacaacttatccccgaaatctctctaaagcataactgcttttaatccaaacttacatacatctgtataaatctctgtctcaagtgatcgtaaagctttagaacttttcctttgattaacgctatttttaacatttcaaatgctccttagtgcttttatgaaaactcatatttttttggtactgtcatatttatgtctctagcatatgaaatacattcgtcgctgtacagttattcagctcagctgacccgcaaatcccgcaacctaaaaaactgtctttctccctttaaatccagtcgtatcttattgaactccaagagcttccaacgcaacaattccactccatctctcttttcttttttttttgccgacaccgcggtatcgatgacaatatttagattcctctcagccaaccgacgctcgataagtaatgcagggaacgtactcaaaaaagtcgccgtcgtcctcgatcgcgctaaagcgagtgagttattcaagctggtattactgccagtaacatgacatcgatgtgatttttcatatgggcattgggttttttaataacaataattttgtataccaattctttgaaatcattgaaaaaattttttttgaattatattattatatatttttaatatttatattattatatatcaatgtagttgtattgtgaggcattggaaacagtacgtttgtagtactactcagatattggcaaatgttaccttaaccgaacacacatttgaaattttattccatgtagttttaggtgattaagttaagatatcttaattggacgaaaaatattgagccaagatatgggagttacaataacatttaacgctctaaatatatttagtgaaaagtccttttcacctgtttgatttctgaatgtaaatttgatttcgctagtgtcgatactgatttacgtggaccagaccaagataaattaatatcattattactagactactcaagtttattcttaagtggtattccacaaagaagaaagaaactcgacaacagcgttcactctttcactcatataccccccgagtaaactcagaggtaccaattcggttgcacacttgtcgggtaacacaccccctttggtgaaggagatccttctagcttaagcaaccacagccaccatgaaactcccagaagggggcctacctcgcatgagcgatgctcatcccatggtaccgattagggctgggttggccccctgttacatactttttaacgactcgaggatacccttttactctacgagtaacgtgtatacgtgtataaaaaccaaataatgtgctatttcaatgctgcatcttttctgtgtagtatatttatatttaataaattgtccatttaatacatttgtaatactaatacatatatactgagtttccgagcttgattacatttcaacgaaatgccatctctctgcggcttattgcagaaatttgtaagcccaacccagctgctaatatattgcacggtccgtttgggccgtatccgtacatcaacgaccacgagaggcttggaaaacctaaagctatcagctccaaaattaacaccaggatcgaggacgaaagtagtccagatacattttaatggtggagtattacgaaaaaattctttcataaaccaattaaatacagctgatctttcaattccgatctgagacgacgttgtttttgctaacgcacacaaattaaacaattttagttttgatggatgtcgatcaacttcagagcttcaaaacaacctatgggagagcatgacggagatcacgatatggttggcgtatgtggcactgaaaggccacaagcctgatgcaaaatgtagaaaaggccaaaccacagcagcaattgtcaagacttggctcgtctggaaatgccctcacgtatatattactccagcactgtccgcagacataaatgtaatcaaatattcgccgtagccttgaggacggatttgattttatctttcttagtctagcagcaatttcgcaactgcgagaaacaatctgtgagctactgtggtttgagtgaataaatgtttataaataaacaagtcgagaacattttactcaaaatggtaggtaattagtatcaaatgactttgaacataaaaacctttcaataataagcagacgttgtcgctgatcaaaactttagttggacgccgaccttattgcaaaatgaaaattacaaagtctgtttatattgggcacattttttttgtttactgaaattatatcaaatattatttcattccgtacaatttccgagcagtaaaatgcctttaggcaatgaattcgtatggaatcggggccagagcaatcggttcttcaagtttcttaacaaagtgcgccttcttcggctgttccggctggcgcttcagactgacccattgtcccttttccttcgcctccttcagcaatcgctcattttcctttacgcggcgcaaaaaatcttcgcggcacttggagtggtggatgtgctcaatgcgcacattgacccgcttagcaaggattttgcctcttacgcgtttgtttactattacaccaacggcgtgctgagtcacattgaatatgcgcccggttttgccatgatatgccttatagggcaaacccttctgtacagcaccatgtcccttaatgtcaacgatgtcgccgatcttgaaaacccgcatgtatgtggacaacggaataactccatgctttcggaagggacgggaaaacatgtcccgtgtgccgcgacgatagccctttgagttggtcatttttatttataatcccctataaaaaagaggcttattagatctttttcaagtcataatgaagaaatattcaacaaaactcgttgaacttacgtccacgcggtcgtatagttgagaaaagaaagaaagatggctacttgaatagcgttgccactgatagcaattaagagtttagaaactaaatattatgtaccgtccacactaagttacacaataagcttaatcttttaagagaagcaaaatagtcccaagtctgaatatttggtattaataaggatttaatgcaatatttatgtaatacatatatttacattatataaaaacattatatataaaattgcactacatacaaatgtctagatacaaataatcgctgagagaagtgttcaactccaagacgttaatatgcgctatgggaataatttgtgatttaagcgaatttgttgatacaattttgaagatacatataaccttaaggaagataaagtcctgccccatttaataattttaattttcaggaaccgttctgcctaagtctttactaccgtgggacttactcagtattaatttgctcccttttaagaaaagtcattcatgatctgataatcgtaatttttttcgaattcgatttagccaaaatcttttgatttcttttttaggtgctctgcttttggaaaatttgttctatagtttggatatcgcaatatgcattcagcggtaaacagctgtttaagctgttccagacaacatagctgccacatatttcatagttttaattacgatgtccgcaatttcttttttgtggcactttgaccacttaagtaattaaatcaaatagaattatttacaaacaacactattggctctcctttaaataaattaatgaattccttctatatattttatatgcctgtttcgtttcaccaacaatgtttgaccccttgacaaatccaaacttttgttgccgacatcaaaattttgttagtcaaatctgaagtggcgtcagcaataaaaattttattaaataaattagtggcagaatgatcttgttatgatgtgcaataagcatcaatagaccactgagtaaactatttcttctcttgagta

SEQ ID NO: 24074 - DNA, 639 bp, DROSOPHILA
acgaccgcgtggacgggattataaataaaaatgaccaactcaaagggctatcgtcgcggcacacgggacatgttttcccgtcccttccgaaagcatggagttattccgttgtccacatacatgcgggttttcaagatcggcgacatcgttgacattaagggacatggtgctgtacagaagggtttgccctataaggcatatcatggcaaaaccgggcgcatattcaatgtgactcagcacgccgttggtgtaatagtaaacaaacgcgtaagaggcaaaatccttgctaagcgggtcaatgtgcgcattgagcacatccaccactccaagtgccgcgaagattttttgcgccgcgtaaaggaaaatgagcgattgctgaaggaggcgaaggaaaagggacaatgggtcagtctgaagcgccagccggaacagccgaagaaggcgcactttgttaagaaacttgaagaaccgattgctctggccccgattccatacgaattcattgcctaaaggcattttactgctcggaaattgtacggaatgaaataatatttgatataatttcagtaaacaaaaaaaatgtgcccaatataaacagactttgtaattttcattttgcaataagaaaaaaaaagaaaa

SEQ ID NO: 24075 - protein, 159 aa, DROSOPHILA
MTNSKGYRRGTRDMFSRPFRKHGVIPLSTYMRVFKIGDIVDIKGHGAVQKGLPYKAYHGKTGRIFNVTQHAVGVIVNKRVRGKILAKRVNVRIEHIHHSKCREDFLRRVKENERLLKEAKEKGQWVSLKRQPEQPKKAHFVKKLEEPIALAPIPYEFIA

SEQ ID NO: 24076 - DNA, 8947 bp, DROSOPHILA
gctgccgcccactcctccgcctgcaccggaggccgtggtggtcgaggtggagagtggcggcgagatggcactcaaagtggagatgccgctgtcactactacatatgccggccggcagtgacgtgtgggtgggcgagatgaggtgtgggtggtggtgtttgccatttgcggcaccgatgaggccggccatgccgctactgggcagtacgggagccaggatgcctcccgggatgagtttcctgatctgcgcggggctggtcctcgccctgtcctaatgaatgctgggaagctagaagcagcttcctcgcgtctttgtcctcatcgttggcctgcgccctttgttcctggtgaggacttcgtatatcattccttgtgcgtaggaaaatcaatgaagggacgcgcttaaaacatgcattttaagcagcgcttttctcgctttgtaacccaaattgcgcatgaaaaaagtaaggcgaaaatccacacacgcacgcacacactgccacgaactggttcgcgatagaagagggtttttccacggtctgccctcaattgggcctattggattccctttcgcctttcttcgatgcttttggccaggtacgtgcccgtagtctagttaatagcggaattgatttatcctcgacaaataaagcgaacacatcacattttccactttgtgtttttggcagaagcagcagcacggaaaagtcttctttgtccgcacttggctcgaactctccgacggtctgccctccgggttctgaagcggaaaactctgcggcgaagttcagcgattccggggagcgggcaaagcgcatgtgccggctgtggcccgttactgtcccaaaacaaaacaaagcccgagcggagagagtgaaagctaactgcaagcagctggcgtcgtcgaaagttccatccccgaaaatcagtttgtttaccatcctggcagagcttttcatgggcaaagccgactaggcaataccctttgtaaaacaaagcggtgagtttgtataataaatttatttcggcttcttcgtgttagaccagaatacaattgaaatttggaaacaattgttaagtttaaatttagtttacttagtatttttgctttgacttgtacgaacaataaatacacacgcaagaccgtaaaatgtaattattaataattgaattttatatatgtatgcgtgtttatactatagatgagccggcgactctcggatcccggccctagacccaggcgcccaaggacttttatcctggcccggagctgatcggcaataattgatgtcaatgatttagaatgggatactacaatataaaagttaattactgctggactaatcgcattcatttacatttaaaagcgggttaacaatcaaacaaaaattaattagattcaattcaattttgaaacaatttggaatacataaatatgtgcaatactttcgggggttacaattcaacttttgattactcgtatttaattgttttatatatagaggggattattaatatctgttatataatttatatttgcgttaattggatcgcccttcaaagtgtcctcttcttcgtcctcctctgtttaactgtgtgatgcttaattgtttaactcgtatttacatttgcattagaatcggatcggagcaatctgctgggcgcgtcgctcgacaattcatcctttttacataagtagttctggctttaacaatttagtgcaaaataacagaaacaatcggtgaagaggagatctcgagaacaaattagctagactaagcgacgacacaaatgccacaaactagatacacatatcatatacatatatataattacagtgcctctcttcgcgactgaatcccaactcacgggctaagccgcaagggatccgatccccaagcaaatgtctagacaaacttccgatatacaatttcatcaacaccgaatggtgttttggtgattagcatgactggataggtggagatggtggcttcgcggcttggctatcgattcgagttgtatagtggtacagctgcaaggctagatgcatggcttgaacaatggaattggtgaatcgattgcccgaagtggaccaaaatcaacctgactgaccggagggcggccacgaagttcgatagtttaaaattagagctaagtgctacggcttaaaataaatacattggtttctatgtttactcgcttcaacatatcgcgcattttaaaaacaacactaataattatgaaataaatctggttttctcttctgttacgatttaggggcttgtgttttctgtgtctgtatctgaatgtgtggtgtacgcaagcacccgggtcttgactcgctcgcagcacttgactaatatttttgattaaccatatctagagtgaagagagggggagagagaagtagacagtgataagtgaaaagaaatcaaaatgtacgcgttgcataagaaacgataaaactaaaatccgtcaaacttaagctacattctttgaatatgtcttggatggaaattaaaattttcatttcatttaatttgcgaaagcttggaaaacaatcttgaaaggaggtctttaaaatgggggacttgagtacggctggcgcagacctaaggaacgaaaggctgagtcaatcaatctattcattggtcatcctgcagctcgggcagtgtgtggtaatgtaattcagcatgcagatctaagtaaatggatcccatattcgcgtggacatgtacagaaagtgactaaaaaataccttgccggatacacgagcttactgctaagggggtgttgatctgatcgctggacggggtatgtcgactggtgactgaatgccttcgccacctatccagcgaccgaaggaaacaatatttgttcgatatatgcacaataacaagttcgatggtcaaagacgctttgtcggattgccaaactagcggaggctggctgtgtggttgacttctggaccaattgcttatatacctggcgtgtaagtggtctgctccgttgtgtttagcgacgtattctcgttagctgctacaggggcgccggtgaaggggtttactcccacggctccactgggcggcggcatggcgaaaacaggctgtcctccggcctgttcccgcggctgtgaggtaacgggggctccgcccgcacccaagttaacgtcgtctaggtcaacgtcctcctgcgggacacaaaagagtgggattaggatttctgccggtattttagtttctgcagcaagttttgagagcttggagggaaggtcccttaaccaatgtttagtcaaaaactttcggtgggctgcctacaagccatgtatgtacactattctacggtttagttacgaccactacattactcttgtgctgatggatagaaggacccttcaagccaaatactacaaaattaaaatcagccagatgacagcattgaaagaaaatcataaaacatttaccaagtatttacagcagtactttcaaaaaaacgacgtttttttattttgtcatctcttcctctgttctctcgatcaagttagttttgcgactgaatgttagcttagtaagacgtgttcccttggaacatataaatttcgattggttaccgtttaagtagagttcggatttggttattggctttgtgttatttgggtggtgggtgggtgggtgccttgagccaggtggaggcggtaggcaggccgcaggtgatcttgcacctttttcatgcggtactcgtgctggtattattttcgatttgcatacttacaaggcgtggcggctgtcccagatgcgttggcatatcgttgccctcccgattgccatcggggcgctgacggcgaggtcgagagcgaatgtgtggtggttgtgggtggtagtaggtggtggatatgatgagtcgatcgcaaagatttttgagaaaaaaaaagaagttaaccaaaaatagaaacgtaagtctatagcttctgttccttagcttgcaaactagcaaaggaagaagacttctaatctgggtggtttcaaaataaatttgtatgcgcaatgggacacttaaaaaacaagaaaagcaatcgtggaaaaaacaataatcgttgcactgtctgtctcgagaaatccgagcgtgtatgtgttgacgttatttattattttttttatggagagagaaacgttggaagcatttgatgattttcgtgaagtacatatatacaaaacaaacactaacaataaattatacaaaaattgttcgatggatcggaaaagttttagggttagtcgtgtttacctctggtctcaaaaatcagtattctgattacttcagtgtctggagaattgataatcggaaaccaaaaccaaacttcatacttacccaaaataaactaattacaaagcagtgcaatcagagtagtgtttgtacggagtagtgtgagtaagggaaaaccaatcgagggagatggtgtgccaagatagctgataacccaggaaaattatactaaaaaatggttaggcgtttattgttcgggcagctgttaagtaagcgttgatgtcagatgtaggggctcgtttttgactaaacattagcttctcagaaggaaaaatgatacagatctccccacaaaaatcatcaaagttggtttgttaggttcgtaatagtacagtgtgtgggtggatgggaagcatgcgttaaagttaatgttttagctttgcaccggattggttttcttgttttctcttttcttaactaaatcaaaatgatttcagttattggcgggctgtgttggggcgggtattatatttggacttggctaagccaagtaacttcactcacattcagatgtgaatactgatcgtgcgactcgttgaccggcggcttgaacttgccgcagcagaagttgcaacagcagcagcagcagcagcaacaacagcatccagtgatcacggcacagcagataaccaccgcctgcaaggagaatcagagattaattaatgtgcctaggcatgcgaaataccgcgattcctgacctttacagccggtgaagtgaccacgaagtatgcgttgacattctcctcgccaaactgctcggctatgtacaagcccaaagagccgtagttgtcgtatatgttgcgcttcgtctggtcgctcaatatcgagtgggcccggttgacttccttgaactgcaaatatattaatatatttatattatatattatattaatatattaatacgcatggacccatttctcggaaatattttaccttatcagccgcatccacattgtccgggttcttatcgggatggtatttgagtgcgagtttccggtaagtctttttaatatcatctccggtggctgtcttcggaagtcctaagatctcgtaaagcgagtcgccagatgtcctaaataaatgaaaatcaagtgaacatggtctctgtattgcgtaggattactatccacgtctccgcatttggaattaaaggttgataaccacgcacaggtaagacctcaggaaccactgcgtggacctgcctagcgcagttgcactgtgcctccgacattccttcagctgcgtatgttacattctgacagagggcgataaggcccagccatcgcaagtagtattggactatgactcaccgcagcaacagttagccgtggcacgcgatgggagctcatccgggcgagcacttggccctcagggcttgcctgcacccacggactaggcgttggcattgagggcgtccagttcgaaagcaactggcattgttggctctgcagcagggtcgcgtgcaacataaattgcaatctgtatggattttcttgagcaggtgggtgctatttataaacttggtaagttaagggggttggggtgcaacgctgtgtatgcctaaacccgctctgagaatctgcgagctgataaggcggcgagcgctcgacaaagtggttgaggaccacgatgatgagggtgattacaggctcaagcggatgcgtgccccagggacactgggcggtgggcgactgcacagggccaaggacattggcaggcatcatgacaatctaagccaactcgaattcgcctgggccaaactgaagcggttagtgctggcattactcatatagggtacaattatagagacggctaacgcggccgtaaaactttctgtccgataacggccaggctggttagttagttggttgtcgtgttattggatctgtaggtctgttgttatcgcgcacttatgccggaatcggtatgtgttgcacgaagacccaaacattgaacaatttaaatagaacaatatttataaaatgaagtattcgactcattttttctctattaaacaattgaaatcgtgcgatttgcgggcaaaagaggtgtggccaaccgagaagaatgcaagaggaagaggagaaaggaagaggaaattctcatactgtgtagttataatgtgtaattctaataatggtctgtatgtattacatagcacatatctgaatgatatcggctcgagtcttgatcgatgatgtgcgtagccttttttctaccttttacattttcctgcctaatgcaacataagttgaaactatgccactaagattttaactaacgattattgaaatcaaataaaaatcgaattccgtcaaatggccaaatttgtccttggccttgcccaggacgaattcgcttgtccgaaatcaaactccagccgcagctgccctccccttcccactaccggagcccattattacccctgacccggttccttgtttatcccgacgtggaaaggaaagtgcctgctggctcgagaaaacttctgccgcgaaaaatcaatttcgcgccgaccgcgctgcctgcgcgcagctgctactcacactcgcgcacgggctgagtgtgtgtactctgccgacggcgcgtgtgtgtgcgccgtggaggaaaaatgaaggagcactacaaaatacttacgacagttttctcttgtccatgccaggtgcgctcatcctgatgcctgtgtcactttgactgcgaacgggtaacttgcactagcgatcgctgtcacacgcagtgaaagtctgtgcctgccaagaaccacaatctgtgcgtgtactcttataattgcagtttttgacgtccgtaccgatgcctcgattcttatttttttcgcaacgaaattagagatggaactgaaccgatgttctatcttatcggtttacctgccgacatcaatgatttccagctctggactaacacgccatctatcgcaacattaatagctgctgttacgggactcactgtaagaaatcgcatcgaaagtgtgcaccagagaactgcagcaagccactggcactccaagtgcacccgctaaacactgttgtatctaggcagccgggtgttttttgacactctacttgcgggaataaaaaatatccgacagttttttattacgagcgcaataaccttttctggtgagcgactcacaagcaacgatcggccgcaggtcattttctgtatgcataaaatttgtatgggcggaagcgagattgtctaagaaatgaagggtgaaagggaacacccaaggaaaaggtcgtgcacgtgtttttttttttttgatgcaacccatttcgcagaatatttttttattaatatttttttatttaaaaattaaattaagttttttaattatacaattacaaagttaaataagggaagcatatattaagaactaataataaaataaaaaaaattgtctatttcgtttttttttaaattatttaattaaattaaaattatttacagttttgtaaaaagaatgtaaaaaagaggctatatacaaattttggacttaatccataatctatactatgcacccctccattccaatttcaattatttaggagtaatttatactttcgatacgacagcaaccgttttatatcggtacgtcttacgaacttctattaaaccaaaaactaagctaaattgcatgtaaaatcattaataacgattatattcagtttggccggaacgccctgctccgcttcatcggtcaaaatgtactaacgcgtggcacacgccacacagctgctgtgacacatatggagtagagtggaacgacatgttgcgcctgtaaaagggaatcagatcgactgggattcaattaaaaggcgagccgcagagctccgaagcgattctgttaggatgggcgaaccgaaagccaccgcagaccctggggaggagcaggccttcaactgcgaggacgaagccaacgccataattaacgatgttaaggctcacgtcgctgagatttgcatctcatccaaactggcaagcgatgccacgcaaatttacctgaacatccggactatcgagagcgccacttgctgcgttcaggtgagcagtcgtggcttcaagatcgtctcctcccagtacgacaccatagacgaggacagccggatctctgcactgcttcgcaacggacaagagcaaggcgacgacgaggaggaggagatatttgaaacgccgtacgcgctgctggacaagatcagcccccgctacgtcgagtcgttcggcaaccagctgtgccagcagcttagagcgctgcaacagatgcgaaccgagttcaacgaggaggacgaggaggaggaggaggaggcggaggaggaggagaagaagtgacggtaaccggactccagctttcaaacgaggctgtttactctttagacagacgattttaatgttagtttaattaaatgtttatttttaatagcagagcttgagctccgacttcctacatatacaaaattgtgtgtttgtgccgcaaaagtatttccgcgtgagttggtcttgcacttctcaattcaccacatcctttccttgcatagcaaacaaatgtcgctccagatccgcgttagaccttaagacgtttcaagaataaagattgtgattgcaactct

SEQ ID NO: 24077 - DNA, 3058 bp, DROSOPHILA
agttcgtaagacgtaccgatataaaacggttgctgtcgtatcgaaagtataaattactcctaaataattgaaattggaatggaggggtgcatagtatagattatggattaagtccaaaatttgtatatagcctcttttttacattctttttacaaaactgtaaataattttaatttaattaaataatttaaaaaaaaacgaaatagacaattttttttattttattattagttcttaatatatgcttcccttatttaactttgtaattgtataattaaaaaacttaatttaatttttaaataaaaaaatattaataaaaaaatattctgcgaaatgggttgcatcaaaaaaaaaaaaacacgtgcacgaccttttccttgggtgttccctttcacccttcatttcttagacaatctcgcttccgcccatacaaattttatgcatacagaaaatgacctgcggccgatcgttgcttgtgagtcgctcaccagaaaaggttattgcgctcgtaataaaaaactgtcggatattttttattcccgcaagtagagtgtcaaaaaacacccggctgcctagatacaacagtgtttagcgggtgcacttggagtgccagtggcttgctgcagttctctggtgcacactttcgatgcgatttcttacagtgagtcccgtaacagcagctattaatgttgcgatagatggcgtgttagtccagagctggaaatcattgatgtcggcaggtaaaccgataagatagaacatcggttcagttccatctctaatttcgttgcgaaaaaaataagaatcgaggcatcggtacggacgtcaaaaactgcaattataagagtacacgcacagattgtggttcttggcaggcacagactttcactgcgtgtgacagcgatcgctagtgcaagttacccgttcgcagtcaaagtgacacaggcatcaggatgagcgcacctggcatggacaagagaaaactgtcgacatctggcgactcgctttacgagatcttaggacttccgaagacagccaccggagatgatattaaaaagacttaccggaaactcgcactcaaataccatcccgataagaacccggacaatgtggatgcggctgataagttcaaggaagtcaaccgggcccactcgatattgagcgaccagacgaagcgcaacatatacgacaactacggctctttgggcttgtacatagccgagcagtttggcgaggagaatgtcaacgcatacttcgtggtcacttcaccggctgtaaaggcggtggttatctgctgtgccgtgatcactggatgctgttgttgctgctgctgctgctgctgttgcaacttctgctgcggcaagttcaagccgccggtcaacgagtcgcacgatcagtattcacatctgaatcgccccgatggcaatcgggagggcaacgatatgccaacgcatctgggacagccgccacgccttgaggacgttgacctagacgacgttaacttgggtgcgggcggagcccccgttacctcacagccgcgggaacaggccggaggacagcctgttttcgccatgccgccgcccagtggagccgtgggagtaaaccccttcaccggcgcccctgtagcagctaacgagaatacgtcgctaaacacaacggagcagaccacttacacgccagatatggttaatcaaaaatattagtcaagtgctgcgagcgagtcaagacccgggtgcttgcgtacaccacacattcagatacagacacagaaaacacaagcccctaaatcgtaacagaagagaaaaccagatttatttcataattattagtgttgtttttaaaatgcgcgatatgttgaagcgagtaaacatagaaaccaatgtatttattttaagccgtagcacttagctctaattttaaactatcgaacttcgtggccgccctccggtcagtcaggttgattttggtccacttcgggcaatcgattcaccaattccattgttcaagccatgcatctagccttgcagctgtaccactatacaactcgaatcgatagccaagccgcgaagccaccatctccacctatccagtcatgctaatcaccaaaacaccattcggtgttgatgaaattgtatatcggaagtttgtctagacatttgcttggggatcggatcccttgcggcttagcccgtgagttgggattcagtcgcgaagagaggcactgtaattatatatatgtatatgatatgtgtatctagtttgtggcatttgtgtcgtcgcttagtctagctaatttgttctcgagatctcctcttcaccgattgtttctgttattttgcactaaattgttaaagccagaactacttatgtaaaaaggatgaattgtcgagcgacgcgcccagcagattgctccgatccgattctaatgcaaatgtaaatacgagttaaacaattaagcatcacacagttaaacagaggaggacgaagaagaggacactttgaagggcgatccaattaacgcaaatataaattatataacagatattaataatcccctctatatataaaacaattaaatacgagtaatcaaaagttgaattgtaacccccgaaagtattgcacatatttatgtattccaaattgtttcaaaattgaattgaatctaattaatttttgtttgattgttaacccgcttttaaatgtaaatgaatgcgattagtccagcagtaattaacttttatattgtagtatcccattctaaatcattgacatcaattattgccgatcagctccgggccaggataaaagtccttgggcgcctgggtctagggccgggatccgagagtcgccggctcatctatagtataaacacgcatacatatataaaattcaattattaataattacattttacggtcttgcgtgtgtatttattgttcgtacaagtcaaagcaaaaatactaagtaaactaaatttaaacttaacaattgtttccaaatttcaattgtattctggtctaacacgaagaagccgaaataaatttattatacaaactca

SEQ ID NO: 24078 - protein, 249 aa, DROSOPHILA
MSAPGMDKRKLSTSGDSLYEILGLPKTATGDDIKKTYRKLALKYHPDKNPDNVDAADKFKEVNRAHSILSDQTKRNIYDNYGSLGLYIAEQFGEENVNAYFVVTSPAVKAVVICCAVITGCCCCCCCCCCCNFCCGKFKPPVNESHDQYSHLNRPDGNREGNDMPTHLGQPPRLEDVDLDDVNLGAGGAPVTSQPREQAGGQPVFAMPPPSGAVGVNPFTGAPVAANENTSLNTTEQTTYTPDMVNQKY

SEQ ID NO: 24079 - DNA, 2902 bp, DROSOPHILA
aatgactcgagtatctcgagatggcgaagttgaagctgaagttgagggtgtgagtgcaggaagcaggatctgcggctgccatcttaatttgcatgcactcgctggcggtgcgtgtgtatgtaatttatttgtcgcgcgagcggaattcccttgaacttgtccgctggcatcagcatcaccatcaccatcaaaaccagcagtaaggagcggcagtaggagcggcaggcggacttgcagcgtgcaacatgcaacatgagcagcagttagcagtcagcagtccgtctcgtgtgtcctgcgtcctgtgtctgtgccacatcgtgcgtctgccgacaacacgcaggactcttcgtgccgcccgctgcaattgcaacgctgcctgccctatcggccacgactgtcgctcggaggcgccacacgagctgaggtagcccaatagagtccacaccggacaccgccagcgatgccccgccccttcgataacaagtgggcgaacctatcaatttgtaaatctaaaattatataaaagaaataggaaaaattgttttcatttattaaatacttacccataatagattatttatctttatatttaagtaaatattcaataaatgagtaccacatccatatgtatgtacaaacatacaaagcacaccgaaaccgtatgtatgtattgtagaataagaaatgagatgcaattgaaagaagagagagatcaaagtaaaaaatgtgtctcaaatcgctttcgttgacagcaagaatcagtgggcaaatcgaaggaaacatgcaaaactaactgtttgtgaatgaattactttggataacggaagataatacgcgaatgatgaataagaattagtgtagctgtgttcattgtatccaaataatattcaaacagagcggtgcatatatatttcatacatacatacatatgtaagtatttacatatacatatatgcatatgtatttttcattgataaagtgggtgtgcttgttttcaaagaaccccccttcaattttttttttttttttgttaatttcgagtgcaaaaccacattacacgtgtttatttattttggggtggtttaacccctggcgacccctggcccggcatttatcgaacctttgctcatctcccatgcgaatgcagtccacactcgcgttccacaagtgccactatggcgcctgcgcatcgcccaaaagcgccgcacgaagtggatttcagttaagcggagcgggaatcggaagtggagcagcggacacacggcctcacccacacgcatccttcgtgtgcgctttgccaaaggtgggcgcgcgcgcgtgtgtgtgtgtgtgtgtggaactcgtgggccgagacactgacgacgcgacacgaggcgacacgaagctttggccgagtttcgagccgcgagtgctcggcggttcagtttcgtttaggttatcgaacacaacggtttgtgccgcgcgattaaaggcggatatattcactgcatttgactcgactctcgattcgattcgtttcgtctcgtttcggatcgtcttgccacacaactcgaactcgaatgcgaaagcgaatcctcgacaactgaattccatccgacatcgaaactgtttatctcgggaaattcaaacgctgcaggaaaggcggtgaaacggtcgcgatcgcgatcatcaaattgcaattgtggctggcccgtcctaaaccgcctaacgtcccacgtcccacgcccccgcccgccccacacggaacgttgtcccctcaccgcgccgcccaatacattaacccccgttaacccccgggaaattcaaaacgcgtcgcgtcgcgtcgggaaacgcgtgccgccgccaattgcatctgttgtttgttgtttttttcggttgagtgtgtgagagtgtgccatctatattgcattgttgttgtttctctttttggggttttcctcaattgacaagaaaaacacgaaaacaaagaaggcgagagacgtacaagtgaaacgtaaacaatgaaaagtgagacgacggctggcgaaaaagtgaaatccagttgattgcagtttgcagttggcagcagctgcagagcgaaagcgaaaagcttagcatacttttgggcctgccccaataactcaagccgtaagtgtcctgtgtgtgtgtgcactgctgatgtgtgtgtgtgtgtgcgtgtgcgggtggtgtgcgttggtattgtcgtgtttgtgtgtgcggatgagccttttaaagtcccgaggctgttgctgcccaattgaaacggaaattcactcaaaaaagcgccaaaaatgtggcaaaaagaaatttactacaattacaactaaaaacttactaaaaatcctaacttaactaatttcgtaatttttaaagtccgctggctgaagaagcggaagcagagtattagaagaatattactgttaactatacaactttcatgtgttgaaaagccgctggcaaaacagaacatcgtagtcttataaagaaatttttatttaagtgttttaacatataaaatctcttcacctttaattttaatttctggagaatgtgccttatttgtacgtaattcttggaccataaatatgcctatatattgggctacaaagttcgaaaacttctcaagtcctcagaagtgcaagaaaaatgaaaaatttaaagaaaacgccagaagtggcaaaaagtttgatctgcgatctccaacttgtactaataaatatgcttccatatattacatatatttttttttttgggctgccaatgtggcaaacttgtatcaagaaattttcagatcctgaaaagaaaaggacgaaaaaaagtccacacctgcgagcagaaaatttcatgttgccgtcgccagcgaagaaggcaaaaatgtttaaggcgaattgcgaactttact

SEQ ID NO: 24080 - DNA, 981 bp, DROSOPHILA
aaccccccttcaattttttttttttttttgttaatttcgagtgcaaaaccacattacacgtgtttatttattttggggtggtttaacccctggcgacccctggcccggcatttatcgaacctttgctcatctcccatgcgaatgcagtccacactcgcgttccacaagtgccactatggcgcctgcgcatcgcccaaaagcgccgcacgaagtggatttcagttaagcggagcgggaatcggaagtggagcagcggacacacggcctcacccacacgcatccttcgtgtgcgctttgccaaagtcgaacacaacggtttgtgccgcgcgattaaaggcggatatattcactgcatttgactcgactctcgattcgattcgtttcgtctcgtttcggatcgtcttgccacacaactcgaactcgaatgcgaaagcgaatcctcgacaactgaattccatccgacatcgaaactgtttatctcgggaaattcaaacgctgcaggaaaggcggtgaaacggtcgcgatcgcgatcatcaaattgcaattgtggctggcccgtcctaaaccgcctaacgtcccacgtcccacgcccccgcccgccccacacggaacgttgtcccctcaccgcgccgcccaatacattaacccccgttaacccccgggaaattcaaaacgcgtcgcgtcgcgtcgggaaacgcgtgccgccgccaattgcatctgttgtttgttgtttttttcggttgagtgtgtgagagtgtgccatctatattgcattgttgttgtttctctttttggggttttcctcaattgacaagaaaaacacgaaaacaaagaaggcgagagacgtacaagtgaaacgtaaacaatgaaaagtgagacgacggctggcgaaaaagtgaaatccagttgattgcagtttgcagttggcagcagctgcagagcgaaagcgaaaagcttagcatacttttgggcctgccccaa

SEQ ID NO: 24081 - protein, 123 aa, DROSOPHILA
MQSTLAFHKCHYGACASPKSAARSGFQLSGAGIGSGAADTRPHPHASFVCALPKSNTTVCAARLKADIFTAFDSTLDSIRFVSFRIVLPHNSNSNAKANPRQLNSIRHRNCLSREIQTLQERR

SEQ ID NO: 24082 - DNA, 7394 bp, DROSOPHILA
tcctgtaattgcacaaacaacacatgcatgcacatacaaatatacaaatgcaattacacactcgcaaagggccaagaaaaacacgcacacccacgccacaaagcaaaaacatacatatacacacacacacacacacacacacactactcactcacatcgacaaaaagccttgatcttgatcgaagtaacaacttacagtaacagtgttgttggttttcttgcttgcctttttcgctgcacttgttttgttttaaagccaagacggctttttcagcggctaaccttgtctttgcccgttttgtctttgcacttgcacttgcaattggcgaatcgcaattgattaaaaaaaggccacttaatttaacgtttaacaaatccgttcgctcagcaaatgaacgtcaacaaaaatgatcttcgtaagaatatccgagagagggcgctttcagctttggtttgaaaacagcagaaaaataaagccgttaaaattgaatttaacagattttaataaatagttttaacttaatggttcagcacattttaaatgtaactgttaatatgcatagccctgttttaatttttaatttcaagttaataacttttattcacatcatactcagatagtatattttagtgtactcttttgagataatttcatcacttgttgattcgtcgttggcaactctgcacccacgactacagttagaattagaatgacacacacccatggaattgaagaatgtaaggaagaaagggagtgtgatcgaaagtccgttcctttttacagttacatagcaatcgtccgagcgaacggacagacaaatttctgagaatcgcacttctttgcttctctcattttcggtgattttccgttgcttttttattgtgtgtgcactcgaaagttctattaggttccacagggtttttatacatatgattaattcgtatttaaagtaactttgtgcacctgatgctaatttaattttcttctcctttcttgcagaaaactttgccgccgagttgctgcagcgtttgacaccaaacactgccaccactgcacaaaataatattgttaacaatttggttaataatagcagagccgccacctccgttttagccactaaagactgtacaattgaaaattccccaattagcataccaaaaaatcagcgagcagaggacgaggaggagcaagaagaccaggaaaaagagaagcccgcagagcgggagagagagaagtccgatgagaggacagaacaggtagaaaaggaggagcgggtggagcgcgaagaggaggaggacgacgaggtggatgtcggcgtagaggcgccacgcccacgattctataataccggcgtggtcttaacccaggcccaacgcaaggagtatccccaagagcccaaggacttatccctaaccatcgccaaatcctcgccagcttcaccgcatatccacagtgactccgaatccgattcggactctgatgggggctgcaagctaattgtggacgagaagccaccattgccggtgatcaaaccattgtccctgcgcttgcgcagcacaccgccaccggcggatcaacgaccaagtccgccgcctccgcgagatcccgcgcccgctgtccgctgctcggtgatccaacgggcgccgcaatcccaattgcccaccagccgggctggcttcctattgccccccttggatcagctaggacccgagcagcaggagcccatcgattatcacgtgccgaagcgaaggagcccctcttatgactccgatgaggagctgaacgccaggcgcctggaacgagcgcggcaggtgcgcgaggcaagacgacgcagcaccattttggccgcacgagttctgctcgcccagtcccaaaggcttaatccgcgcttggtgcgatccttgcccggtattttggctgcggcagccggacacggacggaatagcagcagttccagcggtgccgccgggcagggctttcaatcgtccggttttggcagccaaaacagcggcagcggctcgtccagtggcaatcagaacgccggcagcggcgctggttcacctggatctggtgccggtggcggtggtggtatgggcggtggtcgcgacggccgagggaactacggacccaattcaccgccaacgggagcattgcctccgttttatgagagcctcaagagcggccaacagagcacggccagcaacaatacgggccaaagtcccggcgctaatcattcgcatttcaacgcaaatccagcgaattttctgcaaaacgcagcagcggctgcgtacatcatgtcggcaggttccggtggaggaggctgcaccggaaacggaggtggtggagcatcggggccaggaggtggcccatcggcaaatagtggtggtggtggtggtggtggcggcggcaatgggtacatcaactgtggtggtgttggtggtccaaacaatagtctcgacggtaataatctattgaacttcgccagtgtttctaactataacgaatccaattccaaattccataatcatcatcatcatcatcaacacaacaacaacaacaacaacaatggtggtcaaacatctatgatgggtcatcccttttacggcggtaatccctcagcctacggcataatactcaaggatgaaccggacattgagtacgacgaggccaagatcgatattggcacctttgcgcagaacattatccaggcaacgatgggcagctccggtcagttcaatgccagcgcctatgaggatgctataatgtcggacctggccagttcgggtcagtgtcccaatggagccgtcgatccgcttcagttcacagccactctgatgctgagttcgcagaccgatcatttactggagcagctgtccgatgccgtggacttgagttcattcctgcaaaggagctgcgtggacgacgaggagtccaccagtccgcggcaggatttcgagctggtgtccacgccctcgctaacgccggattcagtgacgccggtggagcagcacaataccaatacaacccagctggatgtcctgcacgagaatctgttgacgcagctgacccacaatatagtccggggcggcagcaatcagcagcagcagcaccatcaacagcatggtgtgcagcagcaacagcagcagcagcatagtgtgcagcagcaacagcagcacaatgtgcaacagcagcatggcgtgcagcagcaacatgtccagcagcaaccaccgccctcgtatcagcatgccacgcgtggcctgatgatgcaacagcagccgcagcacggcggctatcagcagcaagctgccatcatgtcgcaacagcagcagcaattgctcagccagcagcagcagcagtcgcaccaccagcagcagcagcagcagcaacatgccgctgcctaccagcagcacaacatctatgcacagcagcaacagcagcagcagcagcagcatcatcaacagcagcaacagcagcaacatcatcacttccaccaccagcaacaacagcagccacagccacagtcgcatcattcgcaccatcatggccatggtcatgacaacagcaacatgtcgcttccctcgccaactgcggctgcagcggcggcggccgctgctgctgctgctgcggcagccgcagccgctcatctgcagcgtccgatgagcagcagcagcagctccggcggcaccaatagcagcaacagtagcggtggcagcagcaacagtccgctcctagatgcaaacgctgctgcggcagctgcagctgctttgttggacacaaagccactcatccaaagcgtaagtaatccaattggtcagccactaaatacgcaatcacagcagcaaaagcagggacaacaaatcacattgatgaagaccactaggtacacggaattcgtcgagatggtgtccatggacgtgacggtcaagccagagctctttagcgagctcaagccagaaatgaccgagatcaccgccgaggagttgactttggaagcagagacaacagcagcagcggcggcagcagcagcagcagcagcagctgcaacaacaacatcagcaacagagggaactcaggttctggcagcagcgccggcaccattgtcatccggcagaaagctgcgtggacgcgccaaggctgtagcctatggctccacaatgattacgctgatatccacgctgaaatcgtcgccagaagtgccggccaccaagacggtgcaccgcaccactttgcgatctttggctacggcggcagcggccactgcagccggtttgctggcgccatcgcccaccgtttccgttttgaatgagagcaaagtcttgcagcggcgcgtaagtgcggaagatgagtcggaaactggacagctgtgggcctccaagagattagctatcatttgcgtttcaatggactgcggttatcgatggcgcttaccacgaaacattaggttccagtccattgaaaagttttagtgttaatttactggattaaagaagcttggagcttggagcttggagtttaccgacgattctttctaggaactaacccgcttatgtgtcttctatctatagttgtctgtagtttgtgcttgtctgtgattgtcttagatttgttaactccttcaatatgtttaacccattgtgtgtaatcataattaatgaacgttcgttctatgcatttttcaacagttgggcttgccgccggatctgcagcttgagtttgtgaacggcggccatggcattaagaacccgctggccgtggagaatgcccacggtggccatcaccgaattcgcaacatcgattgcattgatgatctcagcaagcatggccaccactcgcagcaccaacagcagcagggctcgccgcagcagcaaaatatgcaacaatcggtgcaacagcagtcggtgcaacagcagcaatccctgcagcagcaacagcagcagcagcaccatcagcaccacagtaacagcagtgcaagcagcaatgccagcagtcatggatccgccgaagccctttgcatgggctcatccggcggagccaatgaggattcgtcgtcgggcaacaataagttcgtctgccgcgtctgcatgaagacattctcgctgcagcgcctgctcaatcggcacatgaagtgtcactcggacatcaagcggtatctgtgcacgttctgcggcaagggattcaacgacaccttcgacctcaagcgccacacgcgcacccacacgggcgtccggccgtacaagtgcaatctctgcgagaagagcttcacgcagcgctgttccctcgagtcgcactgccagaaggtgcatagcgttcagcaccagtatgcctacaaggagcgcagagccaagctgagcatggcttttcacattcccaggagtactgccaaatgggagatgtatggttctatctgtaatcggcgttcccttccctttttttttttcacagatgtacgtgtgcgaggagtgcggacacaccacctgcgagccggaggtccactatctgcacctgaagaacaaccatccgttctcgccggcgctgcttaagttctacgacaagcggcactttaagttcaccaactcgcagttcgccaacaatctgctcggccagctgcccatgccagtccacaattagttgatggattttagttatatagaataggaaccattcgatcgattcgaatcattcgaataactcgaatcactcgaatcactcgaatcacttaagcaaaccaacattgtgactttgaagttttttgaaaactgcccccccctccttttgcggaggatacggaattattggagattatgcttattatgtatatttttgcgtagtcctaagaaaattagttactagttactagctgaattagtacccactgtatcatgctaccccacttcactttgctgtgcaaatctctctcacttgagaaaactcgagttcccttttctttattgttaatcttgaattttcgtttatttcaagtatggatctttcgaaaaaaaaaactcgttgttagtcaaaaagaaaggtatcgttaggacgtaagaaatgtttgaaaatgctttgagcaacactcacacaaattatgaatgatcgcgtatacatatattagaagaaaatatatattaaatatttagctttaagatgttaagagctaccaaccgaacaagctgcaaacgttggcatttatttgtcttcaacaaaacagaacacaaatcaaaaaacaaaaacttcgaaaaaaaagaaaaaaaaaaacagaacgcgtagagcaatgagcgcggttcggataacatatgttatatacatacacaccaccaaccatacgcattaatatatttattacttaatcacaaaaccacattgcaaagaggcaaatcattcgaataaactaggctaggatccttaaaataaactaaagctgttcataaatgaagtcaaagcccaacaaaaaatccaacgtgttttggaaaatcgaatcgcgagaatatgatctactgaatatatagtttgcaataatcttagcttttaggcaataccaccaattgtactgatctttaatgaacaaacaaaatactaaacacaacataaacataaacataacataaataacattatgtatctgatggtataatttctaagacctaggtgtaatgaactttgaatttggattcgaatttgagtttgaatttgtttacgattgcagggaaactacgatttccaattcgtaacattaaactgcattattatttctgttttagcatagcgcttttttttttcttttaatttgttgtaagcaacaacgggttttttgtgcaatcgcttggtgttggttaaatggaaaataaggatgaaatgacatgacaaatctaatttaagcatcgtactttaaggtttatgcgggggctgtccattgtggcgccacgcccaccgcccgctgtgcagcccccgtggaaaatggaggagacgtcgaatgaacgagggagcaaatcgaagcttggcaatgaacgagtccttgtttccatatcctccctcaactaacttagttcttaactagaaaactttcactcacacacataactacacacatatataaatatcagttctgcacacaaaaacacacacacacacacacaacgcacaccttaatatatgtacttaaattaagttagttagtttaggcaatatcttgaacttgaaaacggatggcagcagaaaatttgatcaatgaaaatctgagacttccatgaaaaattccaaattttttttcattatcatatttatcgaattttgtgcggaaatgaacgaggaattacaaattattacaaatatattaaatatataacgaaaattgaacggaaggcaaaaaagcttagtttataaaatgatacagtttttt

SEQ ID NO: 24083 - DNA, 4409 bp, DROSOPHILA
aaaactttgccgccgagttgctgcagcgtttgacaccaaacactgccaccactgcacaaaataatattgttaacaatttggttaataatagcagagccgccacctccgttttagccactaaagactgtacaattgaaaattccccaattagcataccaaaaaatcagcgagcagaggacgaggaggagcaagaagaccaggaaaaagagaagcccgcagagcgggagagagagaagtccgatgagaggacagaacaggtagaaaaggaggagcgggtggagcgcgaagaggaggaggacgacgaggtggatgtcggcgtagaggcgccacgcccacgattctataataccggcgtggtcttaacccaggcccaacgcaaggagtatccccaagagcccaaggacttatccctaaccatcgccaaatcctcgccagcttcaccgcatatccacagtgactccgaatccgattcggactctgatgggggctgcaagctaattgtggacgagaagccaccattgccggtgatcaaaccattgtccctgcgcttgcgcagcacaccgccaccggcggatcaacgaccaagtccgccgcctccgcgagatcccgcgcccgctgtccgctgctcggtgatccaacgggcgccgcaatcccaattgcccaccagccgggctggcttcctattgccccccttggatcagctaggacccgagcagcaggagcccatcgattatcacgtgccgaagcgaaggagcccctcttatgactccgatgaggagctgaacgccaggcgcctggaacgagcgcggcaggtgcgcgaggcaagacgacgcagcaccattttggccgcacgagttctgctcgcccagtcccaaaggcttaatccgcgcttggtgcgatccttgcccggtattttggctgcggcagccggacacggacggaatagcagcagttccagcggtgccgccgggcagggctttcaatcgtccggttttggcagccaaaacagcggcagcggctcgtccagtggcaatcagaacgccggcagcggcgctggttcacctggatctggtgccggtggcggtggtggtatgggcggtggtcgcgacggccgagggaactacggacccaattcaccgccaacgggagcattgcctccgttttatgagagcctcaagagcggccaacagagcacggccagcaacaatacgggccaaagtcccggcgctaatcattcgcatttcaacgcaaatccagcgaattttctgcaaaacgcagcagcggctgcgtacatcatgtcggcaggttccggtggaggaggctgcaccggaaacggaggtggtggagcatcggggccaggaggtggcccatcggcaaatagtggtggtggtggtggtggtggcggcggcaatgggtacatcaactgtggtggtgttggtggtccaaacaatagtctcgacggtaataatctattgaacttcgccagtgtttctaactataacgaatccaattccaaattccataatcatcatcatcatcatcaacacaacaacaacaacaacaacaatggtggtcaaacatctatgatgggtcatcccttttacggcggtaatccctcagcctacggcataatactcaaggatgaaccggacattgagtacgacgaggccaagatcgatattggcacctttgcgcagaacattatccaggcaacgatgggcagctccggtcagttcaatgccagcgcctatgaggatgctataatgtcggacctggccagttcgggtcagtgtcccaatggagccgtcgatccgcttcagttcacagccactctgatgctgagttcgcagaccgatcatttactggagcagctgtccgatgccgtggacttgagttcattcctgcaaaggagctgcgtggacgacgaggagtccaccagtccgcggcaggatttcgagctggtgtccacgccctcgctaacgccggattcagtgacgccggtggagcagcacaataccaatacaacccagctggatgtcctgcacgagaatctgttgacgcagctgacccacaatatagtccggggcggcagcaatcagcagcagcagcaccatcaacagcatggtgtgcagcagcaacagcagcagcagcatagtgtgcagcagcaacagcagcacaatgtgcaacagcagcatggcgtgcagcagcaacatgtccagcagcaaccaccgccctcgtatcagcatgccacgcgtggcctgatgatgcaacagcagccgcagcacggcggctatcagcagcaagctgccatcatgtcgcaacagcagcagcaattgctcagccagcagcagcagcagtcgcaccaccagcagcagcagcagcagcaacatgccgctgcctaccagcagcacaacatctatgcacagcagcaacagcagcagcagcagcagcatcatcaacagcagcaacagcagcaacatcatcacttccaccaccagcaacaacagcagccacagccacagtcgcatcattcgcaccatcatggccatggtcatgacaacagcaacatgtcgcttccctcgccaactgcggctgcagcggcggcggccgctgctgctgctgctgcggcagccgcagccgctcatctgcagcgtccgatgagcagcagcagcagctccggcggcaccaatagcagcaacagtagcggtggcagcagcaacagtccgctcctagatgcaaacgctgctgcggcagctgcagctgctttgttggacacaaagccactcatccaaagcttgggcttgccgccggatctgcagcttgagtttgtgaacggcggccatggcattaagaacccgctggccgtggagaatgcccacggtggccatcaccgaattcgcaacatcgattgcattgatgatctcagcaagcatggccaccactcgcagcaccaacagcagcagggctcgccgcagcagcaaaatatgcaacaatcggtgcaacagcagtcggtgcaacagcagcaatccctgcagcagcaacagcagcagcagcaccatcagcaccacagtaacagcagtgcaagcagcaatgccagcagtcatggatccgccgaagccctttgcatgggctcatccggcggagccaatgaggattcgtcgtcgggcaacaataagttcgtctgccgcgtctgcatgaagacattctcgctgcagcgcctgctcaatcggcacatgaagtgtcactcggacatcaagcggtatctgtgcacgttctgcggcaagggattcaacgacaccttcgacctcaagcgccacacgcgcacccacacgggcgtccggccgtacaagtgcaatctctgcgagaagagcttcacgcagcgctgttccctcgagtcgcactgccagaaggtgcatagcgttcagcaccagtatgcctacaaggagcgcagagccaagatgtacgtgtgcgaggagtgcggacacaccacctgcgagccggaggtccactatctgcacctgaagaacaaccatccgttctcgccggcgctgcttaagttctacgacaagcggcactttaagttcaccaactcgcagttcgccaacaatctgctcggccagctgcccatgccagtccacaattagttgatggattttagttatatagaataggaaccattcgatcgattcgaatcattcgaataactcgaatcactcgaatcactcgaatcacttaagcaaaccaacattgtgactttgaagttttttgaaaactgcccccccctccttttgcggaggatacggaattattggagattatgcttattatgtatatttttgcgtagtcctaagaaaattagttactagttactagctgaattagtacccactgtatcatgctaccccacttcactttgctgtgcaaatctctctcacttgagaaaactcgagttcccttttctttattgttaatcttgaattttcgtttatttcaagtatggatctttcgaaaaaaaaaactcgttgttagtcaaaaagaaaggtatcgttaggacgtaagaaatgtttgaaaatgctttgagcaacactcacacaaattatgaatgatcgcgtatacatatattagaagaaaatatatattaaatatttagctttaagatgttaagagctaccaaccgaacaagctgcaaacgttggcatttatttgtcttcaacaaaacagaacacaaatcaaaaaacaaaaacttcgaaaaaaaagaaaaaaaaaaacagaacgcgtagagcaatgagcgcggttcggataacatatgttatatacatacacaccaccaaccatacgcattaatatatttattacttaatcacaaaaccacattgcaaagaggcaaatcattcgaataaactaggcta

SEQ ID NO: 24084 - protein, 850 aa, DROSOPHILA
MGGGRDGRGNYGPNSPPTGALPPFYESLKSGQQSTASNNTGQSPGANHSHFNANPANFLQNAAAAAYIMSAGSGGGGCTGNGGGGASGPGGGPSANSGGGGGGGGGNGYINCGGVGGPNNSLDGNNLLNFASVSNYNESNSKFHNHHHHHQHNNNNNNNGGQTSMMGHPFYGGNPSAYGIILKDEPDIEYDEAKIDIGTFAQNIIQATMGSSGQFNASAYEDAIMSDLASSGQCPNGAVDPLQFTATLMLSSQTDHLLEQLSDAVDLSSFLQRSCVDDEESTSPRQDFELVSTPSLTPDSVTPVEQHNTNTTQLDVLHENLLTQLTHNIVRGGSNQQQQHHQQHGVQQQQQQQHSVQQQQQHNVQQQHGVQQQHVQQQPPPSYQHATRGLMMQQQPQHGGYQQQAAIMSQQQQQLLSQQQQQSHHQQQQQQQHAAAYQQHNIYAQQQQQQQQQHHQQQQQQQHHHFHHQQQQQPQPQSHHSHHHGHGHDNSNMSLPSPTAAAAAAAAAAAAAAAAAAHLQRPMSSSSSSGGTNSSNSSGGSSNSPLLDANAAAAAAAALLDTKPLIQSLGLPPDLQLEFVNGGHGIKNPLAVENAHGGHHRIRNIDCIDDLSKHGHHSQHQQQQGSPQQQNMQQSVQQQSVQQQQSLQQQQQQQHHQHHSNSSASSNASSHGSAEALCMGSSGGANEDSSSGNNKFVCRVCMKTFSLQRLLNRHMKCHSDIKRYLCTFCGKGFNDTFDLKRHTRTHTGVRPYKCNLCEKSFTQRCSLESHCQKVHSVQHQYAYKERRAKMYVCEECGHTTCEPEVHYLHLKNNHPFSPALLKFYDKRHFKFTNSQFANNLLGQLPMPVHN

SEQ ID NO: 24085 - DNA, 8699 bp, DROSOPHILA
ttcaataaggcattcaagctttaaaatttattaatgcatatgttatctcactgtattgttttaatcccttaaatttcatttgaattgttagaaatggtcgagagttatatgagttggaacttgtttgaaacagctctgttttgaattaatttaaattatatcagctaatttattttaatcaattaatccttctgttgtgtaccctctatctgacctcttcgatgtgaacgggtcacagcacttattttaggcagttgtgtaaactgggtattacctaagattgattaatatcgattagtttaagaaaatatcggacatctacctagaagagtctgtcgtgatccaggcgaagtgcgagtgagagcatcgtatagttactttttatttaaattgcgtgtgttaaaatgaattagcacgagtagtgaatgtttttgtgtgcgtaatctttcgaaaacaagcgctttgtcattaaaacgaaaagattgccaacagcccaccacggatagaatgtacggagtaatgcagctaaattgaagtagaataattttaatgtatggttgaagacgtactcagtacgattaaaagcgaaactttctgacataacctaagtgtgcataacctaaatggtcgcaaaaacccaagcgtttagtttcggacatacgcatgtgtgtatcagtgcagaataaattctgttcgcttgtgtatcgtgcattggaaaagtctatatgtacatatgttccagtcaagagttgccacgctttaaatcttttacataatgacaaagcaatagggaatttaaatgtgtcgcatttgctttgaggttttccacaccaacagttaaaatttagtaatagtgtaattaaaaataaagtaagcattttgcatatttgcattagtctatactccacatacctttccattccgtctttaaattttgactaggtggcaatattgcaagcaggaatatctgtatgggtttatttaatacactagtaactgccgtccccatcgtcgaacgtgcgcagaaatttatattcaattacatcgaattataattattgttgagtctaatcagttttcgcattcaagattgttattaatcccagtttattttgtgaaatatgaaaaactataattgattgtcgaatgtgtgtatgttttacaacacatacacactttgtgaactcgtcaaagtggcttgacatgcatacacacaaaaatgcacatatatttacatatatagagaaaatcaacttctcgttcagtaaaggcaaaaattgttgcaaatattcggtgaactattagcgtatacacaagtgttcaattttactataaacgcatattctggcaatagatattaatttctaatttctgtttggtaggttttagttagatctccattttgtgacgttctcagcttttcgcttgtatttctacacatagggtacaagacacgcgaatatactaagtattgtacaatgacttctctacatatgcactagagtactgaaaatgtattcatacaaatgtatatacatgtatatatctatcgcattagtctttttgccaatacttgcatatatacaggttgtgtaaatacattttaaattctaagtttatttgagcataattgcaagtgcgaaattaggaaagggagacataaaatagggtgcttccgtcaatgtctgcctgcccagagttgacaaattcattttacttgtgtacatatgcatatgtatatttatataccattacagagttgtgaatttaattgttttattttttgacatgcattcgtttttcacacaggaatttgtcgttaatgtgggtggggattctgccggttgggcagcagacctggtaggtcagcgatcgcgatgcatatttcatttttaaaattctttatgtacatactaagtatacatgtttaactcctgtcaaatgactcccactcttatatacccatatgtatgtcctcagactttttgaatcgattataaagcttaaatttttatgatttctccttcagaattttaactgatgttatgcagttaaaaatctgtaaagaagatattgattaagcctacgaaaagctgatcagaattaaaaaattttttaagaacaacgaacaatagaaaaactaaaaacaaacgtgcacaacgtaggggtcactagaatctgcatgcttattctcaactgtctagcttttatgtcgaaaacgcttccgctatgtaacatactttagaacaaatctggtataccatataccattttactctattaataatgtgtataaagcataaacgtatcacggtgattaagtttatttatcctgtgtatatacaagaaaataaaaaaagaacttagcaatttgatttagaatgaatattttgtaataaaaataataaatgttttctatatttctacagaacacggaaagaacaaggattcagattaagtcattccttttcgattaaattaaataacttttaaaaattgccataaatgcttatgataatgaagttaaagatcaagtggatgttggaatagtaaggaatgctacttttgaagctgacaatcagttagaacacttgagcactatgcgtgaagcccttttttcccaagatggctggggctgtcagcatgttaaccaggatactaattgggaagttcccagttcgccagaaccagccaataaggatgcacccggtccaccaatgtggaagccaagcattaacaatggtactgatctttgggagtccaatttgagaaacggaggtcagccggccgcacagcaagttccaaagccgtcgtggggtcatacaccatcctctaacttaggtggaacatggggtgaggacgacgatggcgccgatagtagtagtgtgtggactggaggagctgttagcaacgcgggatccggagctgcagtgggagtaaaccaagccggagttaatgtcggtccaggcggtgttgtttcgtctggcggacctcagtggggacaaggtgtcgttggcgtcggacttggatcaactggtaggcctaatatctattagaattaatgaagttaagcgcaaacgatcagataaaggctctagcttttccctcaaaatgtgactaacaatacatgataaaaacataaagtgtagtaattgaagttggagccttatctggggaattacctattctaagttctacagaaacttttatttcattaacccgaaatacttttatatttctgctgttatttaaggaggtaacgggtcaagcaatataactggatcgtctggagtcgcaacaggtagtagcggaaactccagcaacgctggtaacggttggggagaccctcgtgaaatacgccctttgggagttggtggctccatggatattcgaaatgttgaacatcgcggcggtaacggttctggagcaacttcgagcgatccacgagacattcgcatgatcgatccgcgtgaccctattcgaggagatccccgtggaatatctggtcgtcttaatgggacctctgaaatgtggggtcatcatccacaaatgtcccataaccagttgcaaggtatcaacaaaatggttggtcaaagtgtagcaactgccagcaccagtgtcggaacatctggctcgggcatcggtcctggaggtcccggtcctagtacagtatcaggcaatatcccaacacagtgggggcctgctcaaccggtaagcgttggtgtaagtggtcccaaagacatgtcaaaacagataagtggatgggaggaaccatcaccaccgcctcagcgtcgcagtattcctaactacgatgatggtacatcgttgtggggtcagcaaactcgtgttcccgctgcaagcggtcactggaaagacatgactgattcgataggtcgtagtagtcatctcatgcgtggccaaagccaaacgggaggtataggaatagccggcgttggaaatagcaatgttccagtgggagccaatccaagtaatcctataagcagtgtagttggacctcaagcccggattccatctgtgggcggcgtacaacacaaaccagacggcggcgctatgtgggtgcattccggcaatgtaggtggcagaaataatgttgctgctgttactacttggggagatgacactcatagcgttaatgtcggcgctcccagcagtggcagtgtatccagcaacaattgggttgatgacaagtccaactcaaccttggcacaaaactcttggagcgacccggcccctgttggagttagttggggcaataagcaaagcaaaccgccaagcaatagtgcttcatcaggttggagcactgctgcgggcgtggtggatggggttgatctaggatctgagtggaacacgcacggggggattattggaaaatctcagcaacaacaaaaactagcgggacttaacgtgggaatggtgaacgtaattaacgcggagatcattaagcaaagcaagcaatacaggatccttgtcgagaacggctttaaaaaggaagatgtagagcgggcattagtgattgctaatatgaacatcgaagaggcagccgatatgctccgtgccaactcatccctatcaatggatggttggcgtcgacatgatgagtcccttggatcttatgccgaccacaatagttcaacaagcagcggtggatttgctggtcgttacccggtcaacagtggacaaccttcaatgtcctttcctcatgtaagtatcgtggaactaagcataatgaaggtttttcgcctaatgataacaatatcttaaaataaatatatgtaatcactaaattatgtattaaaagcgcgacctcgtactcatgggcacacaaattcttaattagcgacggtcccttccaacaggtggcacatttggcagtaattttaatagaaagttctatgtactcaactataatatgaaagtttgtttaaaatattttgtgaatcaatctactgaatgcttttttgtttgtttgtttgttgcgacatttgcgcgaattggtatgttggttttatcgtaggttaccgtagtttggtattcgtctcgtttgactcttggacattttaagacaatataatataaccgtgaagatttagaaagtgcgggtcctagcaacgcttacgagcgtggttcatgctgtaagcatagcatttgtaattcatttacatttgttaatttatatttatatttataccttttactcgcttagtcaaagggtatagtatattattagaaaagtaagttgcggggtagtgagtggattcaactctgtggagtgtgtatttattatcactgtccaaatccttatatctgtttccgtccgctccactaaagctctctttgaaattgaatttgctttttttcttaaatctgggtgtagtattttcacagccgaactattcgcctgttccacaccttcgtgtaaaaacttttaaatctaaaaaccgaaggatgatatattaaccttaacctttatttgttttgcagaataaccttatgaataacatgggaggtaccgctgttactggaggtaacaacaatacaaacatgacagctttacaggtgcaaaagtatttaaatcaagggcaacatggtgtcgctgttggaccgcaagccgttggtaattcttcagcagtatctgtcggatttggtcagaacacgtctaacgcagcagtggcaggagcagcctctgtaaatatagcagcaaatacaaacaaccaaccgtctggtcagcaaattcgcatgctaggccagcaaattcagttggccattcatagtggtttcatatctagtcagatattgactcaaccgctaactcaaacaacccttaaccttttaaaccaacttcttagcaatattaaggtaatttccatatttaaaaggcagttcatgttacggaattaaaattagtatattagaccggaataaaactgtaacatgaaaaactgccctaatgggacccaacaagtatttgttggttgcgatgcacagactcggaataaagtgcctgaagcagtgtaatcaacaaaaattgtttgagtcctccaatataatttattaaaataattattattatttaataaaaaatactagcccttactgaatttaaaatgtgttctttcagcatctccaggctgcgcagcaatcccttacccgcgggggaaatgtcaatccaatggcagtgaatgtggctatatctaaatacaagcagcaaatccagaatttacagaaccagataaatgcacaacaggctgtgtatgtaaaacagcaaaatatgcaaccaacttcacaacaacaacagccccaacaacagcaacttccttctgttcatctaagtaactcaggcaacgactatttaagaggtcacgatgcaataaataatttgcaaagcaacttttctgagctcaatattaataaggtaaacaaaatctcaagtcgtaagtctgaactattgttttctatctcgacttaatttttggaggcgtttccgtctacgcattttttcagcaagttgaaaaattgaaaactaaataataattaaatttatgtgtgtcatattttatgtgtcacacataaattcttcgcttaaccatattatattaagcaaaaaagggtactattatttattttttcggtttgttacctttttaatcatctataaatattgttaatgtacaatgtttaaataaggatcgggggtattgatggggtttgctatgatttgggcacctctggtgcggtttcccgccttaatgacgtctccggagctacggtgtctttcgaattttaatataaacacaaaactgcacaaattcagtttttcaaatttatatggttgtagggatgttttaacaaatcacttaaatgctttcagccaagtggatatcaaggagcgtccaatcaacaatcccgattaaatcagtggaagcttccagtattagataaggagatcaactctgacagtacggaattttctcgtgccccaggtgcaacgaaacaaaatttgacggccaacacaagcaacataaactctttgggtcttcaaaacgataggtaagataattagataacttcacctttactctcttagttaatacgtatgtataaatctaccaaacagatctaaaaaagatatattctaactttgcttaacttactagcttttcttaatggcatgttgctattgtaattacgcggtgtaaaacatgaaacaaaatgttatagttcgtgggactttatattcgtacatttactcgtcaagtaaaaatatatattaaattcgttaaaaattgctaactaaattgtttctcaccatattaccgcatcaaaatagtttgcatgctagttagtaatttggaagtcttttcttttcgcatccgaaaaagctgagtaacctgatgcgagatacttgattatttggtctactttgtttgtataccctagttggctactacatttgcgactcaatatcagtatatttatagttgatcattatcaacaggcacgtcattctgtccgcccgtcggtcctttccgaaaagttcgttaaaaggaatgtaacaggcagaaggaagcgtttccgaccatataaagtatatatattcttgatcagtttcaatcgccgagtcgatctggacatgtccatctgtccgtatgaacttcgagatctcaagaacttgtattagtcttgtaaatttttatcgatttgcaaaaaaaaaaaaaaaaaaaaaatacggtagcttgtcgaacgagtgtgccgaccacatatttggtttcataatggcaaatctagttgaattggttcagtattttaagacaatatgaagctaactaacataatgtaatttcttatgtgatcatcgtattttatagtacatggtcaactggacgcagtattggtgacggttggcctgatccctcatctgataacgagaataaagactggtctgttgctcagccaacttcagcagcaactgcttacactgatctggtccaagagtttgagccaggcaagccatggaaggtaaaactgttaatttacataaaatgtaaacatatccaagcagaagtttgattttaagggttcacagatcaaaagcatagaagatgatcccagcattacaccaggaagcgttgctagatctccattgtctattaattcgacgccaaaagatgctgacatatttgccaataccggtaaaaattcaccgactgatttaccgccactaagtttatcgtcgtctacatggagttttaatccaaaccaaaattatccgaggtaatattcaaatgtgaaaatatatatcccaaatatcagaatcgattatatttcaatacagtcacagttggtctgacaatagtcaacaatgtaccgccacttcggagctttggacaagcccgctaaataaatcatcgtctcgaggtcccccgccaggattgactgccaattcaaataaatctgcaaatagtaatgcgtcaacgccaacaactattaccggaggtgcgaatggatggttacagcctcgaagtggcggtgttcaaaccacaaacactaattggacaggtggtaacaccacttggggctccagttggttgcttttgaaaaatctaacagcacaggtatgttcaaaatctaaatttttctcaccatacacagttactaatgtatccaattactatttcaat

SEQ ID NO: 24086 - DNA, 3375 bp, DROSOPHILA
cgtccccatcgtcgaacgtgcgcagaaatttatattcaattacatcgaattataattattgttgagtctaatcagttttcgcattcaagattgttattaatcccagtttattttgtgaaatatgaaaaactataattgattgtcgaatgtgtgtatgttttacaacacatacacactttgtgaactcgtcaaagtggcttgacatgcatacacacaaaaatgcacatatatttacatatatagagaaaatcaacttctcgttcagtaaaggcaaaaattgttgcaaatattcggtgaactattagcgtatacacaagtgttcaattttactataaacgcatattctggcaatagatattaatttctaatttctgtttgaacacggaaagaacaaggattcagattaagtcattccttttcgattaaattaaataacttttaaaaattgccataaatgcttatgataatgaagttaaagatcaagtggatgttggaatagtaaggaatgctacttttgaagctgacaatcagttagaacacttgagcactatgcgtgaagcccttttttcccaagatggctggggctgtcagcatgttaaccaggatactaattgggaagttcccagttcgccagaaccagccaataaggatgcacccggtccaccaatgtggaagccaagcattaacaatggtactgatctttgggagtccaatttgagaaacggaggtcagccggccgcacagcaagttccaaagccgtcgtggggtcatacaccatcctctaacttaggtggaacatggggtgaggacgacgatggcgccgatagtagtagtgtgtggactggaggagctgttagcaacgcgggatccggagctgcagtgggagtaaaccaagccggagttaatgtcggtccaggcggtgttgtttcgtctggcggacctcagtggggacaaggtgtcgttggcgtcggacttggatcaactggaggtaacgggtcaagcaatataactggatcgtctggagtcgcaacaggtagtagcggaaactccagcaacgctggtaacggttggggagaccctcgtgaaatacgccctttgggagttggtggctccatggatattcgaaatgttgaacatcgcggcggtaacggttctggagcaacttcgagcgatccacgagacattcgcatgatcgatccgcgtgaccctattcgaggagatccccgtggaatatctggtcgtcttaatgggacctctgaaatgtggggtcatcatccacaaatgtcccataaccagttgcaaggtatcaacaaaatggttggtcaaagtgtagcaactgccagcaccagtgtcggaacatctggctcgggcatcggtcctggaggtcccggtcctagtacagtatcaggcaatatcccaacacagtgggggcctgctcaaccggtaagcgttggtgtaagtggtcccaaagacatgtcaaaacagataagtggatgggaggaaccatcaccaccgcctcagcgtcgcagtattcctaactacgatgatggtacatcgttgtggggtcagcaaactcgtgttcccgctgcaagcggtcactggaaagacatgactgattcgataggtcgtagtagtcatctcatgcgtggccaaagccaaacgggaggtataggaatagccggcgttggaaatagcaatgttccagtgggagccaatccaagtaatcctataagcagtgtagttggacctcaagcccggattccatctgtgggcggcgtacaacacaaaccagacggcggcgctatgtgggtgcattccggcaatgtaggtggcagaaataatgttgctgctgttactacttggggagatgacactcatagcgttaatgtcggcgctcccagcagtggcagtgtatccagcaacaattgggttgatgacaagtccaactcaaccttggcacaaaactcttggagcgacccggcccctgttggagttagttggggcaataagcaaagcaaaccgccaagcaatagtgcttcatcaggttggagcactgctgcgggcgtggtggatggggttgatctaggatctgagtggaacacgcacggggggattattggaaaatctcagcaacaacaaaaactagcgggacttaacgtgggaatggtgaacgtaattaacgcggagatcattaagcaaagcaagcaatacaggatccttgtcgagaacggctttaaaaaggaagatgtagagcgggcattagtgattgctaatatgaacatcgaagaggcagccgatatgctccgtgccaactcatccctatcaatggatggttggcgtcgacatgatgagtcccttggatcttatgccgaccacaatagttcaacaagcagcggtggatttgctggtcgttacccggtcaacagtggacaaccttcaatgtcctttcctcataataaccttatgaataacatgggaggtaccgctgttactggaggtaacaacaatacaaacatgacagctttacaggtgcaaaagtatttaaatcaagggcaacatggtgtcgctgttggaccgcaagccgttggtaattcttcagcagtatctgtcggatttggtcagaacacgtctaacgcagcagtggcaggagcagcctctgtaaatatagcagcaaatacaaacaaccaaccgtctggtcagcaaattcgcatgctaggccagcaaattcagttggccattcatagtggtttcatatctagtcagatattgactcaaccgctaactcaaacaacccttaaccttttaaaccaacttcttagcaatattaagcatctccaggctgcgcagcaatcccttacccgcgggggaaatgtcaatccaatggcagtgaatgtggctatatctaaatacaagcagcaaatccagaatttacagaaccagataaatgcacaacaggctgtgtatgtaaaacagcaaaatatgcaaccaacttcacaacaacaacagccccaacaacagcaacttccttctgttcatctaagtaactcaggcaacgactatttaagaggtcacgatgcaataaataatttgcaaagcaacttttctgagctcaatattaataagccaagtggatatcaaggagcgtccaatcaacaatcccgattaaatcagtggaagcttccagtattagataaggagatcaactctgacagtacggaattttctcgtgccccaggtgcaacgaaacaaaatttgacggccaacacaagcaacataaactctttgggtcttcaaaacgatagtttcaatcgccgagtcgatctggacatgtccatctgtccgtatgaacttcgagatctcaagaacttgtattag

SEQ ID NO: 24087 - protein, 941 aa, DROSOPHILA; identical to SEQ ID NO: 23934

SEQ ID NO: 24088 - DNA, 19165 bp, DROSOPHILA
gacacatcatatgtatgtacgtatcagcgttggcgaataaaaaagtgcagtgcatacccggcggacttatctaatagttttcactttcaatgtcgagcgaaagctctgctgcccctgacgcggtcgctgcctcgcttatcgcgattcgcaattcgcaattcgcaattctcaattcgcatttcagcgcgagcgggacggaaacaggagagagacagagagagaggcggcaagagagagagagagagagagagagagggagaggtgaaatgccccgaaagttgtctgtattcaaattatttatttttttttgggatttcttttctgcaagatgtccagatgggaacagagcggagcgaccgacccccatccctgtttaccccgcaacgcaccgtaccgtacaagtgttcttggtatattcgcatttgttatagttcgctttttttcactcctccctccatttgcgatgcgttggctttttcactccgtttttttatgggccgtgttttttttcatccactttttttcggcggttgtgcactcgttataagtttttgcttgtgctgccactgctgcttcttctgccgccgcgagtgctaattgtcgtcttgatagtttatttaattttgattcgccgtgtgacatagaaatggtttttgctgctgcgtcgtcgccgtggttgacattttaaactgcatttgttaacaatttttaaacatttcgcatagttgcaagcgaaacagtagcagaacaggcaaaaaacgcaaaagcgagcaaaaaaccatcgcaaagcagaaacaaatgcacaactttcagctagcgcggcacaaatccgtcagaaaaagcagcagttaaatttcaaggcgaactctgaactgcagtgaaccttagtagagggggggttgtttggtatatcatttggggtggtgggggctgtctgatccacttgtaatttcaactcaaattctaattgtttgctcttccgctttctttctttcgcttgcagttaaataatcattagtgaaaggtccatctgcagcttcacaatccggcaagcggtctagtaatcagcagccagaaggagcagcgcatcgcatcgtaacgcatccttagtttcggtgggccaggccgccagaaagccgtcaaaatacgaaagaaggtgacctcgaagaaggccagcgttgtgtcggttgacgacgatcacaacaacaacaacaaccacaacaacgaccacaacgctcggcagcccacaaacacagcgaacacaagcacacccacaccaataggaacacctatagacacgcccacgcccacgcccgttgacccagagcaggagtgcccacagcccaggagcaacccgatccacagccagaaccagacacccatcgagatggacgacacacagcacttctgcctgcgctggaacaactaccagagcagcataacctcggcgttcgagaatctgcgcgacgacgaggccttcgtggatgtgaccctcgcctgcgagggacgcagcatcaaggcacaccgcgtcgtcctctccgcctgcagtccctacttccgcgagctgctcaaggtgagtgaccatttaacatctgtgatcttccatcaatttggtagctaccctgcattcccaacatactggcgccctgtggctgctaatctcgatagataaggacctctcacacacacgaactcatacaagatgaacggtgaaaaagaaaacacaatgggcttaatgcgctctgtggttaaatgtttgcctttttcctcctcctatgcttttgaaattgcaattcacacattcacagttgcagcggatgcagcaatcttcttgcgagactgtatgcgtgacctacttagcacccatggcaatttctccctttttctccctccctcgcgatctgcgtctttatcttagccagtgcagcacagccacacatgtgcaacagccgccaaagttgctgcagcagcatcctgctttcattcgactgccagtgcggatctcttcattatttcacatatgtacatatgtatgcatgtatgtatgtacaagttggatccgaatgtgatcggcttggtttgccaaagtagaaagaagaccaggtcctatccaccattgtggccacaataattcggaaaagctggctaagcaaaaagttggagaggggtagttgtgtgtttttggccaaagtggcgtggcgacgagcacgtttagacgagaggggagcagcagatggctggcgttttgctagcgttttaatttatttagttgcacaccacggcaaatagcgcctgcagtaagaaaactgacaagaaaggcaccgacagccgcgatagacacaaaaacacggcaattgtggacgggctgcggaaggggaaagggtggaaagggaaggcaggaaggaaggaaggaaggaaggaaggaagttgtgtgtacgccgtacagtcgaagcacgttatgaatgccggcgcaaggcggcagggggatgcagtgagaatgagtcgatggcagggttcttggcgctgggacaacgctacgtatgattgatttgtgttgcctgatcatgcaacgcacgcggatctgcgaaaactcgcagcgcgcaacttgcaacttggaactcgcaattggctgctaggaaacttgcaacttggaacccgcaggtcggaagtcagaactagagcgggctcaaatgagaccgcacacccttatttcgcttatatagccggctaatccttgaagttggcccggctcgaagtcaaagggaactggcaactaatgcagcccgccccaaaggccgcagtttggttcattatttttattatgacattaaaattatgtgattcgctgttgttgccccaacatttacgtttgcccgccaaaactttggcgctgcctgcattctgcattgaaaatatttgcacgcaattgcggttttgagcgacagggacgaagggctgctaagttagactagttagagagagacgggaagggacagaacgggacagcctcgacgtttgccatttgcattgttcgagctgtcattggagccccggagcggtggagcccaggagcactggcagcggtgggggtcaggaggaggtcctgcagcagaaattatataaattacaaagtgccccgcccccaggaacaccgccccccgtttctgttgctgtttcagttgctgtttctgtttctgtttctgtttgttcaactcttgtctctttcgacatgatttgttaacatgatagaaaacttgctgggctttccgttattattttccgtttttgttccaaattatgcgcgaggcaaacaaaaagagtgtagtttgtctgttctgtttggtttttgggaagaactgcaattaggagagagtttttagtgtggaggggcaggggcaaaatggggaatggtgagtggggagtgggcaggggcccaaatccagcgctgattacgcaatggcaatggctatggcaactggggacgcgaaccaaaccaagccgaaccgaatgcgaaacaagaacatgtcaagaagtcccgggcaaactggaaagtttcttcccccaactccgtccgtccgtccgtccgaacaagaaattgcgcgagcagaaaaagtcggcatttaatttgttaaaaaggccaactaaatgcagcgggacaaaaacagcaacgccaacaaaaggcaacgggccgactgaatttttctcgagctctttttgtgcattcccatttgttgctgcagtcgctgtggaattatgtacccaagaaattagtatacaaaactttgctggctggcaggcagcacaaaaaacagcaaaggcaactgcaacaacaagagcaacaacaacaaagggccctggcacaaaactttgtaaattcaatttgaaatacatacaagtgggcagtaggtggtgaacaaaggacagagacaacggtggacagtagtcgcaactggcgaggaaaactggacacggccgttcagccgtccagccgaacaactggacacttggctcgcgcccagaaatacccaaccccaacctcaatcccaacccatcttgcccagcacttggcgtcgcaattgtgcgcgactttgcgcctatgcataaatatttaattaactgcagcgcattattttaattaggtgtaaaaactgccaaacaacgaatgccagcgacaaattgaggggctcgggggactcggatacagatacagatacagctacagagtcagatacagctacagattcagatacagatacggattcgttttgagactcagagatgccaggggctagaggtgacttaatggctgctactgagctgggggcaattgctaaaagcatttctggcttttgtgtaatgacctgggaccgggccacgcccctccgccctccattcccatttgcatgatgtgctttgcccaccagttcaccatctcaccatctcaccaactcaccagctcaccagctcagctgcagctgcagtagagatcattcgatcggcgtctcctgacgcatttgtctttctttcgtcaaattgacctcaatttcgcaatcgctgatacatatatgtatatgtatgtatgtatgtatgcaagtgcatatatgcacaatcacactctcactggcaatcttttagcgctaactcaatcgcaaatatccagtgcgtgtgtgcgagggcatataaattgcaaaagccagtaaataagacaaacacacacggaatgcagggtctttcagggcagagcaacaaaagacgaggcgagacttgacccaatttctagccaggcagcagcagcaacagcagcaaaaaacagaaactgaaactgaaacggcagaggagcagctccctttgttggagttccacttgataagtgaaatttgcagtacagtgtacacacacgcagcgtaaactggaatgcactggccctgaatgtgctccaagtggaatggggagtggggaatcagatcggatcgaattggatggggatggggatggggtaggggatagggatgggataggaaaccacacatgccagaagaaataaactgcagctggctggcggcgaaacgagcgaatgcaaacttcaaatcgctctggcctgttgacattttagcgacaattgaaggttgtctgggccagagaaccctgataattgccagggcaaacaggcttatcgagggatccagagttggggacctggttgactcacccaccgattgaggggccaaccgagatactatacgtacatatctgactgactaaaaccaccactcaaattacagagcacaccctgcaaacacccggtcatactgctgcaggatgtcaacttcatggacctgcacgccctggtggagttcatctaccacggcgaggtcaacgtgcaccagaagtccctgcagtccttccttaagaccgccgaagtgctgcgcgtctctggactcacgcagcagcaggcagaggacacacacagcgtgagtattggccatgggccagcagtcgccgcagtacgagcccctctatattgccaactccccctccgcccgcagcatctggctcagatacagaacctggccaattccggcggccgcacgccgctcaacacgcacacccaatcgctcccacatccgcaccatggctcgctacacgacgacggcggctcctcgaccctcttcagccgccagggagcgggttcgccaccgccgacggcggtgccatcgctgccctcgcacatcaacaaccagctgctgaagcgcatggccatgatgcaccgcagcagtgccgccgccgccgccgaggagacctcccacgcctttaagcgtctgcgcggctcggacaacagcctgccgctgtccggcgccgttggcagtggcagcaacaacaacagccccgacttgccgccgcttcatgcgcgcagcgcctcgccccagcagactccggccgacttcagtacgatcaagcaccacaacaacaacaacacgccgccgctgaaggaggagaagcgtgagtgtcccagtggaaactgggtttcggattggcattggtgagcccaagggtactaaacactttcattccatttcccgcaccgttaggcaacggacccacaggcaacggaaactctggcaacggcaatggcaatggcaacggagcgagcaacggcaacggaatctccatcagcgacaagctgggcagcctcacaccttcgccgctggctcgagcgggcgccgatgatgtcaagtcggagcccatggacatggtctgctctaacaacaatgccaatgccaacgacgaacacagcaacgactccaccggcgagcacgatgccaatcgctccagtagcggcgacggcggcaagggatccctgaggtaggtcgcaccgcacacctcgccggaacgcctaacatatctggctcggagcactagctaacccttggtatcctcattcgattgcagctccggcaacgacgaggagatcggcgacggactcgcctcccatcatgccgcccctcagttcatcatgtcgccggcggagaacaagatgttccatgcagccgccttcaactttcccaatatcgatccctcagcgttgctaggtgcgtatgagcaacgtgctcagttaacagctcagttaataactcagctaactgaccgaccaactaacgctataactcttttcctctccccctctgcccacacatgacgtgtcacccaacctgtcgggttttggccaactctaggtctcaacacacagttgcagcagtccggtgacctcgccgtgtcccctcaaggtgagtcagaacatttctctatccgtactctattgttccgctctatttgcgctcaaaagctcattattacattttttacatcaaatgcaaatgcaaatgcaagtaccaaaataatataccagagtctatccaagtcagataccagataccaaaagaaatgaaaggctaaaagcaaacgtaaaactaaaagtaaagagaatacgaatacaaatctaaatccaaatcaacaaaaaaaaaaaaaaaaatgagagcaaaaaccataccaaagttaaatccaaaaccagagccagaatctaagtcgaaattactaaaaaaaaaaaactgctgagagatcatttgattgcctgtaattttgttgaattttgaatatattttttaacgtaccttttccgtttcgttgtaattgtcaaaatatatcgttatcgttttcattttcgttttcgttgatcttttgtttctttcgatttttgcgtttcgactgacttgaggacacacacatgcatgcatacatgtcgcatatgtatgcgtgtcgatcaggagcaggacttttgatttaactttcgatttatttcccgttggactcaactcgaatccgcacccgcaaagtaaaagaacgaacccgaacttgatccttggaaccaacggcagacccaaatcaaaccgaacctcctcacctcctcaccaatcctccggttcgttgcgattccaagtcgagttcccgtcgtatcgtatcaagtgtataaatttctttcttgtttgattgtttcgatggtaaatgttttcatttgtttcggtcacactcacaccctcacacacgcacatgccagaactgcagaatccacgggcaagaacccagaaagtacgccgccccccccccttcccccttcccccaacaagaagattcacctgaccacccctttccacccactaaaaaaaaaaaaaaaaacattaaaagaagtacctgcacatgcacttaaacgattttccatgtcatccatgttgcgtactaaacgacgctggcctcgagatggcttgacgcataatgaatactgcataatgaataccgcataataaacaatgaataatgaataatgtgtaatagcaaagcagggtaattgctaaataaacgccagccccgaaactttggcaaacactcaaacatcatcatgcccgactgccgctccgccaggcttgtttgatgaactacgcaaaattaattaactcgctgctttccagcttcagctcatctgccagccgcagagtgtttagcaaaattctatcacaagtttcgcgccacaccagttgcggtgtgtgtgttctgcatgcggtcaggccgcaacaatccgattccctggcaagtgccccacatggcggcaaagcggcaaggcggcagggcggtagagcagacccccagcatcacccataagtcccaggcccaactacaactagaaaccgaatgctacacgacgcactctgacgtttatgtttattaaccgctgttgtttcgactgcgcaatccgcttaccatttcatttccgtttgtgttctgcatttattcctttccgtttcgttccgttacgtttcattttgtgttccaattatttcgtgttccttgtaagaaacccaagtaaactgatcaaacacaagcaaaatgtactacacaacagcaaaatgtcgcatccacccacaaaatgcaatacacacacgccaatacacgcaatattacaaacaacacacgcatagatgttccaaaaattgtcccacagttagaaatactagtaagtttcgttttgccccaatttgcattccacggccaaacagcctcctcctttttttgttcgtttaaacccaaatcagaatgggtcaggaattagagattaacttgactatgatttcggtagagttctcgattcacaaatgtgtctatttttcgttcgttccttttcgttacgttctttttccgttattcccagtttcaagaatatggctaaataaaattaaaaacactagacatgacacgggaaaagccccgcagagaagcaaacaccgagtacattttgcaatcgaaattttattggtgtgaacttttagtttccatgtaaaacgcaacgcatttgaagatcgaatatatacatacctacataatatatcataatatatattgaatattgaactctttcctttatttgtacgtcgtcgtgcttgtgtctaaaactatgtaaaccccacccgaaccaaattaaccacccatcgacccgatcccattagcaaagtcaaaagaaaagctttatttacaacaattgcattcgaacgaattttcacattaattttcaatgtgtcttttgttaacaactgtcgatgcccccgcagcctgtgatggagggaaaagcggttttcgtttagtttaccaaccagttaacccctgaaatagacacccccatcgcccgccccattgcccctgggtctgtctctctagcttgtcccctcgaattcggccacactttgctttgagcacacatctgttcacgaagcccgaccaaaaccccctaaaaccacaaccaagcccaacaagtaccccacagtcacacactcaaacccaaactcgccgcaacgaatacagaagtcagtgcaaaaccaggttcacgaaaatcctttgcaagcccagaacctctagcccttgatccttgatctgagtcccgaggggtggacggatcagtcctaactcagcacatattggcaattgttcactcatgcgtacacagttcacagttaggtacagtcacaccgggcgcgtctcgtctcgtttcgtttcgtttcgtctcgtttcgtttcgtctcgtttcatttcggtcaggtccgtgtcgcgcctctcgttccacactcgaaacacaatacggccacactgcaggttcacttgtttacttggccacgcttactcacagcacgcacatacacacacacgcacacaggactctcacactcacaagggggtccgtgaggtaaacttgatagaaggggtaagcccttcgcctctttgagtagtcgaaaagcacacactacacactcacacacatacatacatacatacatgcccgcccacacaccagcacacatatacccacacatacatgaactatattatgcgctcaaaaacacagctaacaaaatgatcaccagagggcactaacaccgatgttgatcgactaacgctaatctttatttactttccaattgtactaaccgaccaaaatttaaaatcccccaataatcgtgagacctatatatatttatatctacctacccacacacgtatatatatatgaatcaaagtatatacatacatattgttaagaattgatcgatctaactccctgtatacgtatataaatccgctttactaaacccccaatggatccaaaatcaaaataccacaatcgtccactgaggcgaccaaagcagacaactcgatacatgaaacaataacacccaacgcccctactcccacccaaccacctcctttcttccaagtcaaacaccaaacccaaacaatccacacacccacaccaccaccagcacaaaagaacacaaactgagattaccaactcaaggctttaagtatataaatttgattgagaaaccgctttaaattatgctctatatatacatatatatatttgttgctccttttttaaaaccaaagaacacaaacacacacacaaacactgtgagaaaaggagaattcagaattatatcttacgcttagcatatctagaataaattaattactttaacttccgtgcgaagcattcaaaattcaataattttaagatccacaattggtgacccaggcaatatgaaaattgaagagcaaaaatcgaaaaatgtatccattactaatctatttaagttaccacctaagcacacaaccgaattaaaagctgtggatggattggatgggatttggaaatgacgtaaattacataaattagaaatttggttgtagtacatatataatgtcaaaataatactgttaaactgcaaaggcacagctccaatccgcccacagtaacaagaatatcaaagcgaaacaaaaacaaaaattataatttaagcacaatgtacattttacgaaattccaagcaaaaaataagtcaaaatttaaaccgaaactagaaaatgccactaagatcccggagagagatgatgatggtggagacaaaggtgatttggcaaggggtataattctagtgctttttaagtgacacaaccacacacaaccccgaactccctacacacacagctcacacacacaagaacacacacaactacacacaaagacacgaggtacgggaagtcaaagaaccagaacaacacaaaaaaaaaacacacaaaacacgcacaataaaagcgatacagagatgatatgaacttcttatggtgacggtgttctacaaaatgcacccacacacaaaaacggaaacatacacaagcacccagacacacacacacacacacacacaaacagacacaacaaacacaccacttacgtctctgaactcaaaggctcctcctactattcctaatcctaattttaaattgccacacaacaccgcacactatggtaatgagtaaaacaagaacaaaccaaactacaaaaaacaaaccaaccagcaaacccaaaaccaaaccaataccaataccagccaaccaacaagtacctcaaactaaacctaaaccaaaaccaagccaaaaccaaaaccaaacgaagaaccccaacaattttgcacacgttgagtatccggtagtgtccatcgagcgatcagatcgacatcgatgtccatatgtagacgcagacgccaagaaagaaagaatgaaagaatcgattctgacctaaactgggctggaactgaactgattcacagtcgcagtcacagtcgcagtcacagtcacgcaattcggttttgagttgaatggtgaagaactgaaactgaatcgtcgtcaaacaatcaaaaagaaatcaatttctcacatttgccatgcgaagccaaccgttttcttttccacatgccacttacccgatatccccagatatcccaatatatatcccccgatatatccatcccttcctaccacaccatatacttctttctgtctctctctctctctctcctctctctctctatctctctctccgccgttctatatatccgctagaaaaacagattgaacaatcgaaaaataaatccaaagttaaattagccaccagcttttgttaacaaaaaagctaaagcagaaatgaagcaaacttatatatttgatgcaaaaaatgctaacgaaattcgttttctgataaccatccggcaatgcacacatgaaatcaactgaaattaaatcaaaaattctgaaaaaattccaaaatttcaaaatccaaatcgaaaccaatgagaaatcacgcaaaattgagacgaaaaaagcaattcaattcaataacaactcgttgtccttgggctaatgcgacgttttctgacttttttccccaccttgtcgtcaggtaaactgacgacaaatgctacaactactacaacaacaataaacaactcgattaccaacaacaacaacaacaacaactacgattactctctaccaacaaaaaactccaactctcaaaaaactccatcaccaacaacaacaactctaacaactccaacaacaacaactccaactcgacctacagccatcacaagtgcctccggcatctgtggccttaacctctccacatttgcagccaacgggagcagcagcggcgggagcaacggtggcctgtcaatgaccgccctgctgccccagcagcagcagcagcagcaacagcagcaccagatgtcgcaacaacagcagcagcaacagcaacagcagcagcagcaggggaacagctccagcggccaacaacaacagcccaacgggatcctggcctgcagtacgcccaaggccaatacgcccaccaccacacagcagcaaatgtacgcggcggtgatggccgctgccgcatccgcgtccgcctcgacgagcggcagcgccaacagttcgctgaacaactcgaactcaacattgaacacctcggggggactgaacaattcagcgagcggcggcgacgacttccggtgcaatccgtgcaacaagaacctgagctcgctgacgcgcctcaagcggcatatccaaaacgttcacatgcgccccaccaaggagcccgtgtgcaatatctgcaagcgcgtctacagctccttgaatagcctgcgcaaccacaagagcatctaccaccgcaacctcaagcagccgaagcaggagccaggcgtcggcgcaacccaggcggcggccaatagcttctatcaccagcagcaccagcagcagcagctcaatcaccactcctcttcatagggcttcatgtactttgattaccaccagcagcatcaggcccagcaccacccacacccgcacctgcatccgcactcgcatccgcgcccgcatccgcaccacggggggttctccagttgaggggaagcaagtttttgttaagtttgaatgaaccgaatgtcaagcatatgtaggaacacatatacacactcatactcactcactcacacacccagaccaacacccacacactcaagacggtgctttttgtacacattaactattaaagaccaggacgaaggaagcgaatgtgcacatacatacacacagtctaggctagttacaattagttgccttcggtagttgctaagcacaggatacgcagtttatacagattaaatcgatagctgttagtaaacccgagacccgcccatcccctgtaaagttccaaggagtttggtatgggcaccccattaccatcccactgcccagtcccgaacccaatctcaatcccaataccaataccaatcccaatcccaatcccaatccctgtccaggttcactgtttgtcgtcttaataaggagctaacagaggtgcccgtagtgaattcttcgaaatggctttaactaaatacaatttatccgatggacagcatattattctgtatacacctcatgataggcggcaatcgcgcacatcgattagaagagggaaatgtgaagcgttagacgtatgaataatctctctcttaaagttagactaaactaaagaacgaactgcacttttttttattaccattacgaagtatatgcataatgttaaaaagttacgatttatagctagttgtaggcgaagaaacacatgtttggaagcttaggagtttacaagaaaaatgaaccgacgagcaggggagcgaccgaccgaacgaccgaccaattgcaaagatcttttctttagtactttaaactagttatcagattttgaatagttagggttaagcgcaccgtaacacacgcacacgcacacacctatttacatacgaatcacgatgcatatgtatgtctagaataaagaaatgtttaatcatagcgtatttttttttttttggattttttgtatatttaatattagttatgcgaatattgagtaatgataccgaaatgttgaccggatactttgatgagtaaacctgtgttcgttaatttttagtgctgctaagtaaagatacagacacttgtttgtgcgtaagacctatgaatacaagcaaatatatatatatatacatataaacaccatacactcacagagcgccaagccaatgcagctgagatccatgtaccagcgtttgcggctctgcgcgaagaactccactttctactctaattcaattcattatatttacaataaacgtctacacattaaagcgatatttcatttaccctccgctccccaggccactcccccaaagcacccacgtccccagcctcgtatgttgtatgcatgtgaatcgaggctttgtcatcagcgaaaccttgggaaccgaacctaatgaaataaccaaaagataggaccgatagaggtccaaagtcctcaccctctatctctctatctctgtacgtccagccacttatcatgcacatattgtccacactcataaccatacatcataacctagatcgtagtgccaggacctggcccttttgggtcacgtcagtgtaacatgtcatgtgtgcctagccgagcagagccgagccgagccgagccgaacctatccgaatcgcatcgaactttgaccccatcacactaatccgccacatacgttaatctcgggtcgagcgcgaactttgcccattttaggaaccccccagaatcttgggctgatcagcaagaaaataactataactagaactatactaacacctcacaatcaaccaagccacgaactcgatccctctgctccgctccgctccgttccactccactgtgaggggcggtgagccaccaatgaagcgctaagtatctgaatctgaatctcagaggtgacccccccccccccatccactgacccctaactaccaacccacgcacacaaccgaacattggaataagccccctgtgtgtgagacccacccgttcccgaaagcacgtttaatctaccgcacatttggttcgttttaaccagttccccccgacaccccgaaccccaagaatccagagccccacccaaaactcccacctatgcaaacccaatcgaacccaacacaggcaacggtgctgcgattgagtttgaaaaaaagagacactagtgacaaccgcaagaaaaaattgacaacttgcaagtaaacaaaataaaaatcgaaaaaaaaaaaacagaataactaaaagggaaaatcaaaataatactaaacattttatatatacaacaaatcaatcaggccaaacatgtttcaaaattttgctaaacttaacaaacaattgaaaaatcacaatcaaaatcgaaatcgaaatcgagcgaaaaaatgaacgcatacaaattggaattgaagtcgaaattgaatcgaaaaacgagaaatgcgaatcgaatcgaaaaaatgacaagacaaattggtttaaagcatccacgaaattcgtgacaaattatcaacgatcagagcacacccaaattggcaaaatagacaccacaaaattatccaccagtttacaaggtcgtccccaaggtcgtggcaactgcaaatgcaactgcacctgcaactgccaacgatcggggtgcaaatttccgaatcgaaccgaaccgaaccgaaacaaatccgattcggactcggattcgatatcgaatttgagccgagtttcccaccttcggcattatgaactgtgcaattcgagttcaaagttcaacaacaaccatcacaaactagccacagcaacagcaacaacaacagaaacagcaacaaaacagtcaacaaaccgttttattaccattttatttccatgcgttttccccaaaaaaaaaagccaaaaccaaaaaaaggaaatgagaaccaacccgaaactccgaaaatgtgagattgcgaatcgcactccaaaaatgaatctgaatttaaatctgaactcgaacagcgttttttcaatacaaaattccttgatcaaaaccaatgagagccagataaattccgcactaaaaaaccaaatgaagcaaccgacctaagcaaaagactgaattaaaacagtttatggaaaagcaaagttagcaaatgtacattgttttgagcctggatttgttagtgttataaaagtaaacaaaacaaacaacaaacatacagatacagatacaaaaacagatacagatacagatgcaaatgcagataacagatacactgacatggacgaggccaaactaacaccacaacaactagacatgaacgcaccgactgctacaaaaactactactattactactactactactacaactacacacaactaaacaacaagaaacaacccaaaccaaacaaacaaacaaacaaacaaacaaaccaaccaaacaaataacaacaaagtcaaatatacagaaaagtcactattgtctctttttttcttctcttcctttctaaatgaccgtttaggtggcagcaccggcagcctactcagtggcgtcattgtgcccggcggtagtggtggcacccctagtaatagtagtagcaacaacaacaacaacaacagcaacaatcaacaacaaaaagtagaacaacagtcatcaccacaccaactcctccaacaacaacatcattccacaccacataccaacagtccacaactgaagcaggaacaaccgaaatcgggcggcgggagctgcaagtccagcgacctgcacattgcagcgggtagtgagcgcagcctctcccgatcctcccaaggaatgccagacgccggcgggcacagtgccacgccctcgcccaccgccgcctaccacaagcgcgagagggagcgcgaaagagaacgcgaacgggagcgggagcgcgagcgggaacgctcgctcgaccatgagcgcgacttggagaggccaggcggcaccggctcaccaccaccgccgccgccgtcgcaccactcacatttcggccagcacccattgtcgctgttgcccagccaccaccagctgcacgcgacccaccacgagctgagcgccgctgccgcccaccacgctcacgcccatgctcatgccgcccacgcccatgccttggcacgcgccggatcgcccatggagcaccatcacctgttgcaccacagacgcgcctcgctctccccctcgggggccgtttcctcggccagcggagcgggtggacgcggaggcggcgctggcggaccgggaggacccggcggcagcctgctgtcatcagtgcgcgcccaggacgtggcccaggccaatagactcctcctgcccctgcccctcaacgcctgccaccggtgcgacgtgtgcggcaaactgttgagcaccaagctcacgctgaaacgccacaaggagcagcagcacctgcagccgctgaacaacgccgtttgcaacctgtgccacaaggtcttccgcacgctgaactcgctgaacaaccacaagagcatctatcatcgccgccagaagaaccaccactcgtatttccaccacggcgccggggttagccaagcgggcagtccgggcagtcggctgcatcagtcgctcagttcgttgagcgcagcagcagcggcggccaacaatagcgttaatgtgggcggtggatcggtaggcggggccgggggcaatgcagtggctgctgctgcagccgcagctgccgcggcggccgaactgcttctctctccgatcgttggcgccgctgccgtggccgggggtacggccagctccacgctccagctggcggcggcgcaccagcagcagcagcaacagtcgtcgccgggcattgtcaaaccgtgcatggacttcttataagatcagcagcaactcttgcagcagctgttccacgtggcgctcaacaactccgcggcggcagcggcggctgcagcggcagcagctgcggcgggtggatcgggaggaggcccaggtggagtgggagctgggccggagtcaatcaacggaggcggacaggagtacggaggagtgcaggggccgagtggcacgcccactgtcgatctcacccagctggagcacgcggccgggggcggtggattctcagccgccgccgccctgcagcaccacctgccacaccacctagcacatcagcatccgatgtcccaccagcatccccaccagctgacgcaccagcacccgcatccccatccgcaccagcatccatatgaacgcatgaatttactagaccaataagcaaggcgccagaaagtatgctacgaatgatgatcgggcaacagacacacgcacacgcgcacacaaaggcacacacacacacacaaaggaggagaaggacgaggaggaggaagcgaggaggaggaagcgaggaggagaacaaggaggaggagaaggagaagaaccgaccgaacgaaaaaggagcagagggagattaggactatactactaccacgtagacatttcaatttcggatctcacagaacggaaaattcaaagactttttcggccagaaaaaaaaacgaaagaaaactaaaatacaatggcgaacatcgagataaagcaatgatgaaagcgcaagctaggagaggaaaggaagacaaaaacatttttaggcaaatggaaaaactgtgattatttacgacttgattataaagcaagcaaaaacaaaggtcttttacgataaagctatatatgtatatgtagctatatacaagcataatggacacaccgacacacacacacacacacacacacacacgcacactcattcagatcgcgttggaatcgtactcgtatacatataaggattttttttgaccatcccaaattgggatgcgaatagagt

SEQ ID NO: 24089 - DNA, 3030 bp, DROSOPHILA
cagttaaataatcattagtgaaaggtccatctgcagcttcacaatccggcaagcggtctagtaatcagcagccagaaggagcagcgcatcgcatcgtaacgcatccttagtttcggtgggccaggccgccagaaagccgtcaaaatacgaaagaaggtgacctcgaagaaggccagcgttgtgtcggttgacgacgatcacaacaacaacaacaaccacaacaacgaccacaacgctcggcagcccacaaacacagcgaacacaagcacacccacaccaataggaacacctatagacacgcccacgcccacgcccgttgacccagagcaggagtgcccacagcccaggagcaacccgatccacagccagaaccagacacccatcgagatggacgacacacagcacttctgcctgcgctggaacaactaccagagcagcataacctcggcgttcgagaatctgcgcgacgacgaggccttcgtggatgtgaccctcgcctgcgagggacgcagcatcaaggcacaccgcgtcgtcctctccgcctgcagtccctacttccgcgagctgctcaagagcacaccctgcaaacacccggtcatactgctgcaggatgtcaacttcatggacctgcacgccctggtggagttcatctaccacggcgaggtcaacgtgcaccagaagtccctgcagtccttccttaagaccgccgaagtgctgcgcgtctctggactcacgcagcagcaggcagaggacacacacagccatctggctcagatacagaacctggccaattccggcggccgcacgccgctcaacacgcacacccaatcgctcccacatccgcaccatggctcgctacacgacgacggcggctcctcgaccctcttcagccgccagggagcgggttcgccaccgccgacggcggtgccatcgctgccctcgcacatcaacaaccagctgctgaagcgcatggccatgatgcaccgcagcagtgccgccgccgccgccgaggagacctcccacgcctttaagcgtctgcgcggctcggacaacagcctgccgctgtccggcgccgttggcagtggcagcaacaacaacagccccgacttgccgccgcttcatgcgcgcagcgcctcgccccagcagactccggccgacttcagtacgatcaagcaccacaacaacaacaacacgccgccgctgaaggaggagaagcgcaacggacccacaggcaacggaaactctggcaacggcaatggcaatggcaacggagcgagcaacggcaacggaatctccatcagcgacaagctgggcagcctcacaccttcgccgctggctcgagcgggcgccgatgatgtcaagtcggagcccatggacatggtctgctctaacaacaatgccaatgccaacgacgaacacagcaacgactccaccggcgagcacgatgccaatcgctccagtagcggcgacggcggcaagggatccctgagctccggcaacgacgaggagatcggcgacggactcgcctcccatcatgccgcccctcagttcatcatgtcgccggcggagaacaagatgttccatgcagccgccttcaactttcccaatatcgatccctcagcgttgctaggtctcaacacacagttgcagcagtccggtgacctcgccgtgtcccctcaaggtggcagcaccggcagcctactcagtggcgtcattgtgcccggcggtagtggtggcacccctagtaatagtagtagcaacaacaacaacaacaacagcaacaatcaacaacaaaaagtagaacaacagtcatcaccacaccaactcctccaacaacaacatcattccacaccacataccaacagtccacaactgaagcaggaacaaccgaaatcgggcggcgggagctgcaagtccagcgacctgcacattgcagcgggtagtgagcgcagcctctcccgatcctcccaaggaatgccagacgccggcgggcacagtgccacgccctcgcccaccgccgcctaccacaagcgcgagagggagcgcgaaagagaacgcgaacgggagcgggagcgcgagcgggaacgctcgctcgaccatgagcgcgacttggagaggccaggcggcaccggctcaccaccaccgccgccgccgtcgcaccactcacatttcggccagcacccattgtcgctgttgcccagccaccaccagctgcacgcgacccaccacgagctgagcgccgctgccgcccaccacgctcacgcccatgctcatgccgcccacgcccatgccttggcacgcgccggatcgcccatggagcaccatcacctgttgcaccacagacgcgcctcgctctccccctcgggggccgtttcctcggccagcggagcgggtggacgcggaggcggcgctggcggaccgggaggacccggcggcagcctgctgtcatcagtgcgcgcccaggacgtggcccaggccaatagactcctcctgcccctgcccctcaacgcctgccaccggtgcgacgtgtgcggcaaactgttgagcaccaagctcacgctgaaacgccacaaggagcagcagcacctgcagccgctgaacaacgccgtttgcaacctgtgccacaaggtcttccgcacgctgaactcgctgaacaaccacaagagcatctatcatcgccgccagaagaaccaccactcgtatttccaccacggcgccggggttagccaagcgggcagtccgggcagtcggctgcatcagtcgctcagttcgttgagcgcagcagcagcggcggccaacaatagcgttaatgtgggcggtggatcggtaggcggggccgggggcaatgcagtggctgctgctgcagccgcagctgccgcggcggccgaactgcttctctctccgatcgttggcgccgctgccgtggccgggggtacggccagctccacgctccagctggcggcggcgcaccagcagcagcagcaacagtcgtcgccgggcattgtcaaaccgtgcatggacttcttataa

SEQ ID NO: 24090 - protein, 880 aa, DROSOPHILA
MDDTQHFCLRWNNYQSSITSAFENLRDDEAFVDVTLACEGRSIKAHRVVLSACSPYFRELLKSTPCKHPVILLQDVNFMDLHALVEFIYHGEVNVHQKSLQSFLKTAEVLRVSGLTQQQAEDTHSHLAQIQNLANSGGRTPLNTHTQSLPHPHHGSLHDDGGSSTLFSRQGAGSPPPTAVPSLPSHINNQLLKRMAMMHRSSAAAAAEETSHAFKRLRGSDNSLPLSGAVGSGSNNNSPDLPPLHARSASPQQTPADFSTIKHHNNNNTPPLKEEKRNGPTGNGNSGNGNGNGNGASNGNGISISDKLGSLTPSPLARAGADDVKSEPMDMVCSNNNANANDEHSNDSTGEHDANRSSSGDGGKGSLSSGNDEEIGDGLASHHAAPQFIMSPAENKMFHAAAFNFPNIDPSALLGLNTQLQQSGDLAVSPQGGSTGSLLSGVIVPGGSGGTPSNSSSNNNNNNSNNQQQKVEQQSSPHQLLQQQHHSTPHTNSPQLKQEQPKSGGGSCKSSDLHIAAGSERSLSRSSQGMPDAGGHSATPSPTAAYHKRERERERERERERERERERSLDHERDLERPGGTGSPPPPPPSHHSHFGQHPLSLLPSHHQLHATHHELSAAAAHHAHAHAHAAHAHALARAGSPMEHHHLLHHRRASLSPSGAVSSASGAGGRGGGAGGPGGPGGSLLSSVRAQDVAQANRLLLPLPLNACHRCDVCGKLLSTKLTLKRHKEQQHLQPLNNAVCNLCHKVFRTLNSLNNHKSIYHRRQKNHHSYFHHGAGVSQAGSPGSRLHQSLSSLSAAAAAANNSVNVGGGSVGGAGGNAVAAAAAAAAAAAELLLSPIVGAAAVAGGTASSTLQLAAAHQQQQQQSSPGIVKPCMDFL

SEQ ID NO: 24091 - DNA, 4052 bp, DROSOPHILA
tcttcctcccgtggagacgctccatgtccaacatgaaggactctcctccaccgccaccaccactggccagcactttcaacgacgtgattgtggactacgaggacccggattatcttccactgccggagtatccggtgcgtccaaacgagccgttggaaactcgcaagcaacggtgggtaaaattattaactattaattaataactactactataactatactttactttattctatactttactatacttactttacttataaggaaaatcattaattaaaagagctcatatttaatatatatattttccctttgctctcatccaccattgccttaaacacttccatttatgaactctacttttttttaagaaagcatgacaacctctatttagaaaaatttatactattttaattttaaaatgtagaacagaaaaataggatttaaactccaagtttcttttttcttcatcatcgatcgcacttcttaattttgcatcagttgtacaaccaactaagctattctttccataagtattttttaatattaaccagaaaaacacttcacctccaggcttttgtaccaatcgcgcaagcgcggaatgctggagaacgatcttctgctgagcacctttgcggccaagcatctccagaacttcagcgccgagcagacggcgcagtacgaccagttgatcaacggggtcagcaacgactgggatatctattactgggccaccgaggtgaagcccacgcccaaggagtacgacacggagatcatggggctgttgaaggagcacgtcaagaacgccgaacgggtcacgcgactccgccagccggatctgaatatttaggcatgcacctggtgcttatgaatatgattagttagaagtttatatgatccaggagatcatatccttaccacaataaccaaagcgcaaatatgtatgtttagaataccaaatataatcaatatttaaagttctggaagtgaacaacctaaactagcaccgctcgaacaccttgtacagagtgggcaggttagtgagctcgtagatctgatccttgatgcgtggtggtggcagaagatattttttaaaggcaggaaatagaacgtgttccattgtccatctggaaaagcccgcagtcgcaccttcccgccaatccaattgcgcgtaaaatcgagcagtttccctacagaatgtctcgaagcatcgtgtctcctgctcccagtccacttcggtggccaagcggagcaggtaaacaggcaggtgggccacacaaggtcgatgctggtgcagcaaactgggcagagattcgagcattccatcctccgagatgcgcagcccgaaatactctctcatgatgggcgcctttttcagaagaatgtccgcagcaccgtccgccagctcagccttatccccgtcttcgggcgtccagccggcggcttcgctttccagcgacaagattagcagctccttgagaggcaatggcggacttattgtgatttccgagcagttttgaaactcgtaaatcatccgctgatagaacagttcctcactaaacgaccgtgtgttgcacatataaaggcgcgtttcatgctggaacagggctcgcctctcatccacacagcccacatagaccaagtttttgagcgtgctcctcagctgaacgctgcactgccgctccacgcgcttcctcatgtctagcacgctgctcaaacgcacttctcgtgatttttttgccgctgtaacgcgaaaactctcttctggcagacgagacgcttcctgggaggaactggaggatacgcctgagtcacttttgaccagaggcgccaaaaacttatccagcttttgctctgtggagtcagtacgcaccatctccttgggataaatgcgttgcgttttatcagccaactgggtttcatccaggtcgggggctcctggtagccttagctgtttgtagaacgtcctcgtggcattgctgcctaggagtcgggcttcaacctgctgcttaatgctatccacaatctcttcctggtagagaaagtgcacctcatgcttggtgggatggacattcacgtccaagttctgtggcggcagcgtcaggctcatatatacgaaaggatggtggccacggggcaggtatgtggcataaatcgagtccacggaggtcctgagagctaggggatatatattggattcgttttctgaatgagaagatgtttagactcacaaacctgtggactccaccagtcgctggttgatgaacagcagcatctgacactttttggccgaatagttaacctgagtgatcagacactcggcctcgaacttgtaaacctcatcgcggtggctaaactccagcagctccttggaaattgctgccccgtaaatgatgcggatgttttcggatcgggaactggccactggtgtccgcagggcaggttgcgcgtctccctgcttgcggagagtgaagcccacccttggattgtggacagcgtacctagccagaacctcggacaatctctggaactcctcggccggcgaacggagtgcctgcctcctttgcggcatgttgtagaacagatcctctatgcaaatgatcgtgccttggtttccggcacacggcttcggctgaccctggagcttgccatccgcgtaggtggccttgtagccgcacttctccttagccgtcttggtctggatgcttaggtgcgccacatgactaatgctggccaaggcctctcctctgaagccaaatgttgctatctgggacaaatcctcgaagcgggtcagcttggaggtggtgaaccgctcgcagacgatggccagatcctcgcgtcgtatccccgtgccattgtcctggatttgaagcagcttcagcccaccggccttcacctgcacctggatgtgggtcgattgggcgtccaaactgttctcgagcagctcttttagggcgttggcgggtcgctgaataatctcgccggcggctatgcggttcaccaccacctcgtccagcttccggatgactccaggctgcaaatattccgccatggcgggaaatcttcacgcgaagtttaatgtaaacaaaaagtagtgtgcccgtttgtttgcgcgggagtatacaagagataaaacggtctatgcggtaaggcggtaaatttgaattgtgatatcacttcgtttataaaacgacgaatgaacaaaaattgcagaaacataacttaatttaaaactaaacgaaaaacggaccggttagttaacaactcctttattaatgggttaacaaaaataactcttttcaatttttacattcgatgttgtattaatatatatatatatggtgttttccgtcataacctttagttcatacatttgaatatttcgtttcttttagtttcaggtatattcatcagctttgaggtaacgtttgatatatttctattgcgttctaacatatatagtcttaacgagaaaacggttgttaaatgtattgagagattacgcgtttcctaacagttagaaataacaattgataaacttcgattcgaaatatgagttaaacttttctttaacctaaaactatttggatttgcaaaaaaattccgccagttcagagcggtaaggaaaaccacgttcttcgtaaacgttggaaataatatgaggaatgttcttgagcggatactatgagaaccacttgcacttgaggcaaatgaaaactgagattccaagtataatggtggtgtacttgaagtagctgcgcacctttttgcgttttcgctctgcgagtatttcgttgaagtcaatgaacaagggattctgagaggggctaaaggaaccaagctaaaaatatatttaaaagaagtgagtgtcctgatacaagaacaattgaaatgcgacacttacatatttgactgtctttgtgatttggttgagtacatctcgatagccctgaaggttgcttttcatcgcagccacctgcatctccgaaggttgccccattttattgtgctcctggtttttgaggatgaagcgcagggaggcctgaataatg

SEQ ID NO: 24092 - DNA, 1995 bp, DROSOPHILA
atggcggaatatttgcagcctggagtcatccggaagctggacgaggtggtggtgaaccgcatagccgccggcgagattattcagcgacccgccaacgccctaaaagagctgctcgagaacagtttggacgcccaatcgacccacatccaggtgcaggtgaaggccggtgggctgaagctgcttcaaatccaggacaatggcacggggatacgacgcgaggatctggccatcgtctgcgagcggttcaccacctccaagctgacccgcttcgaggatttgtcccagatagcaacatttggcttcagaggagaggccttggccagcattagtcatgtggcgcacctaagcatccagaccaagacggctaaggagaagtgcggctacaaggccacctacgcggatggcaagctccagggtcagccgaagccgtgtgccggaaaccaaggcacgatcatttgcatagaggatctgttctacaacatgccgcaaaggaggcaggcactccgttcgccggccgaggagttccagagattgtccgaggttctggctaggtacgctgtccacaatccaagggtgggcttcactctccgcaagcagggagacgcgcaacctgccctgcggacaccagtggccagttcccgatccgaaaacatccgcatcatttacggggcagcaatttccaaggagctgctggagtttagccaccgcgatgaggtttacaagttcgaggccgagtgtctgatcactcaggttaactattcggccaaaaagtgtcagatgctgctgttcatcaaccagcgactggtggagtccacagctctcaggacctccgtggactcgatttatgccacatacctgccccgtggccaccatcctttcgtatatatgagcctgacgctgccgccacagaacttggacgtgaatgtccatcccaccaagcatgaggtgcactttctctaccaggaagagattgtggatagcattaagcagcaggttgaagcccgactcctaggcagcaatgccacgaggacgttctacaaacagctaaggctaccaggagcccccgacctggatgaaacccagttggctgataaaacgcaacgcatttatcccaaggagatggtgcgtactgactccacagagcaaaagctggataagtttttggcgcctctggtcaaaagtgactcaggcgtatcctccagttcctcccaggaagcgtctcgtctgccagaagagagttttcgcgttacagcggcaaaaaaatcacgagaagtgcgtttgagcagcgtgctagacatgaggaagcgcgtggagcggcagtgcagcgttcagctgaggagcacgctcaaaaacttggtctatgtgggctgtgtggatgagaggcgagccctgttccagcatgaaacgcgcctttatatgtgcaacacacggtcgtttagtgaggaactgttctatcagcggatgatttacgagtttcaaaactgctcggaaatcacaataagtccgccattgcctctcaaggagctgctaatcttgtcgctggaaagcgaagccgccggctggacgcccgaagacggggataaggctgagctggcggacggtgctgcggacattcttctgaaaaaggcgcccatcatgagagagtatttcgggctgcgcatctcggaggatggaatgctcgaatctctgcccagtttgctgcaccagcatcgaccttgtgtggcccacctgcctgtttacctgctccgcttggccaccgaagtggactgggagcaggagacacgatgcttcgagacattctgtagggaaactgctcgattttacgcgcaattggattggcgggaaggtgcgactgcgggcttttccagatggacaatggaacacgttctatttcctgcctttaaaaaatatcttctgccaccaccacgcatcaaggatcagatctacgagctcactaacctgcccactctgtacaaggtgttcgagcggtgctag

SEQ ID NO: 24093 - protein, 664 aa, DROSOPHILA
MAEYLQPGVIRKLDEVVVNRIAAGEIIQRPANALKELLENSLDAQSTHIQVQVKAGGLKLLQIQDNGTGIRREDLAIVCERFTTSKLTRFEDLSQIATFGFRGEALASISHVAHLSIQTKTAKEKCGYKATYADGKLQGQPKPCAGNQGTIICIEDLFYNMPQRRQALRSPAEEFQRLSEVLARYAVHNPRVGFTLRKQGDAQPALRTPVASSRSENIRIIYGAAISKELLEFSHRDEVYKFEAECLITQVNYSAKKCQMLLFINQRLVESTALRTSVDSIYATYLPRGHHPFVYMSLTLPPQNLDVNVHPTKHEVHFLYQEEIVDSIKQQVEARLLGSNATRTFYKQLRLPGAPDLDETQLADKTQRIYPKEMVRTDSTEQKLDKFLAPLVKSDSGVSSSSSQEASRLPEESFRVTAAKKSREVRLSSVLDMRKRVERQCSVQLRSTLKNLVYVGCVDERRALFQHETRLYMCNTRSFSEELFYQRMIYEFQNCSEITISPPLPLKELLILSLESEAAGWTPEDGDKAELADGAADILLKKAPIMREYFGLRISEDGMLESLPSLLHQHRPCVAHLPVYLLRLATEVDWEQETRCFETFCRETARFYAQLDWREGATAGFSRWTMEHVLFPAFKKYLLPPPRIKDQIYELTNLPTLYKVFERC

SEQ ID NO: 24094 - DNA, 6284 bp, DROSOPHILA
caatcccgcccactgagtagccccatccgatcccaacgccaaccgatccccagtccaatcgattcgatcttatctctaccgatatggatgtttttcctgtaggacacatttgaacgaactgatttctcagcgcagtcaaggaaatatgaaccatatcttttacgttaagtagttcaggaacatattaatgctaatgcttttttcatttctataacttttttaactttaaacagttaataattgaatactttgtaattttaaagatataaactgcatgctttgctagatcgaatcaacactaattggtagctcaaaggacgatttgcattagactaagctgagaaatcaggtcgtggaaatgaggctttagctccaaatatacacatatatatatatacttacatatacatacatatatattatatacatatatttttgataagcctgaatgggtgtgagcaagcaagaagaagctaaaaagagcgagaaatattgtgtgtttttgagtgaatgctttccaaaaatctcgtacgtaaccccaattttctatgtctatactttggctcttatcggcatttttgtacactgtatatagcttgtttaagtgtccttaccaagggttaaccaacatcaaaatcttttcgattcattgctaaattcaatctttaatcaaacgtatacttatgtacttcaatatatcgaaatatatacatctatattctcaaaagataactaaacatctgatttattttattaaatgctccctgaactgtatactatcctattgaccagagctttttgttcctttagcaaagcttttggcgaaaaacaaacttgcgcataccaaatcggccaacagccagaatcccagtgtccacaattgataacaacgaccgaaaacatattacattattgggcgagctgataaggtctatacccctttcatagagtgcagataaggttgacctccgaggtattaaattaaaagccgcttggagatacttttcagttagtttcagttcacatttaataagtttggcagagttttaaaacttgaagctagcttcggtataatagtaaacatccaacactatacaaatagagattaacatctatatacatatagcgtgcaaaataagtaagcggccaaccaacgcgttgcgctttagatatatatagcgaatagttgaagattatatactttctatacagatcaagtaacctgcaaacacttataattaggattctgtctaccagacagatggattaagtatacacatgtattcgggcgattcgaggtaacctccaccgccatcaaaaaggggaatctacattggaatcgtaatctttaacgtcagcgattccgattaaacttaacctaacattggaaaaaatccaggggaaaaggatgcgctattcgagcgctcgattctcttttcttctctcacttgcgatcgaataggcgggtgtagtcgagcagtgggcctgctgcagatcggtggcgatgctgttgctgctgatggtgttgctgctgctgctgctgctgctggacaggggcaggcactcctccactgcccgtttccgtcgcagccatcgtcgtatgttagaagagacgcttctcgtagctgaagaggccatggacattgccttccagttgagcggaatgggtgcgcttcatgaagcgcagttggccattatagatcatatccctgcggaaatttaacatgcggagataaagattagtttcatgttctttggaattaggtccatgttagcctacctcaatttattaatggagttagcaccgatgtcctgacaactgtgctgcagtccgcactccaaatagggtagatagcgcagcacactgcccttgtccacgatgctgccactgacgccctgtgccaccttcattttatccatctcgttgtggtagtagcgcgacatggcagcgcccttggcatcgccgcgctccatggcctccagggagcccatgccgcggtacttcttaaggcgcactccgtcggagaagaagtactcgcccggtgcctccgatgtgcccgccagcagggagcccatcattacagcgctggctcccaatgcaatagccttcacaatgtgtccaatggactggatgcctccgtccgcgatcactggcactccgaattggcgagcgtacgtggacacctggtagacagcagtggcctgaggacatccgcaggccatcacctcctgggtgatgcagatggaaccggaacccatgcccacacgcagtccatcgacgccggcatcaatgagatttttggcctgggcacgtgttaccactgttcagtgaataaaataaatattttgaattagtggaaaatttgcaagtaacaataaattaaaatcacttgattataatcaatataataattatgtcaattaactggaaatctgtttaaaaacttgcaccctatctttatttcaacccaattgtcatttcgtgatactaaagataacaatatgttttactccaaatcatgattgctataataataagtacttcatcgcgacgtaattagccatagataatggttaaaaatagttttgaaaacgtgagtatatcaaaatgtgatactttaagagcattgaacttaaaaacatctcaaattcatacggacaagcgaatgacctgtgtatactatatgtgtcttcatttttgaaatacccttttacgtagtgttctggtacttaccattgccaccaatgacctgtagttcgggataggtctccttaatgtacttgatcatctccacctggtagacggagttgccctgcgatgaatcaaggatgataacgtccacgccgttggccaccagcagagccaggcgcgccttgtcctccgatcgcgttccgatggcagcgccgacgaggagctgcttattggagtccttggaggcattcgggtaggagcgggccttcttcaaatccgtgcgggcaatcatggccaccagttcgccggcctgattcacaatcggcagtttgcccttcttgctcttctcgagaatagcgtttgccgtgggcagattgatgccattgggagcggtgaccagttcggtggtcatgatgtcggccagcaggacctccggctggttctcgcggaagtcaatgtctcgcgacgtgaccatgcccagcagcttgccgccaagtttgccgttctcggtgaccggatagccggtgaatccgttcttccgccgcgcctccaacacatcccccaccgtattcgtgggcgacatcaccgaggggtcgcgcatgaagccgtgcttgtacttcttaaccttgtgcacctccaacgcctggtattccggcgtgcagttgtgatggatgatgccaatgccaccacacagctgcgcgcgggattcgaatggatttggatggtgtgtgagcagtggatagaaacattggcggttagagaggcgcataagagtgttgagttacaaccacaggctagcacagctcaggcgaacccgccagcggttctgggccgtatatatatgtgtatatatgtatgtctagggattcattaaaatccgatacttaccgccatggcgatggccatctccgattcggttaccgtgtccatgggcgaactaaccagcggtgctcgcaatgtcagcgacttggtcagtggcgaactgagatcgacctcctcggcggtgaagtctatgtagccgggcagtatgagaaagtcgctgttttttttcgggattgtcgggaatttcggatgggggcaatgacatgagatttggataacgacttttgcagaggcttgatcactactcacttgtaggtgagtccctcaccgttctggaacagttccttacaactcagcccatcctgcagctcggcatcgaatccggtggtactctttgtctggattgccggcgccgctgaagacgacgtcgattccacaaagccgttcaccttcacctttgtcgtgctctccattttccgcgtgcgttcaacccaaacaaacagtcaacaaacaacggggagctgacaataacaagccgtatagagataaaaaccgcctgttttgggatcttctcctgttgcagatttctttttatggatacagattcctctcgagcttttgagacgcaattagcagggggcacatacacaaatgcggcagtgaagaagatgcacggcacacggcgcagccagacaattgggatcaaaaggaaaaggttaattgcatcgatcggagggtgattcgcaatgggaatcggcccgattggctggcaagccagcgagcacatggttgggccatcttaccagtccgctggagtccaagtgccgcgtgtgctgcgcgaatcgagttcgtgaagtggtgtggccgccgtgcggccgcttaaatatactcgctggaccaccgggaaacccactaaatattaccacgatacgctttggccttaatcgcgctttccatggcagccacactaaggcgctttcaatatcgactatgcaatttattaagcatattaaacaataatcattacatattagcctgaatagcctgaatctcgagcaatatccatttcctctttatttaatctttaaaatatggcagcgaattagcttctttccgcttaaagctattgctgcactgcgatactattgcttacaatgccagctatcgatagtaacgatagtagtgtcacagttaactgtttcatggctggcttcgtgcacagctcaccgagactatcgataaatatcgcatctgtgtggctgcacaccgaattcgtaatacaccaaataccggtaccgtactcgatggcattatttaggaactttcccatcgccgcggcaagactgaaatcgactggcctttagatgctctttggcggtgggcgccgcttgacttgccagactctccaggccgagtgtgtgtgtgtgtagtggttgtgctagcagagctgttgcagaaactaactgggaaaacacaagatagacgcgtgtgcggcgagcagtagctaaattgaactgaagtgaacagaaaatatttacacaaaataatagagatacaacttcggaaaagcaagcatacaacacaccgggactccgcaatacgggttttttatttcgtctactcttccgtacctgggcagagatttagatttatcgcctcctccacccactacttcatcatcgacatcaccagtgctgttgttgttgctgtcgttccgccttcgctctcacgtaatccgcccccgcaccacctcgcccgtcggccaaccggcccacaaactaactgactgatagaccaaaaatcgattagcggactctcttcctcttcaacatcttcggcattcgtgtgtgcgttgctttgcgttacgttacggttaccgttacgtcgcccgcgcgtgtgtgttggtgtgtgagcaaggtgtggtgtgtatagaaaatcgattggcaatttgaaccgaagagcgctatcgtcgccgcagtcgccgcgtgtgtgccgttacgcgattttcaacagcagccgcgcagtaatattgcttttatttttttgcctgtgagtcctcctaagtgagtgcgaaagagagagagcgagagtgagctctctaaaacctctgcagaaaataaaaaggaaaagaaaaacaccggacatggataaatcagcggccacgaactcggccactgccgatggccaaaacgaggcagcagcagcagccgccgccgcagcaacagcagctgggtgtggcagcaacaacagcagcagcaccagcagcagcaacaacactgcaaacagcaataatgcactgcagcgtttggcaacaacaacaagtgccgttgtggcatccccgatgacgatcaacctgaacatcagcaccaccaccggcggcaatttcggcgtcagcgtcgagccgcacatcagtgtcgagagtctgaagaagatcatcgccaagaagctgaaggtggccaaggatcgcatctgtctgctgcaccgggaaaagtgagtacccctttagtatttttttttaatttacgttacatttaaaagaaacttggcttgaactgtaattttttggcagtcaagttttttgttgtttgttactaatttaaaaattaataacagttaatatggcttagatcgccaatttttatgttatttatctgaacattttctttttgtttaattgacgagactaatgttgaatgttaaatattacttattaatctatgcattatatttgttacataaaaaggattgttaaggtttaataagcctgtgt

SEQ ID NO: 24095 - DNA, 2498 bp, DROSOPHILA
ccggttggccgacgggcgaggtggtgcgggggcggattacgtgagagcgaaggcggaacgacagcaacaacaacagcactggtgatgtcgatgatgaagtagtgggtggaggaggcgataaatctaaatctctgcccagctcgagaggaatctgtatccataaaaagaaatctgcaacaggagaagatcccaaaacaggcggtttttatctctatacggcttgttattgtcagctccccgttgtttgttgactgtttgtttgggttgaacgcacgcggaaaatggagagcacgacaaaggtgaaggtgaacggctttgtggaatcgacgtcgtcttcagcggcgccggcaatccagacaaagagtaccaccggattcgatgccgagctgcaggatgggctgagttgtaaggaactgttccagaacggtgagggactcacctacaacgactttctcatactgcccggctacatagacttcaccgccgaggaggtcgatctcagttcgccactgaccaagtcgctgacattgcgagcaccgctggttagttcgcccatggacacggtaaccgaatcggagatggccatcgccatggcgctgtgtggtggcattggcatcatccatcacaactgcacgccggaataccaggcgttggaggtgcacaaggttaagaagtacaagcacggcttcatgcgcgacccctcggtgatgtcgcccacgaatacggtgggggatgtgttggaggcgcggcggaagaacggattcaccggctatccggtcaccgagaacggcaaacttggcggcaagctgctgggcatggtcacgtcgcgagacattgacttccgcgagaaccagccggaggtcctgctggccgacatcatgaccaccgaactggtcaccgctcccaatggcatcaatctgcccacggcaaacgctattctcgagaagagcaagaagggcaaactgccgattgtgaatcaggccggcgaactggtggccatgattgcccgcacggatttgaagaaggcccgctcctacccgaatgcctccaaggactccaataagcagctcctcgtcggcgctgccatcggaacgcgatcggaggacaaggcgcgcctggctctgctggtggccaacggcgtggacgttatcatccttgattcatcgcagggcaactccgtctaccaggtggagatgatcaagtacattaaggagacctatcccgaactacaggtcattggtggcaatgtggtaacacgtgcccaggccaaaaatctcattgatgccggcgtcgatggactgcgtgtgggcatgggttccggttccatctgcatcacccaggaggtgatggcctgcggatgtcctcaggccactgctgtctaccaggtgtccacgtacgctcgccaattcggagtgccagtgatcgcggacggaggcatccagtccattggacacattgtgaaggctattgcattgggagccagcgctgtaatgatgggctccctgctggcgggcacatcggaggcaccgggcgagtacttcttctccgacggagtgcgccttaagaagtaccgcggcatgggctccctggaggccatggagcgcggcgatgccaagggcgctgccatgtcgcgctactaccacaacgagatggataaaatgaaggtggcacagggcgtcagtggcagcatcgtggacaagggcagtgtgctgcgctatctaccctatttggagtgcggactgcagcacagttgtcaggacatcggtgctaactccattaataaattgagggatatgatctataatggccaactgcgcttcatgaagcgcacccattccgctcaactggaaggcaatgtccatggcctcttcagctacgagaagcgtctcttctaacatacgacgatggctgcgacggaaacgggcagtggaggagtgcctgcccctgtccagcagcagcagcagcagcagcaacaccatcagcagcaacagcatcgccaccgatctgcagcaggcccactgctcgactacacccgcctattcgatcgcaagtgagagaagaaaagagaatcgagcgctcgaatagcgcatccttttcccctggattttttccaatgttaggttaagtttaatcggaatcgctgacgttaaagattacgattccaatgtagattcccctttttgatggcggtggaggttacctcgaatcgcccgaatacatgtgtatacttaatccatctgtctggtagacagaatcctaattataagtgtttgcaggttacttgatctgtatagaaagtatataatcttcaactattcgctatatatatctaaagcgcaacgcgttggttggccgcttacttattttgcacgctatatgtatatagatgttaatctctatttgtatagtgttggatgtttactattataccgaagctagcttcaagttttaaaactctgccaaacttattaaatgtgaactgaaactaactgaaaagt

SEQ ID NO: 24096 - protein, 537 aa, DROSOPHILA; identical to SEQ ID NO: 2433

SEQ ID NO: 24097 - DNA, 2597 bp, DROSOPHILA
ttcagataatttgtgcacaacaaactaatctaagaagtaacgtgggtttcaataatcgctttcgctcttactattcaaaattggtcattcatcgatctctcccagatacaaagtcttatcgctggatccagatagaatcaggggttcttttgggctgaaatccacggcattgacactgccattgtgtccgggcagcttgtaaagaattctccttgtatttacatcccaaatatagacatgccgatcggcggaacccgatgttattttatcgcttcccggcgaccaagcgcatctcagcagattcttctcaaaattgtgctgatggccttggaataccttcacacatctttccccgggtgcataaggtctcacgtcccacaccctcaaggtgttatccatggcatttgtcaagataaagtctccttcgggggacaaggacattccggtaatcgtatccgaatgccctcgcagatggtgcaagacagcctgttttcgaatgtcccagattttgacttcgttgtcgatcccgccgctaattacttgttctccagtgtcaccaaaacaaacagctgtgacttgaaaaggggattccaaagtgtgtgccgcgtgttttttcctggcgtcccagatttttatggtgcgatcatcgcttcccgagcagaggagctgttgacccctacgcgagccctgaacgctgttcacgaagttgccatgccccttgaaccgccgttgccgctggcccgtggctatgtcccaaaaggccagagttttatcagtggagcaggtaaaaatgtgcgatccatccggcgtaaagtgagcttccataacagcaccgctgtgtcccgacatggccatcacattctcgcagtcttcgtacacttgccagatgtctgaaatccatattaattgttttacatgctatttctataatcaaagatgttcaagaactacaaattcatttgcgcccaaaaatgtgacgatataggctctcatacacggcactattgtatgaatgcatagatagcttggtattcatacgactttatcacacatttattccaaattttactcacagatttgcctatcgaacccagaagaaagcaataactccccctcgggatggaattccgctgtgaaaatctctccctcatgtccttctaattgcattatgggcgcctgcaggtttgaggtacgcctcactccctaaaaattatagtaaaagcatattcaaagtttatcaaaatttacttagtgcttcttcttgctagcacgcttaccgattcaaggagcgctttgtccctgtttgtgtaggccatcagatcatttttgctacgctttgcctcttgggccaaaattacgctattattgggtcttttggtacccataattaagattttgtttgtaaaaacagaagccttataattttttttcttccgctcaagctgtatggctgtgtgaccagagttcgaaatataatattaccgacatggctgttagcgattaattcagatatttctgaatagatgtggctactttcagtgagaacaaaggaagtgaaagtcggcaactctggcaaaaatactgaaaaacattttaccagaattgtttctcattttatttttacacaatttgcagttttacaatgtgaaactaaccaagaaaaacgggtctccgtctagtaggcatcaacgcgtgggggatccgcaaaaaattcttgtcccttacgctcccccttgagccactgcttgtagcgttcgtttcgcattgcctgaaagaggaatttttagcattttagacaaaattacagatcgttagggatatgaagctacggaaaaactcacatggaagcgcatcagttgcttctgcatgccgacgcactcctgaaagtcggagatcaggtcggcgcactcccgttttccacgctccaggccataggcctcgaagcactccatcattttcatctcgaattttccgcacttgtcgtaggtctggtggttaattaggcacccggtcagatcggttaagggcaggcgtagaaagggggtaagcgacattttgtctgtggagcgaagcacacacactgtgacgtaacaataaacaaggggtttaagccttcaagccgttagcagtctctggcccccaagaatttcaatgtattctctacaacgttaagtagagtatatcctgatcacacaccttaaattgttggcaatacccaaggaattgtcttatattgccttaattccagcacaaaaacaagactgtcatcgatttctgatatcgggtatcgtttttttcgagattcgacagctgatagtgttggttagcgcgcgaaccgcttccacgttttgtttataattttaattacacgagaagctatgaaaaaccaggatttggtggaatatttaaggtcgtgcggggtgtgcgaaatttgccagctgcgttacctgaaggccagaggcgcggagtatagaaacatcaatgagactttgcaaaaggtaagaacggtttaatttgaatttgttgacaactaattgatgtctaacttgtccgtttaaatgcccagttggatgtaaaactaaatgaaaatgtggaaa

SEQ ID NO: 24098 - DNA, 523 bp, DROSOPHILA
gtaaaatgtttttcagtatttttgccagagttgccgactttcacttcctttgttctcactgaaagtagccacatctattcagaaatatctgaattaatcgctaacagccatgtcggtaatattatatttcgaactctggtcacacagccatacagcttgagcggaagaaaaaaaattataaggcttctgtttttacaaacaaaatcttaattatgggtaccaaaagacccaataatagcgtaattttggcccaagaggcaaagcgtagcaaaaatgatctgatggcctacacaaacagggacaaagcgctccttgaatcgggagtgaggcgtacctcaaacctgcaggcgcccataatgcaattagaaggacatgagggagagattttcacagcggaattccatcccgagggggagttattgctttcttctgggttcgataggcaaatctgtgagtaaaatttggaataaatgtgtgataaagtcgtatgaataccaagctatctatgcattcatacaatagt

SEQ ID NO: 24099 - protein, 81 aa, DROSOPHILA
MGTKRPNNSVILAQEAKRSKNDLMAYTNRDKALLESGVRRTSNLQAPIMQLEGHEGEIFTAEFHPEGELLLSSGFDRQICE

SEQ ID NO: 24100 - DNA, 4751 bp, DROSOPHILA
tctcgaaccggcgcagttccagcatctgcgtgtacatcgtcagggcgtcctccctggacagctccacgtccattgtgggtccattctccaggtcgtagcacttgaacgtctgcaacgggcataacaaaatcattaaagtaacccatttcggaatgctgctctagtaggaacgcaagaagaatctatgtgttgtgcagcactgaaaaatatcagcagcttatgtctatattcagtgttggtctacgcgatgagcagattaagtcgtttctatgttagatttatatcagctatacttaacagcaaatatttaaacatttttcagagtacataatttaattcaaaatgaaaaatataacttttacgatatagcttttttcaatggtatttacttatccattgaccttcttgtgataatcaaaacacttacgttctccagggtcaaacagctacatttgtggcgccctattatcctgcagagcatatttctctcgaggatggagtgggctccactgcatctcatcgccacgcggacacaactgaacttcatcattggcccttgcccgaataccaattcccaaacaccggggcactaaaatgagcttgtagccaaatgggcaattgccacgcactaaaattttgaatatgatcggaaattgttgaaaaatggatttgtactcaaccgaaaagaaatcgacagtaaaatcataagcaaatcgacagagatggcaactgtcactaaacagaacgagaaggaaatataacgattttgggattgcttatggagctgacaactgctccttttcaaatactactttgattcgaactgtaattcttccacaaatcgaattatctattaaatctattccgtttattaatatcttataaatctatcaaaattctatagtgcaagtataggtgaaacagactgagattttcacatttcaaaagtacatacttgattcacttttgttaagaaaactaatttggattaatttttctagatttttatattttcaacaatttacacctcgctttatccttattgaacacgttcgcaatataatatccaatgcagtaccccagagttatgtggtgcgctacgatgtgtggttggagtgctccgattagctaagctttttgtgggtctcttcggatccgttccgttctacggggttctcatcgttcaactttcggcttatgatctagagatttcgcttgtgtccaagtttctgagttattgtgtcttcttgtctgtctgtcagtgatttgtgtttgctgttcggttttcttgtttcgtttaaggttcttgtgagttcccgaatcagattcgttggcccgatgacttagtgattgacgcccttgcgctcctggatgtgatcaatatcgtaggcgatggtgccgcgcagcttgggctccagattgttggagtacacgtccgtccagaggtggctcacgcccagctcggcatcggacttggcgaaggcggtggcctcgtcgacctccttgcgtaccttcagatcgatggcctggaagatgtttttttcttttagcaatcataactcataacaaaaataaaaccctataagccaaacccaccttaacttcatcggtggtaatcagacccagctcgatgcacagctccttgaaggaggtgatgggatcacgcttctggcgcacctcctggatctcctcgcgtgtgcggtacgatgtgcccggatcggacatggagtgtccagagtatcggtacgtgttcgtctccatcaccaaaggtccgtgagtgttcacatagttgatggcgaactcggtggcgctgcgcacggccagcacatccatgccgtccacccagattccgggcagagcgtcgccgcgggtatagtaatcagtgttgcaggaagcacgctcagaactggtgcccattcctaatgggtataattatacaacatttggtttaagtaaatatcttttagcattgttccactttctacagcactcaccgtagttgttgttctcgcagacaaagatcacaggcagtttccacaggtaggccatgttgtaagcctcgaacacctgtccttgattggcggcaccatcaccgtagagggccaggcacatgccgccattgcccttgtacttgcaggccaagccaacgccggcacccaaaggaacttgagcacccacgatgccattgcctccgtagaagttcggtgcgtacatgtgcatggagccacccttgccgcgggcacagccaccctggacaccggtgagctcagccagtacgccgctgggtgagacgcccatcaggtaggtccatccgtggacacggtacgccgagatgatgttgtccacatcccgcatcgccgccttcatgccaacggcgcatgcctcctggccggaatacagatgacagaagccgcgaatgatcttctccttgtacagattaccggcggccgtctccaaccgacggatcgtctgcatctgtgtgtagtacttgagggcctgatccttggtcagcttcacttccgtggcgggtccttcgtccaggcggtgcagcttgaagggctgcaaagttggaaagcatatttagaatttagatccctaaacttcattaattttaaaaacgttttctacttttacattaacaactgacacacacatctgataagaacgtaacggaaacgtttggaacgcatgataagtaataaaatgatagcagtttgattggataaaccaaataaccataggcttcaagcttctctaatcaaagtatactaatctatagagagctataaccacatatcgaggattttcggaagtatgctccaaaaaccaaatttggatttatggcggctaatttatggcgtgagaatcgacgtaaacagagagccagacagacagacggagagaaagagagagagggtgaaaatcggcggatcgttgataagactatatgttatatggtgcgtgaacagtcacgcgtcggccacgcaaaaggcagacggtgataaagagcgtgggagacggaaaactacaaattactgcgtgaccttgtcatttgaaaatgagcggattgaccggcaaaatgcaaccctgcacttacacacacacacacacacacgcaaaccgtttgctatctggcgaaaatcgcattatgtaaccgtattttttcccttccgacttttgaattttcctgagttacaagtacttaatgctataatacgcacccgattcacttgaacggtggcctccgtggcataattgttggttttcgaaacacctgcttgggctgcattctggaataaaccgaaaaacgacgatgaatatctcccattcctgatgatatcgatgctgctgttgttgttgttgttgctaagtatccgacatccgctgatgatgatgttgttgttgttgttgttatggcaacgcttttagtgttttcattatcgaatggatttgttcaattgcatttttagtgacaacaattagaaatgttagtgggtgcaaagcgggattgggattacgtactttttgcagttgcttaacaataatgggcaattcgctaacgcgtgacagagtacgcaacattttcgctgtgttattctcgttcgactgacagaaattggatgtgaatgggggctttctatatgcggattgtccggatctagaatcgcacgctatatatctggtgtctcagtcgcaccgccgcgcgtcgttgtaagttaaacaatcggaaaaaaaggtagcgagattagtttatcaactactatattgcacaactataacaaccgtttggcgttatagcgaaaaataacgcaccacttggcctattagtgtgaccctaaataaaatactgcagctttccctgttttcaaaaaatactaaattagcttatcgaactttctttttcaatataacttgaaatataaatgtttacgtaaaatattcaataagcttttatataatgtgtcacacaatgttatatcaaaataatagtagtgtttggcggttattgaaatactcgaataaatacttactcaatcacattttatattactttgccgcccaaataaaacgagggttttcaaagaagtacttttatttcacattgaagatctcatttggtttttgtttgctttctcatttcttactcgtattgttacttgaaattgcctccataaatccacatttgcgattgcagttgcaattgcaatactgctctatatcgcactcagctcacataattcactaatctcttacaaaaacttaagtaatgtttgttccttgcacaaaaaaccagttaaatagaaataggtaaagtagaattaaacagttaaattcaaataaacgctttacaaactaagattttaaactagtttttgtatttgttggtttctcggtttgttgtttcatttttttttttttgctttagaaatggcagctaaaagatttgagtttaaaagttactaacggaaaatgaggaaatggatcgatcgtttgggaaaaactaagcgaatgaaataaattttttactttcttttatctatcttttgctctgttaccgttacacatattcaatttttcgcgcgtttttctgttacatcaaaaattggtttctcacacaaatattttgcattatgacaaaaaattatgctttgctttgttttttgttttgtttcatatgtatacatgtacatgtatatatatatatatttgtatgtataaacacttattagaagtcctgttgtgtttttgtt

SEQ ID NO: 24101 - DNA, 1844 bp, DROSOPHILA
aactaatctcgctacctttttttccgattgtttaacttacaacgacgcgcggcggtgcgactgagacaccagatatatagcgtgcgattctagatccggacaatccgcatatagaaagcccccattcacatccaatttctgtcagtcgaacgagaataacacagcgaaaatgttgcgtactctgtcacgcgttagcgaattgcccattattgttaagcaactgcaaaaacgttgccataacaacaacaacaacaacatcatcatcagcggatgtcggatacttagcaacaacaacaacaacagcagcatcgatatcatcaggaatgggagatattcatcgtcgtttttcggtttattccagaatgcagcccaagcaggtgtttcgaaaaccaacaattatgccacggaggccaccgttcaagtgaatcggcccttcaagctgcaccgcctggacgaaggacccgccacggaagtgaagctgaccaaggatcaggccctcaagtactacacacagatgcagacgatccgtcggttggagacggccgccggtaatctgtacaaggagaagatcattcgcggcttctgtcatctgtattccggccaggaggcatgcgccgttggcatgaaggcggcgatgcgggatgtggacaacatcatctcggcgtaccgtgtccacggatggacctacctgatgggcgtctcacccagcggcgtactggctgagctcaccggtgtccagggtggctgtgcccgcggcaagggtggctccatgcacatgtacgcaccgaacttctacggaggcaatggcatcgtgggtgctcaagttcctttgggtgccggcgttggcttggcctgcaagtacaagggcaatggcggcatgtgcctggccctctacggtgatggtgccgccaatcaaggacaggtgttcgaggcttacaacatggcctacctgtggaaactgcctgtgatctttgtctgcgagaacaacaactacggaatgggcaccagttctgagcgtgcttcctgcaacactgattactatacccgcggcgacgctctgcccggaatctgggtggacggcatggatgtgctggccgtgcgcagcgccaccgagttcgccatcaactatgtgaacactcacggacctttggtgatggagacgaacacgtaccgatactctggacactccatgtccgatccgggcacatcgtaccgcacacgcgaggagatccaggaggtgcgccagaagcgtgatcccatcacctccttcaaggagctgtgcatcgagctgggtctgattaccaccgatgaagttaaggccatcgatctgaaggtacgcaaggaggtcgacgaggccaccgccttcgccaagtccgatgccgagctgggcgtgagccacctctggacggacgtgtactccaacaatctggagcccaagctgcgcggcaccatcgcctacgatattgatcacatccaggagcgcaagggcgtcaatcactaagtcatcgggccaacgaatctgattcgggaactcacaagaaccttaaacgaaacaagaaaaccgaacagcaaacacaaatcactgacagacagacaagaagacacaataactcagaaacttggacacaagcgaaatctctagatcataagccgaaagttgaacgatgagaaccccgtagaacggaacggatccgaagagacccacaaaaagcttagctaatcggagcactccaaccacacatcgtagcgcaccacataactctggggtactgcattggatattatattgcgaacgtgttcaataaggataaagcgaggtgtaaattgttgaaaatataaaaatc

SEQ ID NO: 24102 - protein, 443 aa, DROSOPHILA
MLRTLSRVSELPIIVKQLQKRCHNNNNNNIIISGCRILSNNNNNSSIDIIRNGRYSSSFFGLFQNAAQAGVSKTNNYATEATVQVNRPFKLHRLDEGPATEVKLTKDQALKYYTQMQTIRRLETAAGNLYKEKIIRGFCHLYSGQEACAVGMKAAMRDVDNIISAYRVHGWTYLMGVSPSGVLAELTGVQGGCARGKGGSMHMYAPNFYGGNGIVGAQVPLGAGVGLACKYKGNGGMCLALYGDGAANQGQVFEAYNMAYLWKLPVIFVCENNNYGMGTSSERASCNTDYYTRGDALPGIWVDGMDVLAVRSATEFAINYVNTHGPLVMETNTYRYSGHSMSDPGTSYRTREEIQEVRQKRDPITSFKELCIELGLITTDEVKAIDLKVRKEVDEATAFAKSDAELGVSHLWTDVYSNNLEPKLRGTIAYDIDHIQERKGVNH

SEQ ID NO: 24103 - DNA, 4754 bp, DROSOPHILA
tctcgaaccggcgcagttccagcatctgcgtgtacatcgtcagggcgtcctccctggacagctccacgtccattgtgggtccattctccaggtcgtagcacttgaacgtctgcaacgggcataacaaaatcattaaagtaacccatttcggaatgctgctctagtaggaacgcaagaagaatctatgtgttgtgcagcactgaaaaatatcagcagcttatgtctatattcagtgttggtctacgcgatgagcagattaagtcgtttctatgttagatttatatcagctatacttaacagcaaatatttaaacatttttcagagtacataatttaattcaaaatgaaaaatataacttttacgatatagcttttttcaatggtatttacttatccattgaccttcttgtgataatcaaaacacttacgttctccagggtcaaacagctacatttgtggcgccctattatcctgcagagcatatttctctcgaggatggagtgggctccactgcatctcatcgccacgcggacacaactgaacttcatcattggcccttgcccgaataccaattcccaaacaccggggcactaaaatgagcttgtagccaaatgggcaattgccacgcactaaaattttgaatatgatcggaaattgttgaaaaatggatttgtactcaaccgaaaagaaatcgacagtaaaatcataagcaaatcgacagagatggcaactgtcactaaacagaacgagaaggaaatataacgattttgggattgcttatggagctgacaactgctccttttcaaatactactttgattcgaactgtaattcttccacaaatcgaattatctattaaatctattccgtttattaatatcttataaatctatcaaaattctatagtgcaagtataggtgaaacagactgagattttcacatttcaaaagtacatacttgattcacttttgttaagaaaactaatttggattaatttttctagatttttatattttcaacaatttacacctcgctttatccttattgaacacgttcgcaatataatatccaatgcagtaccccagagttatgtggtgcgctacgatgtgtggttggagtgctccgattagctaagctttttgtgggtctcttcggatccgttccgttctacggggttctcatcgttcaactttcggcttatgatctagagatttcgcttgtgtccaagtttctgagttattgtgtcttcttgtctgtctgtcagtgatttgtgtttgctgttcggttttcttgtttcgtttaaggttcttgtgagttcccgaatcagattcgttggcccgatgacttagtgattgacgcccttgcgctcctggatgtgatcaatatcgtaggcgatggtgccgcgcagcttgggctccagattgttggagtacacgtccgtccagaggtggctcacgcccagctcggcatcggacttggcgaaggcggtggcctcgtcgacctccttgcgtaccttcagatcgatggcctggaagatgtttttttcttttagcaatcataactcataacaaaaataaaaccctataagccaaacccaccttaacttcatcggtggtaatcagacccagctcgatgcacagctccttgaaggaggtgatgggatcacgcttctggcgcacctcctggatctcctcgcgtgtgcggtacgatgtgcccggatcggacatggagtgtccagagtatcggtacgtgttcgtctccatcaccaaaggtccgtgagtgttcacatagttgatggcgaactcggtggcgctgcgcacggccagcacatccatgccgtccacccagattccgggcagagcgtcgccgcgggtatagtaatcagtgttgcaggaagcacgctcagaactggtgcccattcctaatgggtataattatacaacatttggtttaagtaaatatcttttagcattgttccactttctacagcactcaccgtagttgttgttctcgcagacaaagatcacaggcagtttccacaggtaggccatgttgtaagcctcgaacacctgtccttgattggcggcaccatcaccgtagagggccaggcacatgccgccattgcccttgtacttgcaggccaagccaacgccggcacccaaaggaacttgagcacccacgatgccattgcctccgtagaagttcggtgcgtacatgtgcatggagccacccttgccgcgggcacagccaccctggacaccggtgagctcagccagtacgccgctgggtgagacgcccatcaggtaggtccatccgtggacacggtacgccgagatgatgttgtccacatcccgcatcgccgccttcatgccaacggcgcatgcctcctggccggaatacagatgacagaagccgcgaatgatcttctccttgtacagattaccggcggccgtctccaaccgacggatcgtctgcatctgtgtgtagtacttgagggcctgatccttggtcagcttcacttccgtggcgggtccttcgtccaggcggtgcagcttgaagggctgcaaagttggaaagcatatttagaatttagatccctaaacttcattaattttaaaaacgttttctacttttacattaacaactgacacacacatctgataagaacgtaacggaaacgtttggaacgcatgataagtaataaaatgatagcagtttgattggataaaccaaataaccataggcttcaagcttctctaatcaaagtatactaatctatagagagctataaccacatatcgaggattttcggaagtatgctccaaaaaccaaatttggatttatggcggctaatttatggcgtgagaatcgacgtaaacagagagccagacagacagacggagagaaagagagagagggtgaaaatcggcggatcgttgataagactatatgttatatggtgcgtgaacagtcacgcgtcggccacgcaaaaggcagacggtgataaagagcgtgggagacggaaaactacaaattactgcgtgaccttgtcatttgaaaatgagcggattgaccggcaaaatgcaaccctgcacttacacacacacacacacacacgcaaaccgtttgctatctggcgaaaatcgcattatgtaaccgtattttttcccttccgacttttgaattttcctgagttacaagtacttaatgctataatacgcacccgattcacttgaacggtggcctccgtggcataattgttggttttcgaaacacctgcttgggctgcattctggaataaaccgaaaaacgacgatgaatatctcccattcctgatgatatcgatgctgctgttgttgttgttgttgctaagtatccgacatccgctgatgatgatgttgttgttgttgttgttatggcaacgcttttagtgttttcattatcgaatggatttgttcaattgcatttttagtgacaacaattagaaatgttagtgggtgcaaagcgggattgggattacgtactttttgcagttgcttaacaataatgggcaattcgctaacgcgtgacagagtacgcaacattttcgctgtgttattctcgttcgactgacagaaattggatgtgaatgggggctttctatatgcggattgtccggatctagaatcgcacgctatatatctggtgtctcagtcgcaccgccgcgcgtcgttgtaagttaaacaatcggaaaaaaaggtagcgagattagtttatcaactactatattgcacaactataacaaccgtttggcgttatagcgaaaaataacgcaccacttggcctattagtgtgaccctaaataaaatactgcagctttccctgttttcaaaaaatactaaattagcttatcgaactttctttttcaatataacttgaaatataaatgtttacgtaaaatattcaataagcttttatataatgtgtcacacaatgttatatcaaaataatagtagtgtttggcggttattgaaatactcgaataaatacttactcaatcacattttatattactttgccgcccaaataaaacgagggttttcaaagaagtacttttatttcacattgaagatctcatttggtttttgtttgctttctcatttcttactcgtattgttacttgaaattgcctccataaatccacatttgcgattgcagttgcaattgcaatactgctctatatcgcactcagctcacataattcactaatctcttacaaaaacttaagtaatgtttgttccttgcacaaaaaaccagttaaatagaaataggtaaagtagaattaaacagttaaattcaaataaacgctttacaaactaagattttaaactagtttttgtatttgttggtttctcggtttgttgtttcatttttttttttttgctttagaaatggcagctaaaagatttgagtttaaaagttactaacggaaaatgaggaaatggatcgatcgtttgggaaaaactaagcgaatgaaataaattttttactttcttttatctatcttttgctctgttaccgttacacatattcaatttttcgcgcgtttttctgttacatcaaaaattggtttctcacacaaatattttgcattatgacaaaaaattatgctttgctttgttttttgttttgtttcatatgtatacatgtacatgtatatatatatatatttgtatgtataaacacttattagaagtcctgttgtgtttttgtttcc

SEQ ID NO: 24104 - DNA, 1947 bp, DROSOPHILA
ataaactaatctcgctacctttttttccgattgtttaacttacaacgacgcgcggcggtgcgactgagacaccagatatatagcgtgcgattctagatccggacaatccgcatatagaaagcccccattcacatccaatttctgtcagtcgaacgagaataacacagcgaaaatgttgcgtactctgtcacgcgttagcgaattgcccattattgttaagcaactgcaaaaagtacgtaatcccaatcccgctttgcacccactaacatttctaattgttgtcactaaaaatgcaattgaacaaatccattcgataatgaaaacactaaaagcgttgccataacaacaacaacaacaacatcatcatcagcggatgtcggatacttagcaacaacaacaacaacagcagcatcgatatcatcaggaatgggagatattcatcgtcgtttttcggtttattccagaatgcagcccaagcaggtgtttcgaaaaccaacaattatgccacggaggccaccgttcaagtgaatcggcccttcaagctgcaccgcctggacgaaggacccgccacggaagtgaagctgaccaaggatcaggccctcaagtactacacacagatgcagacgatccgtcggttggagacggccgccggtaatctgtacaaggagaagatcattcgcggcttctgtcatctgtattccggccaggaggcatgcgccgttggcatgaaggcggcgatgcgggatgtggacaacatcatctcggcgtaccgtgtccacggatggacctacctgatgggcgtctcacccagcggcgtactggctgagctcaccggtgtccagggtggctgtgcccgcggcaagggtggctccatgcacatgtacgcaccgaacttctacggaggcaatggcatcgtgggtgctcaagttcctttgggtgccggcgttggcttggcctgcaagtacaagggcaatggcggcatgtgcctggccctctacggtgatggtgccgccaatcaaggacaggtgttcgaggcttacaacatggcctacctgtggaaactgcctgtgatctttgtctgcgagaacaacaactacggaatgggcaccagttctgagcgtgcttcctgcaacactgattactatacccgcggcgacgctctgcccggaatctgggtggacggcatggatgtgctggccgtgcgcagcgccaccgagttcgccatcaactatgtgaacactcacggacctttggtgatggagacgaacacgtaccgatactctggacactccatgtccgatccgggcacatcgtaccgcacacgcgaggagatccaggaggtgcgccagaagcgtgatcccatcacctccttcaaggagctgtgcatcgagctgggtctgattaccaccgatgaagttaaggccatcgatctgaaggtacgcaaggaggtcgacgaggccaccgccttcgccaagtccgatgccgagctgggcgtgagccacctctggacggacgtgtactccaacaatctggagcccaagctgcgcggcaccatcgcctacgatattgatcacatccaggagcgcaagggcgtcaatcactaagtcatcgggccaacgaatctgattcgggaactcacaagaaccttaaacgaaacaagaaaaccgaacagcaaacacaaatcactgacagacagacaagaagacacaataactcagaaacttggacacaagcgaaatctctagatcataagccgaaagttgaacgatgagaaccccgtagaacggaacggatccgaagagacccacaaaaagcttagctaatcggagcactccaaccacacatcgtagcgcaccacataactctggggtactgcattggatattatattgcgaacgtgttcaataaggataaagcgaggtgtaaattgttgaaaatataaaaatc

SEQ ID NO: 24105 - protein, 328 aa, DROSOPHILA
MQTIRRLETAAGNLYKEKIIRGFCHLYSGQEACAVGMKAAMRDVDNIISAYRVHGWTYLMGVSPSGVLAELTGVQGGCARGKGGSMHMYAPNFYGGNGIVGAQVPLGAGVGLACKYKGNGGMCLALYGDGAANQGQVFEAYNMAYLWKLPVIFVCENNNYGMGTSSERASCNTDYYTRGDALPGIWVDGMDVLAVRSATEFAINYVNTHGPLVMETNTYRYSGHSMSDPGTSYRTREEIQEVRQKRDPITSFKELCIELGLITTDEVKAIDLKVRKEVDEATAFAKSDAELGVSHLWTDVYSNNLEPKLRGTIAYDIDHIQERKGVNH

SEQ ID NO: 24106 - DNA, 42429 bp, DROSOPHILA
accagtcgggaatgatccagccaattccgcacctctcgtgcgatgatttcgttgtatggattctcctgctgctgttgcgtgcgctccgcacgcgttttgaagcagctcttagcttttgggagttccggatatttcggctgcgtgactgcgactacccgggcccgctcgtagtgcggtgctttcggccgctgtatattgatcttacccctaaagcgaagaaattgtagcgcaggagtactgctcttagccagggaaaggcctaaaatcatttacacatcagtaaaagcttgtacatagatgttacatgttacacaacaggccaagctcaaaatggcaaccgctatgaaccgtccaacttacttctttgtatcagggtggccatgctgtagaactgtattaaggtatctaatctctaaaactagaacttctccttatttaactttatttttactaaaacgatgtttattcattcttatcgatagccagatatttggtttcatcgatatttcgccggctagcgttgccacctcgtcgagcccttcttcggttacaattaagtttattttagtttaaagataagattaaaaaaaataaatagtcagtagtttgtttgattaaatattacaattttaatcatgtgtgagaactatttactttaaacctataaggttctcacacgatataggaaatgtgccgagaggagaataagaagacgaggtaattttttttgctaatcctgatttggacatgtgctcccgattttaatcgattccacactgcatatagcttggtaaaaataatccccaaaaaacccacaacgattgcataggtatagaatttatttaattacagttataacattaacatctatatatatatatgtatatatataatgtatatatgtatgtataagttgtatttcgctatggggttcgatttggatttacggcccgagaaacctatagaatctgggagcgaagaaaataaaaaacaaaccaagtgtatgaaataagtgtaatttaatctttttcttcaatgtaacttaggaaataactaaaaagtctcttaaatcatacaacttatacattaacatttgtttaacagcgcttcctatgctttttcttgaaaacgtgttctttttattttctgaattattcacttttaaacttcttttgtttatctgtttctgggtgaccttttatagatctgatctctcgtgttcttgtatcgttaattatgttatataatgtacagatttcttttaggtttagttttaaaacatacaactaaatacacgctaaacactaattaaactgtatttacattttttacttgttagagcctaaataatttaaatatgttacagatgtatttttttattttttgtttttttttttcactcgtgtgttttgctttctatattattccggttacataatttacaagttgtgtaaaaaattacgtttaagtttagggagtgttcaaggagagtagtatatagatttttgtattattttgtgagtggtatgtttacgtgttggttttttgtggggtgtcagaattatggtataaacataatgaaggatcctgaaactacccaacattgtacaaagtttcgctcacaaaaactaaaaagtgggaagtgggagatcggaacacctacatttagatttagaccagggcgttgtagttaggtttgtggcagtggtgaaagtgataaaaaatgtaaagaaaaaacaaaaatttgccgtcttttgcaaacaaaagacctacatcattaaatcgaaaactaccgtatcttttacttgaatagaagaaactctggtgcagagtgaaataaacacgatgtgaaacgtgtctgagttttaaaataatgagcttaacatattaattataattaaatacgcgtctagataaataatcgtagtataatgtatgtgtgtgtatgttatcgtaggaaaagcctctgggcgcaactttaaacctaattgtgcttaacagcgtgggtgacagtccggactcatcttaagttctttgggtctatgctaggccctgtatactagttttatatgcaggcattccatagagccaaggaaccgatctgtcaaaaaaaatggtcggttgttcgaaggcggaaactttgtataacgtggtgtagttacgtttctatcgaagtagtcgaaagttattcaccaataaaaacttaatcgttttaggattaggatcgaatattaatattatgtatgggtagtagtatgcatagtacagtaaacagttaatatgttgtaagctttctgtaacatttctttcaattcaatttgtatgtgtaggtttttctgtttgtttctttctttttaaataagcaaaaataaaacattctttcttgagatcaaacttaacgatactttgcaagctttttctttaaggtttttaattacggagagttatataattaatttagacaaatattttgctttcaaagtgtcggaatttaaagggttttctttcgttttgtttgagtctcttgcggatctctttacacttttatgtgatcttggcctcaatgaacttttgcattcttgcatttatttattcaaactttagtttgcatgtttcagcttgtttacgtttttgttgtgttttgttttcctttgcttttttttaaacttttgcttgtttaatcgctatttaaaattacttaaaatactagaagagcgtaacatgtttttgttggtttctttatctggttcctcttatgttgtcgtgtaagcctgtgaagtttaacatctgggtatattttatcgttcaaagtccgtgggtttggttgttatagtggtttagacagtagcgatgacaatcaggaggtgtgcaagctcagctacgcgattcttaagatccggagcggcgcgctctaggttttcattagcaaaatcgcatgatggaaatatgtgtaccacgtaggctgcttgttcacttcctggaatgggtatgttcactatgccggctgccattttctgttgcaaataggtaatgaaaccggtctggaggttccttgaatgctgcagtacatcggcgtgatctcttccgcatggcaaagccaaaagcatgcaatgctccttgtcaacctgggtgttttgagtaaatgatattagtgatgatcacacctttaaatttgtttgtatatacatacctgcatcttcttggctactccctccagttgtgtctgctctagtcgcattctttgcgcaatcctcagcagcggtgtattagtctccaccaaactgggaagcgacgctcttgccacattagggtttccgtgcacaaagtgcatttggacagcggcctgatctgttttaagggccaataagccctgccacattaccggatatcgctgcagcagagtaaccagcgaatcacctggtggcggtgccatcgctggtggtgcttgctgggaggccaattccatgcctgcaggcaaagcaggtggcagatgttcctgctgttgttgaactgcgattgtaaagtcattcgttaaatatacttcattacattggtttgcgatcagtagatacttaccgacagctgcaatcattgacatgcggtccatctcatccaactgcatatccattgccttgcctggatgatggtggcttcctggctgcacgctcccatcacgaccgataaacggacttccagaggaaactgcaggcatttgttgtggcaccaccacactaatggttgcagttgggcgatgggccggcggtggttccagttgtaaggcaccactatcgtacaagccccttgatgcaatttcgctgaaatgggccgggggaatgcgcgtattgtgtacgtaaacctgagccatttgtggagagtctggaagaaataatgggttgttataagatttaaagagtcaataaaactgtaagaacctaccagctgcagtgcgatcctgaggactctgcaaactgtggggaactgcgatggtccttggaggtccactaccggggcgtcgtaactctagcggcggactgctgcccatcttgtcatcgtagtcgccacctcgcattaaatgatgctggtagagcataaaatccctggatgcagtcactcctcgatacgtagaatcattctgaaaaaaaagagtggcagacaattttttttgtaagtaaatgcttcaatcaaaatacccggattaatatgactacacgaagaacttaatttggttacgctacatgaaagctccgcaagtaaaacttgtgtattaccggtgttatgggcgaagcctgctgatgagctggaggcggactctgggttcgccgtccactgacataagcacccaggtcatgctgaatccaaagttagcaattcgattgtaaaataatttaagggttagtaaagaactcaattttaatttttaaaggttagccataattaagtttaaataaagatacattttaaggacatgtaattcgcttaaattaaaagtattattcgttgttacttaccagactggcgtcaaaaggtggtactccagaaatgccgggtggtaaaaccaatggagatactctcggctggctctgcgggcttatgtttgggatggctgtgcgtatacctgtcaagattttaaagttagctatggccgtaaaggacaatatgggtattctgcaacttaccagctactggtacgacggaattgacctgctgctgagctgttttcaagactgcagctgataccggtggtgggctgcccacacttcctggcataatctgtccagactgtagtccgtgcagtacgggatttggctttccaggcggcggtgaagggttcaattgatgctgctgaggctgcagatgtgctggtagtttttgctgcagtagcatgccaggatgggtaggcataattattccgtgaggaggcatttgtatctgagctcccttttgctgattgttttgcttatacaaatgctgttgttgctgctgctgaacggctggcaaagtgggtgtcaaaacagtgggtgcatagctatagttcggtttagccaactgcaggtgggggcctgttgatgaagttggtggtagctgctgttgttgcggttgaggcaccaccgacgcctttgagctgaccacgtgcaatatttgcggctgggctgctgatgccgcttgcttgatcaccaccgtttgcggctgctgctgctgcggacttatagaagctcctggccccaattgttgctgctggctaggaattcttggagagtgcggagagtgtgctgttggtggcggcacgttgacctgaagatgttgttgctgctgcaggtgacgtgcaatgatctggggctgcactagttgttgatttcctgcagtatccgtgagcaacatgtgaccggaatgcggtgcgtgctgtggtggttgagctactgcttgctttgtgggcgtcaattgctgctggatattcttttccctattcaggacgtgagctttcagtggttgaggtggcctaacagtggtatgctgcgcatggtgcagcacagtgggcaggggattctgttgtaggattatgggttgttttgctggagccacaatttgcggttgttgctgctgaataacctgcgaggcgtttcctttcaccagaacacttacaggtttgttcaacaaagcggctgccgaggtctcaagttgtaccgattttcctaaggctgtaataggatttggaagtccagatggaatcagagtagtatttatctgtaaattagcttgttgttgtggtggttgctgcggatgttgttgctgctgctggtgttgtagctgcgggggaggagctgcttgaccgtcttcattgctgctgttggcaggtgcagcagcggtagctgctggaagattaccctctttgccctggggcattccagcggtgataactccagtaactggatcaactagagccttgctgaccgcatccgcaaccccaccggttatcttttgagtagcaggggccgctgtctgatgcatcggaagccccccactgggaatggatgagttgatggcctggtaagattcaatctctgctgccgcaatagcttttttcttgggatgttgaggcattgtaggtttgacggggaccatggctggcacaggaacggtaaccggggcagctacactaacaggcgctggtgtagaaattggtgtcacaactgataccggttccacttctttagcatctaattgggggacatgcgactccacaccagctccttctggtggtgccaaatgactggcggcaacagttgcattagacgcagtaacttcttcaatcaagtttgctgtttgttcaccgattgtttttctgtccttggaacgccttggacgacccactgcattaatgatctgtaccgcatccgtctttttggcttgagcatttctgccagaacgtcgtggtggagtttgtgcaccttttggcaaatgtggtcctgttccagttggcgtgttggtatttcgaaccacatcttcaatgatatcgtctactgtgctgcgatcctccttttcttgtaaacggcgagatttgcgtgtgttacaagactcggagttgtctcctccgattggatcagtatttgatataacctccgactgctgctgttgttgctgctgaattgtttgctccatttcactaatattcttaatcgagggttgcgttttattgatggtaagaataagtcgtggtcgttggtcctcagcactgggggcaacagatgatattgtcttgggcttgggctcttcaccaccgtcttcatggaactcgtagatatcctggccagttcctacttgacttgcgacttggttttgttcttgagcctgagttagggcttgattcctcgcctttttctctgcagctgtcaacacagagctggtaggaataggagttggcagtggagtcgaagatgttgccgacgtcaccatttccattccctttcgctgaatatcgagctgctgctgctgaagttgctgttgctgcaatagtagattccttggaggacgtcctttcctgcctctggttacaggagctgttacgggttttcttagcctggtttgcaccccattgtcacccggttgtacaaccaatgaatccactccaggcggcgcagctgttaccgagttaagcgggaatcctcccactttcttcgcccctcttggctggcgtcctctcttagcactacctccccttcctggaggtctcccaacagtgggtataggtggctttgcagggggcaactgcctggtctccgtttcgtcctctgtatcatgatcgtttgagttgttcacactcattgaagttgttggaagagcagtttcttgggccatagactgattcccaggctgcggattgggaataggagccggtgcaattgcctgcatttccactgctcgcttcgcatccttactagccaatggagtatctaatttcttaatgacactgtctatatttacctcctttgctgaccagtaatcgctgtcaacttcctttgagtcctgttcgatcaactcatcctgctttggctgcgaaatcttaattagattctcctccgttaacagagagccaaccgtatttgccgagattactgccaaacctgttgtaggagtgggtgtgcgaatcaccgaaacactttccgatgttttctgagcggacatagctggtgttggttctacatgaccaggtggagtgctatccttgccctggttttgaggatagtgtatggcattaccttgggtttgtggtggtggaacttgattttgtgcaacaatatgttgttggacaattattttcggtgtattttgtatcacattcaaaggcgtttgaagaggaagatttgctcctggcgacgacagctgtttctgatgcggatgaccagacgacgattgctggtgtggtaattgttgctgttggtttggctgcgaatgagatccaactcgtgttaatatggcgggaggctggactccctgattaacagaaaccaaagtattcggtttgcaaggtgaactgtgggacaattgttgaggatgttgctgctgaggtacacctcgcgctggaagctgggaattatgttgttgggatgcaaaaatcgacgtagaacctcccaaatggccgactccttgaggcgacttttgctgttgctggggaccatgcatttgctgcagcttttgtatttgctgcagttgctgttgctgagcctgatgctgttggttcaactgctgctgagattgatgttgctgttgggataggtgttgttgttgtgcctgattttgttgctggacctgatgttgctgttgggattggtgttgctgaatttgttgattaaactgctgctgagcttgatgttgtttctgagtcggatgttgttgggcatgaagttgttgatttaaatgttgctggttgtgatgttgttgctgctgctgagcttgatgttgctgatgcatttggtgttgcggggctgacgttatttgttgcgactgaccgtgaagttgttgctgctgcatgtgttgctgtcgttgtatcatttgctgatgcatgaactgctgcatgtgctgctggtgctgatgtgcagtcatcttggctatcacctgtggctgctgctgattctgatgggcatttaaatgcacgttcttgtgcggcggaaggctccccaagggtggcgagctggccacttgcgattgggttgcctgttgaggctgtacggtgaccactttacttatgatcgtcggatgatgtggcacctgtatcggtgtcattttttgtagcggaatagtcattaactgcggtgtcgtctgcacctcagccacagatttcggcgagggttgttgtggtacctgctggtttctgggttggtaactgtttactttgctggtagtaggcgaattgctgctagacaacactcgagtcgtgggacttgccaatggactaatgttgctactttgcgggctggttattagggcatgttgctgctgtgtctgctgaacctgttgctggggtgatggttggcttaccattggacgcccaacaggactcagttgacccaccagcctactttgggctacaccacgacctggtgaatgaagcggactgtgtggggatggggctcgaatgccaaccatataagttccaggttgctgaggatgatgtgactgaggagacaacaccatttgggggaccgcaaagtgaggtgtttgttctggtatagatatcgttggcggttgcattatcaaagattgcgtccggattgcttgctgaggtgtaatcggaccctgcttgggagttgaagcctggggcatggcattctgacttgcagttggacttccaaatgatatggatgcagacgctgaagctgtggcagatgccgcgctcgtgttcgagcaactgcttatcacgttggacagatccaagttgatcacggaatttgcacttatgccgcttcccgttgaatgcggtgcaggcaggacggtctgcacaggctgcaccaaaggctgttggagtttacttatagttggtggttcaatcttaacaggagaagggggtaggcctgctggtactgtttttggcgtatccaaaaatggcaacttagtgatcacggaaggttgcggtgtggactcgttgctgagcttcggttgagactctacgttaggtatgtctatatttgctgtttccctaggagtaggactgttattgctaattgatttctccggcgacgatgagctctgcacagtttcatcaatcttgagactaggcccactactatccgcttcgtctggattctcttctgtgtcagtatcaatctgcagatccctttctgactgcggagtatcagccttgatgtccatcatatcctcgtgttttaaactttgcactgccttgttgagttcttccggatccaagacctcaacgacaggttctgattcaatttctgcctcaggatcggggtctggttcagcctctctttcgggttccatttctggttcctccagaatggacgcaggctctccagctgtttcaatcgcttttgcagctaaagctgcctcttcatccggttctgctatgactaaagttggtgtttccaattcatttacagagctcatttcatccatgccatcgagggagtagtccgtcgtagaggaagtgccaaagctttcccccaacagtgcggatacggcactctcagtctcctcctgagagatggtcacgcgggacttgctttcctctaacttatccaacggtttagtcgcacgtggaggggatgctaccggaatttttggctcatctgcaatgttatctagtaaagatgtagaattaaattctgcggaaatggattgcacggccgattcactaatcctatcgtcaagctgaccatcgaaaccgggaatgaagctttccttctttttgcattgagcagaagcactggtaggcgaattatctaatcccggggctgcactgactcccgctgctgtcgaagatgtaggagtggtagccaaagcagaagaggaaataactgtaccactgcttacaggtgtttctgcagactgagtggatagcgtggaactgttggctatggttggagttttgggtatgggactaattaggcggggtttctcacgtgaaggagtgagaccatcgtttccacgactcgagggcgttgtaggtttcgcttttggggtgtgcaacgcatcatcgtcatcgtcgcctattagacatggtaaactaggagatggcttacaaacgggtggcgatgagatatgcttggcgtccaattgcaggtctgcatgtttgctagcagcttgaacgttgacagtaagctttccaggagtaggaggtgcggatgaagtggaagccacatttggcagggattcccttcgctgttgttgcaacaacttttcttgcttttcctccttagaccgcttcttctttttcttcttgtctttacttttatgctgttcctgctgctccgatttgacaccctgtttagtcatatccactgagttgttgtcttcgttatcagagaatcggaatacatctgtcatatccgatctatatgtggcggccgttgaaggagtggcttcttctgaaatcggcttggtatcaaagtcactcattagttgagcctctagagccctccctgcttcatccatatccacgctgttatcatcatccaccttagtttcaaccttggaagatttctggtgaatttgattttgctgttctcgttgagatttctcgcgtctctttttctcgcgcttctctctccggtgtctttccctatcagcatgagaagatgagctgctgcctcccgataggcgacttctctccagctgctgttgttgctcaggctcatgcacagttaattgaatatgtgcttcctcatttttgctgttaggtgtggaaggttcttgtttgtacgtttgcaaagcagcggagacaattggaccagtagtagacacggaactaggtataatgtctttattggtttccgcttgctcgggaaactgtgattcttcttcatcggaaataatgccaaatataaactccattttatcctctcctctttttgaagtttgggccgtcgaaggcgctgacgttggagtggcaggcaaagaaggtgaggtagaaggatgggctccacttgagttgtatattttggtattgcaggaattatccatgctcttcgatttctttgacttttttagtcgatgccgctcttctttcgataacttttcggaacttgtatcattggtggtgggcgaattgggtacagtggcttccgtcatatttctaagcttctcacgtttcttttccttcctttccttatgctttctcctttcgccggctgaaatctctaacggtattgaagaacactcagtttttagatcatcaaaattatcgaacttcgtcttgcactcggaggatgaatgaacatcaaatatggagggagttaacggggtcatcaccaaaggagtttgagctgctgaagtatccgctgtggaagaggatttcaaacgtcgcttgctctttttatgttttttgcgagtttctggagagtactctttaagctttccagtataggtgtattcagaagaattatagaaatctccaagctctgtctttatttcacgttccgtcttcagtttcctctcctctattgaagaatttgaatcatgccgagacttgaacttctgttcctcgtcggaaagctgttcccgcttgatttcctgagcaggagctataggatgctcttgcttaatagtcaaatcaggagccggctgggattgagactcagaatcagatgcaatcctagtggagttggagttcctttttccaaaatggctatgcttcatcacattccttcttatttcatcttcggagctatcatcaccatcgcaaagtcttcttaaattctgttgcatctgacgtactcggttagcatcagctagggtgcttgcaccctggttatcctgacctccgtgctctgcatccgaatcggaggaaattcgccgttggtgggtctcctcatcgtcatcatcatcgctgctagacagtccaggataacgaccatggaagctgctactaccactatttcgatgttgtcgatcctcgaactcagtgtccgagtctccatcatagctagtagagcgcttctttttggcgcgagattgctttagctgcgagaacttcgccttgatctttttttcctccgcctggcgttgcatattcttgcagctcctggcttttactttgtcgtacatagatacatttggacaatcatccgggatatcaaagatggaatgcttcttggaggcatcatctgtgtcgtcagagtctgcggagctcaacatcatcaatttggcgcgaagagatttagatgaagaatgatgtccttcatcagatccccgtgatgacttccgttccacacttctcctgtggtgttgatgatggagttttccgctcgaagtattagtggctgctgagctgagctctccagcagacccacttcccgcagcagagattctcctgtgaggattatgctgctgtggtgtatgctcttcatctgtattcgtggattccgccaccgaatgccgctttttttcccgatggtgatgatgatctcgcttactcttatgcctagaagatgaactatttgcatgactactgaagtgctccctctccttttctcttttgggttgatgagactgcagctcctcctcacttgtgtttaagttgtgcttggtttgggaaatgggatctaccaccacttcaatggaggagttcgtttctatggagctggcactgcccttttgatgatgtttatctcgacgatggtgatgttttgaggacgaggcggaacttcctccacaaccgtgaggccttgaaatatgtgaactactatttttatcttctttgaaactgctgctcttgtgttccttggagtcccggcgatcatttaatctttgattactgctgtgaaccgagatgttctgggagttctccattcttatgcgctttacataatcctcatgatgaatttgatgactcgatccgccgcatgatccaccacctccagcactgtggttgctttcctgcgagctaagtcgtcgcttatgcaggcgcactggggaatttctagacaactttctcgagcgctccttcggggtgttgtctgaaggagttgatggggatgcaccaggagttccttgagcaatggtgtccatggcattttccttgttgtgctgacagtcgattgcggtgagactactagcctcgccagcaatatccattttgcttttttggtatgaagatagctcacgcatccttcccccacggccttcttgctcaacatccatagctcggcgagattgttccttctctcgatgctctctttcgcgctgatccttttcgcggtgaagctccttttccctttgctccttctcacgcatttccttttctctcaagtctttatcacgcagctccttctccctgttatctctctctctttgttctttttcgcgcagatctttttcacggatttccttttctttttgttccttatcacgctgctccttttctctaagctctcgctcttctctttcctttttttcacgatcctcttgggccttcttctcccgttctctttctttttcctcttctttagcttttcggtcttctttttctctttcctcctgctgagccttacgatccttttcctcccgttcaacctgtttacggagatccttctcacgcttttcctgacgctcctttttctctttctcgtggcgctggttcttttcagctttgtccgccgtatcatcggcctcgctggagtcgtcttcaatgcggggagtagctgacttagaggactgggaggtagacgagttctttcgcttgtcagaggacgatgcatttttgtcagacttcttgattttcttgtcgctttccgatctattgttgtgcttgctgtgcagcttgtcgtgggtgctgctgatctttttagagctagaactcgaggattgggatgtggaggtgccacttttttttgtatgctcttcctcaacaaaggtcgactgttgcggcttttgtacgtgaatcgctgctgaggttaaggaactgttaccgttggacgttgatgatgaaatagatgcagatgtttccacagaagctgtggttgaatccaaggaaaggctgcttggggcgcctacgtttgtactacctggcactgaagcagatttctgaagctgaactctcgctggcgatgactgaggaccatctggcacgcttaagctcttcgttagattatttccagagctctggccagttaatctagattgttttcccatttctggaagaggtggaggagcaggctgtacagctggaggaggagcagcggtgttcggcaaaggcgggtgactgggaaacgggtactgcaatccttttgtaggtcccgagttggcagctggtgaggatgaggaggcagcagttcccccacttagtcctgcacttgcggttcctggtgctgcaggtttggtaagttgtcccaggcatgcggtaactcctcccaccgaaggcgagggtgatgggctgttgtagggcgacatcgaagcttgaggagaattcatgggtgataaactacttagtctttgaagcaatcccgcagatttgctacctgtcgagttacccaatccaccactacagtttccaataattggagtagccttggtcgccgcgagattaggcaaagcaggtgaggtgtttccgctacatgggcctccaggatgtcgggacacattagcgaccagcgaagatcctgtaacgatattggaactcgatcccaatgcaaaatcagagctggatgggtcgtaccattggtttttatttagccgttgaaaatcgtcatcaaaaacacttttcttggctagcacagatttgacaatgtcagagggctgcagttcatcaatatccaaaaacttgtgccgtgaattgctcgctgaactggatactgttccgctggaactgttgctatttccggatgccgagcttgtctgatgggaatttagaccagtactcaaattcatgtgcatagagagctgccaagaaggcgtggcactcgagggcgtatgaccggagatatgttctctactgcttcccccagaccatcgttcatagttttcctcaaagttgcgcagtctttcatctagtgaaggacttcctccggcattttggccaggtacatccgaatcgctggagttggaactcagtgatcgtggacgtgctggactggccatcaagcaagtgttagaagatgaggatccgtgcaattgctgcgactgttgttggtgattattttgttggttttggtggtgtgaagaggaacgccaatatcgcgaggatgggctgggcaggaatgtggatccagaacaggagcccattccctgactggcgttaagactagagttgttaagggagcatgccgaagaggaagcagctcctatgcaccccaaccctccggtagatcctcctcccagttgctgctgcagatagctatttcctgctcctcctcctccactgcttctggactgttgttgttggaagaaaagcactccaaactttggaagggggagccacatcacatccctggttctttcccgaactctttctctgggcggaggcaatcgacgtggctctgtgggcagcacttcaggtcgctcatcacacagcggcgtaccagggcgagatccatccgcactttcgccaccgctagcctcgtgtgagtgatgggaatgtagttgatgtcccctacctctggagacatgatgatgatattcatccgccggagttaaactacttatcccacccaatccagatccactagaactattagtggttgaggatgagctgggttgttgcatagtagtggtcactcgcctcctctttgctgccgccgaggcattcatcatgtgctgttgatccatgctgctggctcccacgattccgtgccggaaagccgaggaactagagagcgccgacaaagctcccacatcgatggaagggcgccggcaactgagcatcagggattggggagccgagggcaggtggccaggaaacttaatgcttggtgaaccacttggcgtctcggatacccttcgaatctcgcttttgcggtttaggggatcgtgtatcacatcacagttggacagtaaaagagggcttggtttattgatgctgctgtgctcgccagtggactccacctaaattaaaacgatattaccaataagaagttattttttgtattttaaagactgttccagttttaatgctttagcatagagaaaataagaaaaaaaaaaagctagatttggcgagtccaagcttaggtacattgggtacattagagtgatatgcaccaaaaaaataataacacttaatgattaaactttctaattattttatattgtattaaaatattttttttcttgtaaactaacttgaaagcatatccattcaaaacgtggaacaagtcgtgtccttgttaaaacatttacttaccccgctagcattaattattaatgattaatgattaatgattaattaatgattaaactttctaattattttatattgtattaaaatattttttttcttgtaaactaacttgaaagcatatccattcaaaacgtggaacaagtcgtgtccttgttaaaacatttacttaccccgctagcattggaatgatggtggtgatgatggtaatccattttgatgcgcttacggggactgacaacgccttcatcaccactggacgggcattcctcaacttgttctgccaattggatacgttgattgtgcactgggtgcaagtctttaggtgtcttaccgcaacgtctcctgctcagaatgctgcctccggatccagtaaacccttcagctccacccgtaatttgattgttatttaacgttccatcaatagattctccaacggctgctgtaggtccagtaaaacaatttacagctgaaccttgtcgagcggtaactggagaatcgcagcggacatcttcaaactgcgtggaatttcctgcacctccagaaacctcctcggagctacgaaaccggaggcgaccaacttcattgaagtcacagtcgacggtttgacgcgcattacgaaccattcgatgtctttgggccagagcggccggagacataggcaatgaacttgaagaggagctaacccctgagggcatggatgtgctcgctggtaccgttccggaggcgttgacattacagctgactacagcggacgccaggctgggggctggcatcgcactgcaggcattagtaccaatgtttgaaatgttgatgctggtgctttggttaattaaattgctcgcgctggagattccactgcttgctcctcctggcgtgttaatgggagagcagtcatcgttagagttgttttgatggcggctaaaggaagatgcacgagatcgagattgcaaagaagaggcgcttgactcatagcgactaaagcgcgggttagaacctagatgagagtattgcattaataagaaaggtgttgtatttaataaaatttgcaaaatattgcatttacccgaactttgttgttgctgtttctcttgtttatcgtaaaatgcgtcctggcactctctagatgcaaaatccacttgaagcttttttctccgtaagatcgttccacgcatatcctttaccgcggcttgggcgttttgtacctggtcatacaaaaccaaagctaactgcctgtttctgtcgatgctcactttagtaactgcaccaaaccgtgtaaactgcgactgaagaaacgactcggagactttttcgtccacaccatcgatccagacgcaattggtgggcatggattttccaaagcccaattttatcctgttgctgcccaagtgctcaccgtccattttgcgcattgcctttaccaccgagacaatgtctgaatactgacagaatgcataggcattcaggccctgcttcttgatatcgatctcaataatctcgccaaatgcttcaaaatgactacgcagttcgccggctgtaatgtccttctcaaggttcccgataaagagtgtccttgtcgacttgggatgatactcatccagctcggcttcgtagggtcgaaactcgttgtcctcgacatcataaccctggtacggttccacttcaattttgcagccgaagaagtgtttgtcatgagagacctccaacgctttttcaacgtcatctggctttttaaagcaaaccaaagcatagcgttcagaattttgtcccacaaccttaacccacgtaaccttgccgtgctttttgtactcatgaaatagaccatccttgagggatgtgtccgaggaacgggcaggcaggttgcggactcgtatcgctagcggccggttgtcttcggaatgcacgacgggattggccgtcagacaggaggatccgctggaactagagctactgcttgaagatgaactggacccacatccccctccgacgcctgcactgctgacggtaacagctgtgccactgggatttgaagagttgcctgcgggagtaaacgaaagacatttaatacgacatatttctaatataattttgtatgatcgcaacttactggttactgtgacagaattaacggtgcgactgctgcgcccctctgccatcgcacaattgcccgaagactggacgggactggacgcgtgcgagtgggatgaggagtgcgatgaggaggaggagctgtgcgaactgctgtagctactcggtgagcgcgagtgcgagcgactggaggaggtggtgctgcgtccgtgcaggttgtgtcgtgtccggatcggatgcgttggcaccccattgtccacggcggcggccaaaacagcggccacatttagaatgtcaccgctggctgtaccggaattggaacatactcccgcttctgctccagatcctaaccccaccgatcctgctgctccagaagctatcgtgggcattgttggagtcgccgtggttattgtattatttaaactattactactaaaactattgtttgtgattgtacttgtcgtagtcaaaggagtagctcctccagctcttcctggtgattccgaaccagagcgttctcctccgcttcccgttgctcctgcccccttaagtagcttattgagtttgctgctgtgcagaagcatatttcgtgaggtggcggtgttcagtaagtcatccgcagcacttcccgcataggccacgcttcgatgcacggccgtggtctgcgattgcgactgaatctgtggctgtccttgagcggcggagggacaagatccggctcctaccactggactgctggtgtagtgcgggtgttgaggattctgaagatgcggatgctggtgcggatgatggttgatcggtgagctgctcattgtgaagcccacggctgctgaggcgccggcattgccactgccaccagaacttttcaattgggccgtcgttgcagcagtggcggcttcgtaccatgactgtggtggagccacccgcgcgctctgatggttctggtggatattctgggtgctgctgcggtcgcctagcgcctgcggtactcccccaggacctgagcctaccaaacccccagtcccagttccaattgctcccgatccagatcctccagctgtgcaggctgctgtcgtcgtcgtcgtgttgctgctgttgatgccgccgccttgaacgctggcagaaccattcctgtacgggcgatctcggttgcgtgatctctcggaagaccctcctgccgccgtagcgaagactgacgcggaggcgctcacggacgagggactggagtttgaattggccaaggaagttgagttgttcgcttgatactgcgtgactaaacggctggtggtgcggtcgtaataattccgttcgaagctgtttgtcggtggttcctctgtagacctaaaatagtgtagaacaattcatcaaatttcagaaacacattaaaatgtatgtatttgttatagcgcacaaataaggggcaaaaatacgttttcattttatgacatagaataatacgcataattaatttagcttttactgctttttctttatatgtttgtaacacttttttttttattatctaggtaaaaacatatacgcatatacatatagtacatacatacatatgtatatattgaactagggttgccaccacattgttttgtttttttttttttaactacgaatgtatgttcatcgcattaccaatgttcatgatgcttgccagaatagtaacccaccttcgcatattatttaccggttctcgctgggaaaatcgtcgttgtaagctttgctacataggtaatcccggtttaatttatcatccccagaaacgggagccccaacatttagtgctaacatcgggaaacagtaatgtaccaaatctatcgttttttgttcgcttatccgttcccgatttcttcgtactattgataaatcggcactacgaaaaatttcacttggccaaataaataaacgagcgccaaataaactgacgtgcggctcaatccgccaacttcttcctttatttgtctgcgtctgtttacgcggctacacatacaaacaaatatctcacacactgatgcgtttgcacacacgaaagctgctacgaagaagcacaaacacagaagcaaaaaagccgggagagccacgtttttctttgctgctatatttaatagccaaccggtttttagtgttaaatattttattattccgtcactcttacacggttaaaggcttgccttacgttatttgtccttgcgatttgctcttcatttaataaacagttcgttcgctcggcgcatttcgctcactgaccaccccgatttcattttgtgccgatattcgcgtgtagtgctgccagactgtctggtactaccgtaacgtaaacaactctttgacgtaacgtaccccttaacgtaaccatgtaaaaattgtgtctattttctgagtttacatccagagccattatgtgtatttttttattttttaataattgagtattttttcatacgtttagttgtatttatttatatgtttaactatgtcaacaaattaactctgccaaattttgggttacgaaagggcaaacgctttaaaacaacaagttgtagttatctgaccagataattaccgaaatatttatttgtctatctgatgtaagctacatttatatttttcacaatgataagaaaacattttctctcatactaaaccgaataagattcggaagataccaggtaaaaatttaaatgttttacctgaagtttcgagtaacaatgacattcaattcaagacgcaaaaaccaacccccatataaattaaggcgcagaaggctcaatttattccataaaaaggacaatgggtttcagttgtacatcgttttcaggctcaccatatctccaaatataaaagattaagtttcctactaaaaatataacatagtgctaaatagcagcttattcttaattagtactaggtttgatgacttttacaaaagatgtgacgttttttcttatatatcggaaactcgggatatagtagacttttcttttcttttttttttttaattacttcaataacacactaatattcctcaagctattcttgtacttataatacagtttttttttataattacaatggttatgggatttttattaattttcaataaggatttaatattgtcataaactttctgacttataaagaagaaagagaaattctttgggaaagagcagatagctttataatcgtaatcattatttacccagactagctcatatttctacagtatacaatgaacaagctgatgaattgaagccatcttatttagattgatgtctcaagccctcagaagctgctggaatgaatattttttaaagccgcattaggcgctttaaggaacagcacttagaatatggccaaacgcatcatgcaccaagaagaaactgtttacatatgtttatacatatgtactgagtatatgcacaggcatggtggtggtggagctgaatgcagcattttccagccctctgctcaggtcacataagttggcgagcagcgccagaggcagagaattcgactgcagcaggaggacgtgccagacaaagtggctgtggtgcacatagctcggggcctaactcaggcggttgccactgaagtgcggtacagtctttcataaatttatggtaaatttttatacaagtatgaagtaacttacattttgagatacgttaaaggatgttccaaaaagatatttaccttacgaaaatgttcatatgtttatcgaaaacgcagtttggaggcgaaacaggggctatgatgagtaggggagaatgattgtccggcatgcgcagttgaggccatcagaaaaatcaattcagctaaaagagcgcccggttcaaggaattgcagggccacaccaaccaaaacaacgacaccgagaacaacaacatcgccagtaataacaacattactgcgcaacatttgttgcgcccaggagaaaaggggaggggggagcttgcggccagtcgaagaagcgccgtcgcccaaaaccacgcattgaacaacaacaacctcgaaggtgggtggacatttttgggcgtctgtaaattgcattactgccatgcttccagcgctactgtggttgcgggagcgcttatgtaatacacgaccaagatgactgcgcagtaaatggctgattagccggtgaagagaaacaaacctaaatagcggtggttttgggtttaggttttatacgaattttgatactttaaacgaaacgttcaaatacaaaccaaacagctaaagactatattaaaatttgcatgaatcctttatgtcaaaagcccagcgatggtaagctatcaagaacatatctgcattaaaaaggctctcacaaatacatttattgtgtttatttttagcacacaattggttggttggatcctcagcccacagtctcccagtcattgtcctggcaaaagtttctcaccgaacgtccttgtttgaggttatttatgtgtatatttggcttccctagaacataagagaaggagaagctaaaaagaagccccgtatgtacttagcctgccgggttttcccgcattccatacacattcacactaccgtgttcatggagttgaaatttgtgtaaccctttttaagtcttattttcaatcatagccggacgacgttgcccacccatttcccaactgactgcagtcaaagtaatttgaacgggagaacattcactaaacgcgtctccccttagggcgtgaaatttatcaatatcacggaattggcagtaggattaggaagatcgggatgaagaggttacagaagcattgctgcatagagtgcacccctgcatgcaaaagttgaaggacgcgggaatgacaggacgcgcaggatgtaaacacgacattctgctaaaggaataagataaacattaacacggaagtgacaggagagccccacccaaaataatttcagattataggacaatttctcattattagtatatttaaaatatttcgtatagccccatgtaggtcacaaaaggggtgatcaccaactgagcgctcatgaatacaaaatgcaatggtcaagacaaaatcccacatagaattaaaaaatgactgaaaaaataataaattggcaaatcgatagaaatttacaaaactaaggaaaatatgagataatataaaaacatatgggcgtggcagcatgggtcaacaaactttcgctgcgtctttgtctttagattctgtacgcttaatctcaaccttctagcttttttagttcctgagatctcgacgttcatacggacagacgattccttttgcctattacatacttctcagctaatctattatagccttttactccacgagtaacgggtataataaccattattgattttaaaacatattagcttggatttatctaaatagtagaactacaatattttaaactaacttcggaactaagaaaacgggatatcctattaatatattaatattgttgtttatattaatttagacacaaaattaaattattagttattccaactggcgacctcaattaaagtagtaacatgctagtgaattggtgtgatgtgtgtccaaggtatgcgacaaacaaagaaaggcgaggaaaaccaggggatgttctgaaaaaattcgcggctctgcttacccgagccaaagtgacgcaaccggaagcggcaaaaaagcgggtggcaaaaaggtaggggttacatatagcaacaacaagcagggctaggagcacagattatcttccctcccaggccggttcaaaccattgaatgaaacttatgcaaggcgagtgcctaagctgggagagaaagctaggggaaatccgaaaaagggcagagaatttaccatcgtattgcgcttgcgctctctgaattccagtacataatctggacagaaaatgctacggactgcgttacatgcttggcatatatgcacatatatataaaaggccaggacattggttatctttcatatcctggcagccacccacagccgcagggccctataaacaacaacagggtaaattgccacaataaaatcactgaaagattcaagtaaaaaaaatgtcagatcagaagctagaaaaaataaccgtcttcctaacttagaggctaggattgcttgaaaacgaggtcgtggaaatggaaaatgaaagcacttttaaagacactggcgacgacatgatgagttttacaggaagcagctctgccgcgccctttctgtagccagactgtcatttttctcggcgtcacacaacctccagagcctatgccggcaagaggaacttccagtgcactttgtttttccacatgcgttggggtttcttatcatgccgcttctaatgaaatggtaacaaaaagctaaattgcagtatggaaaagatgttatcttaaggaattctggtctataataacaagcaaaagttagtcactataacgaccaggaaaatctaacacggatttaaatatatcttgcgttgtaaaacgaaacccagaagagtaagatgtggtagtcgttgtgttaatatcttcgtcagatcctaggcatgcgatgcaaagtggcatcacatatatacgaattgagtaaactaatataagcactcttatttttatgaaaacaagagaaaaagctttctcgactatcagatacccgttactaagcttgagagaagggtttgcgggggtaaaagtggcaaatttctgaaagctgcatgcttaataaaatgttctcgtttttattgttcccgagatctcgttcgtacaggcagacatacggacggatatggctagatcgactcggctattgatcctaattaacaaaccttaagcctttgagggtcgaaaacgctattaagcgctgttttatatttttcaacgaatctattatacccttttactctgcgcgtacggatatagacacatcaacatcacttgaattaacttaactgcgacttttgataacccttcattcaaatgaaaccaaggattcgagtttccccagcactggcagaattcggtatttactgccaccatttattctggttaatcttaacttgtttggctgcatttaaattaattcgatttggcgaaaatggagtccaatggagacaaaatcgcaaactttgtttgctaaaaccattcaagtgaaaacaggcgacagtgcaatgcaattacatgcagggagatgaaaatacacatccacagatacggatacaaacgcacattgcgaatgggatacataatcacctcctttggggggctgacaatttaattaaaattgattttccgatcaatattttccagggaaatgcacagttgcaattgacgtggctgtatgtgtgttctgtatctaaacttgcaggcgttctggttatataagtaatacatacactaaaaaatataaaaatgatattgtgcggtggatttattcatcagtgtgtaaaatttaattgtatgcacctccttctatctgtctctcctacgtctacaactaaaatttagtaagcaatacatatatttttctggggaaaaaagaaatcgttccttatcttttccagctacccatatccgagggccaggaagcatttccacacacataaagattgattatagctggagttttcttggttttggtaatttctttccattcacttcttttatttaatgtttactgcaatttatttcaatgcatcgaaaaggattttaggacacacccaaagtattcgaatgcggctaccatagccatggcatccttataatggcagggcgataaattaaaggggaagattggggtgggataaagatccagaacctcttcaccatagtcacgagagcctgaatttgtctttattccacaacgatgggtttggcaaaggaatcctggaaaagcaatttcttttaataaagaactcggcaaattgtttctgatgcaaggttcacatttttgatagataacttggaaatctaaattagtcggtaatgctgccaaaataagtgaagaagacctcaaaaaaccaaagccaacaatactcgcagaatacaagggcgagtcatcattaaaattattattttaattgcatttttctcatacacacatggttattgtaattgaaaagattaaacaaataataaataaatcgaaatctgaatcctgcaaataggggcgtgtgtacaactttatgtaacgtcacagatacacagtaaaccaatataactggtttactcacatgtccatgttagagaattaaattaattattataattttttttcaaatatcctttttgatgcattgaatgttgaatttagtcttcaaattttaaaatatattgctgtgttgattgtcaagcttttttaaacttagccgcatttcagtttgtgcacatgtaatataacgtttacttaagctactgcctgcttgaattagttgtataaaccatcttttaattttactgttgaataaactcgattgattacaaatgcatttctcagttacatacattatattgcgttaatctataaaaggcaactaggtgtaaaaatctaccttggagaaaccatatacccattctctatttttatgcaatgataattaaactccaagatataaaaacattgtaaataaatatagctgtaagccccgtagctaatgctattttatttaagttagtctagttttgtaaactattctatctatcataataaataaataaataaataattaaactctaacttaagacactttaaatgcacaattctcaaaatgcgtagattaaaaaaaaagaatattctagatttgttgaaaagtacatatgtatgtaacaagtattgttacttctttctgttttcatattattcatttgacgatttgcataatctttaagtggcaaaaataaactatgtatatttgcccaattggaaaacatttcgttgtcctcttctttttagttctcaagcatagctgttttcctttgcctcgtgtttagccacgaatacgacttcaagatgagtcgtcgagtcaaaaaaaaaaaaaaccttgaacatctctattaatttttgttagcctctatcattatttgctaatatatttaagccggcgtatacatatctgtgtaccgaattcgatattatttgttcggatttattgtcattttagagagtgggtctctttttgggcttggtctaacagcatgtttgtatttcatttcctggttatgaccggttttcgaaaatctattataatcgctaagtgggtcacacaacaccgagtgatatttaaaatgctatcgattcacagacttccgaaaggtatttttcagctgtcatcagttgtttaagtcaagtgcaatcagcacgcatcaaaaaatacaggtgagcaggaattgagctcaattataaaattctttcgagggtaaacgaaacggcaagtgcttaagcgaaagaaaagggtgatgcggcatattacgatacgttgcacgaagctgataagaagtaccctttgccaatgatacttattatttttatgggtgagtttcttgcaaggaggaagatagaaacatgtaacacttaagtaacttaaatacattttagccatttaattgaacggtagattttcaatatataaacgaaatacttcactgacatgtaaacttacattactatcaacattactgtcgtcactcaatggctgcctcaataatccaggacttgaggcaggcagtgtcgctttaaggatacgcacctataaataaaaaaaatgaaaataaaattaaaacattgccatattaaaaaaaattttattgctaaattttcttaaagtttcccataagttttctcgatttttgtacatttctcaaccaaaacagtctgtctccatttgccaaaagtacaaaagttcaaattgtttaggacgagccaaaaattgtaaagccaaaaggtaaaaataaatacattatttgtatttgcttgttactatttttagggacaagagaagagagggaaaactcacacaccgaaaaaaaaatacattactaaatcgaataatagcctgaaaaccattaaaaggtcgagacagctaaaacaaaacgcacaataaataccgtaagcaaaaaatgtctattaaattgatgtcaatgcaagaaactattcaattttgcgaatttgtgttattcaacaaacaatcagtgatgatttctacctttgtatatgtctttaatttaagaacaactatgtataaattcgtacctttgtgaataatattaaataagtattcataatatagacatctaattggttgtaattttgttttcatattttccggaaaaattgttaaagatttaaaatggtgcgtgcatattatggcatatttatttctgttgtggcctctggcatacacaaaaaactttaatgacactgacgctgacgctccgttcgccaaaaatatcaggagagaaactgagatgccaaaaaaaagcagcagggtagaaggaaaatagaccgttatgtattgtatacacaataagtcttgaattttgtattgtttgtgattatataaaaagtagattttacaccccaaacccccttcccatttcacgctttatgtgtcgaaactttggctgctatttatttcttttcgctgtaatctgttttttatgcgctttaatttgttttcttttctcgtattttttcgtttcttgttatttgccaaaagtttattgatctcttgctgacattggagagtcagccgccaaatgccgagcagacaaaagagatacatagaaaaacacaaaaagtaagcgggagatattataaatgcacatacaaatatgtattattgtttgtctattggtacatacatatgtagtacataaacgcaaatatacacctgggaacgttttactccaagctgtaaagggtctttactaaagactctagattattttttttaaaagaagtcgtgtccaaaatttcaagtgcaaattgattaaagtagcgaaaatgaaacaatgtttataatcatcatcaggggtccgtgaaacgtttcacatggcacaggaatgacaaacgaagcaaaaattacaaactgtaggcaatatttggctaaaattaagcgaattaaaagagaaattaaaattagtggggagagaatgtacatatagtgaaaattatataaaaatcttgtacgcacaattttgtggtaaaaaaagacgatccgacctattggatttttccaacattatgatttgggaatttggggagtattggccggctatttgaaacggtaaatcggccttaaagggtcttccttcagaattgagagtcttgttcgtcggtataaacgtcgagatcccaggaattattttttatttattttgagttttcttgaccatttgcactactggactatagcgttctcccgggctttgtctatttgtcgtcgcagccgcgacagctaaacataattgagagcagaagaacgaatgtttcagccatggcagtagaaataaaaagcttttgccggatttttgatatgtgtaatttagtatgaggggccaacaaacccaatctagaacgtgggtggtgaaacttaaaatcaaacccaatttcaccaatatactttatgcacacggcataaaaagaaaaaacgaagaaatgtactataggttggggctgcacgcgacttcaaaacaactcacgcgtgcaaattgcataaggtaacaccaaaaatatacgctgaaatcatggagtacataaaagaatttgactttatataactaaaatagaagaatagttggcaccaagaaaaaattagtcccggtattaaaggaccttcccatggatatacacctaaaaaaaactgtgcgttcactcgtgtgagtgaaaggcgtgtggtagatcacgaaccctcagaaaattgagaactcgatgagatacagataccattacgaatttcggtccagccacagctgcagatacaaggtggtaatttttccgatagcaattttggtttaatatgaattacataagtccaaacggaagtcaaacaaaataatgcacataagtcacattatggccactgcttctgctgctaaggaccaacctccttaaatcaatgaaaatgcagcaggtgggccaactcaaaaaatcacaggtcagaacagacgatacgaaatctgtctgctcatcctcgatctcgtgagttaagaaaactggttatgcaaatgggtttgccagagttcagtattttgaattttaatcgtgtttccaaaggaaacggcacaaaaaaaaattaagaaatgaaatctagcgttcaagtgctctaaaatcataaaagatttaggagtacgatctgtgtgggaaggtagtattaaagaaaaaagttccttgactatcagattcccgttactcagccgagattactgcatgcatacggacggacaggtagacatgctcagaccgattcacctaatgatgctgatcaagcaaatataaatataagaaatttatacacttaatattgcctgtaacgcttcccagaatgtggtagacccatttacttaacgagtaaggtgtatacaaaatatcataatagttatttatgttaaaaaaaaaattgtaagagcaacaagagtactctaaaaacatcatacaactaaatttgggcgtcgtttacggccggtcttggcaaaatcgatcgggattaagaatataagatatatacatattacttaggatataaaaatattactttagacaaacacctcacaaaatttgtaaaaaaaaaaaaaaaaaattttccttgcaatgtatgaaaacgcgtaacaacactaacaacataaactggtttaaatagccaaccaggagcagcgagcaataactgaagagaagtcagttggtaccccttttttcgagactaaactatatggcgcatatattgaagcaaggaaaaataattaaaccgaaactaccaaattactattccaatgtttaatctgcaccaaattaaaaccaagcttaaaataaataaataattaaaagagcattattttacatcgatcaaaaagatataaacaaaatattgatttatgccagaataatttttcatttgcctgtattggataattattctggtctgatatgctcttttcttcttttttcttttccgctggcatcacgacgagactaacattatgttttctgtttttgttttgtgagttggcagcacctacgtgagccgctaaccggtttcaagtctcaaaggtaacttgaataacatttaaacttactgctggtttctttatatttttctgtctgtctccttggtttttttttcaacgcacaacaggtacattcgttgttgttggtaggtaacagtcagagctgaaggtatacacgtatggtatatacggtggcggtatgtttatatggagatttcctcagtctgttcttctgtcattctttccgcctgtgtttgccttggtcttttgtggctcctcgaaatgtatatagtcgtatatacatatttgtgattcgctatataaatatacacgtatgtactggccgttcatggataccatgacgaaagaactcagcttaaaagtgttttgcatttgccttgtcgtgtgtcttaaaatccagtatatagataagtatttactagatatatttcacgtgtatatttatggttatttatattaaagattgcttgccattctgattgatccttttataaacagatataaaaataaaattgtgcagattaatttttcttgttatgctacttgtcaaatgaattccgaaatttctttcgaaaattttttattaagttggcagcaatcgtgaaatataagaacatcggcttgtgaaagctactattattatcattttctagcctttgtgcaatgtgtaggcaattactatttgatgctcactggtatttacattttttaattattgtgtaaatttataagtttagatgctcaaattaacaatgcaaatccggtgcttggcacgacttagaaccgaagaaaaagaatggacaaccagaatatcaaattataataaaaaaaaaatccccaaagagttgaaatgatttattaagatcgagataactaaaagtaacccagttgggattaaaggttgcttttaactaattcatcctcataaattcaaagaataagttaacgtcaaactgttaaaattttgtcattttgttattacttcattcgaagtatgcaatttgctaatcagccttagtaaaaggccactagccaaccttaatgtttcattcccccttatcaatcacttaagttctgaaaccatgtcgctagataaccaaatccttgcaaaagatttagagctcgaaacatgcatcatattagccaaatgactaatggattcttttaaacagactattattattagactattagactattattattagaacaaactgttaacgttccttatgtaaacacatacagaaatgcttttccccactctgcgacgaactcgcctacagttaacgtagtacgttactcacatgtttaaatttcttatcagcaggacccttatctaatcgtcggagggaaacgcagttgttcatcatatataaagtatgtacaggcctatataaacgcgtaagcttttatgagctgataaaaagtgcgactcggacatttaatatgatatgataagttctttgttaacacttaattgaaaaatagataaaatacgataaaccgcctaagtattacaatgcaactctcaaaatattactttactagctgttgaaattaattcaaattttgtgtattctaactatttttgaaattaatgttacgtcatcgttaactaaataattgacaaaaggacaaaggacacaacaaaaaacatgtaatttataaattaaaatgtttgaaatgatctttctaagttctgtgataagatatacttaagcctccacgaaattaattcatatttaactatctgaacgtgtgaggagttaaataaaatgtttcctatgtaactaaggtggttttatttactgctttatcaggatgacacacataccgccgcactgtatttggtatttggatagttatacttcagcaaaatcctaaagatgtttattatacgaataaaatcaaaagttagtcgttaagaatgtttactatcgtcgtttaaagatagagatacacacacgcacttattgtttataacggcagataaaagtcaaagtaagggatatctaaaccgatagtatttaatatatgtacagcagcctgaagaatttgcactgttagacagagaaaaacacaataactcgaccccatttgcagcggccaaagccacaacaacgacaatgtagagacatttaaaggcagttgcaaccactttgactgacagctgcagtttaatatcgaaaaaacacaggaaaagctctgagaaactcagaagagcaacgcagaaatctcgcagaagaagcgaacgttgacagttcgcgaactcagtttcagacggcaagttggtctcattcttcagcccgagacaaaaacacaaagatacgccagctgcaatagcaataaaaataatgaaaactagttgcaactagtgcaaacatccaaacgggtttcactctgcttcaacagctgcaagctgaagtgggtgttcttcgtttgtcggtcctcttccatcagtataggtaaatttaaagttgttcgatggagaaacacaattcggtgcttaggcgattgtatgatgtccacagactttaaaatctagaaaattcatgtaggactcatttgtactttaatcacttgcattcaaaatataagcaacaggagagcacgctatagccgagtcccttgactattagactgcgagggagacattaaaaattacagtccgatctacgttcgatgtattcttttgggcgacttagaccatatggttattataaaagtaataaatgatcgaaacaagccgattgctaatatgcttgattttatgtgaattaatgttggaaaaattgcaatattattttattgtttagatatattaacatatttaatataatgtgcctcaggcttaatttattatatacatatgtataattcaaattgattccaaggcacaaaatatatgtaatattgtatgtgtacaaaaaagcaaatgtgaaactttatgggataaaacaagacctgcacaacccagcacaaatcaaacgatatagatccaaaaaagggtagaaatatagaaaccagtaacaacacatggtttcatttatagaattcagttccagaaaaaagggggaaatgtattttgccagcgttgtatatttgcattcgagcattctttttgccttcgcatattgcacagctgcttgttgttctcatttccctctccaccactcattcccttctactttcatccacatattccactgctccgatattacgttgggtgtattttattttgaatgtcaaagtttctttggtgctggataataaacaggcgcaagctaaaggggttctttgaatgcttcctgagcagaacaagtttagcttcattttcctctcggtgattccagaatttgcaaaacaaagagcgaacaaagctcaaggtccgaagaccgcttggcgggagcaagaagtaacataaaatagaaaatggaatattgagaacagaaaaagctttgtcatcgaaccatgaagtttgcacgccgcagatagtcgcagaacaaccattcaagagttcatgtacatatggttgtatctctcgcatttttctggacagtttttcccattatctttgcaagtagctcagctttttctttgtgctagccacagtcagacagatatgtggagggattcggcagacatatgtatgtatatttatacggaatgagtgttagcttatgaatgaggctgaaagcgaaaggccactgtaaaagtagcgagtcaatttacatttggcaagataagagagcaaaatacaaaccaacgagtaaagtaaattttctaaattatttagtttaaaatgttatatagttgaataaagatgaaaaatattcacgtgtacagttggaaacccttctttctacctgttgcatactcttcaacaaatttagaaatgtaagtagaaatttagtgtgtaagtaacatattacgaaggaagacaatgacctctcatatatatttctacttccgaaatgcaatgaaagactgacctctcattggccaaataaaacaagacaagtcataagagttgtaacgccctctcgccaactaatcaaaatcaattagcagagcagtactacataaattacagcagaacactccggttggacttgtggtgtctgtgtctccccttctaacttttaatgttacagttattatttgattgattgattgattttgattttacttcttcattttcaatatttggtggtctatcaatttccaatatttcactctaaaattgcaggaatttttaacacgctagtaatagaaatatgtaaagttaagtaaagtgcattgttaatataaaatattgtttgcggtcaacttgttattgttgttattgttctaaatggtcaacttgcaattcttgtgggtttatttatttatattcattgttaattaacattattatatttttatttacaccgtttaataagctaacagggaaaaacgacgaaacgcagtccagaagttatggtcgccgctgtaaaggcgataagtggaaaaaatcgaagtaattttcattataaatacagaaattattgtcaatcattgcaattgcagttgagaaccctcccatatggcaaaaaataaattaaaaaaatgggattttggtatttgctcgggtgaaatctaccagcaaaaaagtaaaagatagaaatcgatttatttatttatcaaagatgcgggaggaagctgagaggacatttcctctctttcttgtccaattgattaaaaacgtatttttttgctaatcagacatggactttgaattgtacaagtgtgcgaatatctgtgtgtgcatgactcatttgcaattaaacgacaaaagcgagagagccaaaaggagaatgaacggagagagagcaaattttaagtgccgcaaaaatgtcagcataaaaataaagtagtcgctgttataaaggcagcagaggaggcataagacggcgacaataacaagaagaggaaaacctacaaaggcagcgaccacaaaagcaaagatacaaaaatccatactcagatacatttacaaaactacaccacacacaaacaaaaactggctcgctcgcacacatactgcggcgtcgacgtcgactgcagcagagtcagagactgatgtttacacaacgtgcggtatatttgcaagatactcgtcgaacaacaagaaaaacagcagcaaatgctgcttgtattttttctttctttttttcgactctaattgaaaacaagcagagagtgtgtgtgtatagaaaaaacaagaaaaacaagcacagcgagcgtctacagctggctctggggtattattgtatctgtagatgcgaaattgcaaaccccaccaacagacaacgttgccaaacttcagtgtattgctttttttgttttttcctttttgttttctctgcagctttgtagccgcgtagccatagtttgcgtacatggtgtgtatctgtgcctttgtggcgcggcgttctctcgcctaacgatgaaaattgctgcaacaatgtcgcttaattttcatgcggccagcagtgttattatgtatgcacctgatcgggcctttatgataggcctcagaaagtcgaaaaaccggttagcttcgtccaccagccccctcgtcatcatcatcaaccatagtccaacccaagtccaggccccaactggttattattaaacaggtagaagaacaccaaaaccaagcccaagagaatccgagccgtcttcatcatccttctccaatttccttactcgatatcacgtatggctgtttttacagatgcgaccacaagtttattttgctatgctatgattttcccaaatcgcaattcctggaactgtatatatagttcgctgaattaatataatcaactacttccgagacagagaatgatatttgtgattccaaccaatttatgatgggtaacatttatgtatattttggacaacttctgtataaaaatcaatatttttaagcccctccgtcagctctttcggaatataatcgattgttgctgtgcattctttgtgctggctctgtgcctcgacgctcggtctcacgaacacagggccaaacaatctcatacaatcgccccttgacgataatcttttgtgtctgtccggttctttagcaccttttgtcaacgagaagtttggcaacgttgcgcactgtagagactgtttcacggatccggagattttgcctcatctccacttctctggcttctgctccagagtttagctcatctcatgtgcgaaataatttgggaaatttctaatttcccatacaaatgcttcgccgtctcacgccttcccgcctctagacccctgcctctttcgaacgacttcgtcacgttcccttgtgatatctcaatcctcgcattgcatgactctttttcaattttttgctatttttgtttttgtcgtttggtattacgacactgctcaaaaaacaatgaaatgtgcagtgcccggcataaatatgtaaaacaatagcaacgaaaatcaactataagaaaatgcatttgttattgcacaactggctggaaccaacataataatcactatatactcgcgaaattatttcttacgctagtgaacgttcgagagcaatattttgaattcatatactgctggttcagttcctgtcgtcgttggatgaatgggatgagtaatcatagaccccgtacggatcttctgtagattaaaaaaactacctaatcggaccacaatcaatgactaaacttttgaataataataaagtacgatagttcaaagtatggtaattatttggaatagtagacagctaacttgctataaatatacgataattgggttccaaatgctgtatctctaataaactataactttaagaagtcgttccttagatttttactactctggtctctttttagtctctatctaatctatatttttgactttgagagaggagaaatctcaatgccatcaagaacaaaaggcgggcaacgcaaactaaatattttctcatgtagcacaacaataaaataaataacaataaagaaagccaatctaacgagagcaacaattgtaattgtaacatgacattgaaacaagtcaaaaacattataaagcaatacatacaatttcgtctacataaaatcgtatgtagatcattattatttttgtttttgctttctgcccatagcgtgctaaaaagccgagcacgaaattcaatttaataaagtaatattagttcacgttgatggggttacatggacgaggtgaacagccaaggaagaacgaatactaaatttcaaaatcaacaaaaatcttcaacgtcttaaaaaaagtttaagtcttcttcttttaatattcttcttctgcttctctttttaatatttgccagctaccaatgaaattttgctcagtgtcaagtactcaagaaacaaattcgaaaaagagtagatagaaaagtgcgtaatttagggttgcagctgaaaatataattttattttttgctgtttatcagtgtttcatgtgtttgctggtgcctcacttatttacttaggccacagggttcattgtcaatgtcaaaaaacaattactgttttcaacccgcgacgattccacgatttctgttggcaattaccgcaaaactattaaatggagctttgccctctgttgtcgtctttccttgatgcgggcttaatgcatcagcagccgccctgaaaagaagcaaatacaaaatgtgttggtctggtctttgttttaaaggaaaccaaattaatttttgctgtggctaatgaagcaattaagtcatttttcttttgcactgaacgaaaatttaaatttaataggggaccgtaaaacccgtttaactaataaaagaaaaacacaaaaaaagcaacctaaaaccggcagaaaagaacaagttgctcagaaaagttctttagtttgggccgaacatcacataaacaaatcacaaaagttattatgaaaaagtattacgcaataataaaaaggaggcattttatacctgtatacctgggggacagtctgtcttccctcaaatactttcaattcatcacccaactttcagttcatttaaaagacaaacaaatttgtgacaatcttaaaaggtttattgaatctcgagacagacttatgcaaatccgaaacataaatgcacaactaaaggtaaaaaaaacgtagggatctgtgggatatcatcagagcagcagcagcaccattcccatataccgtattcccattacttcctactaatatcagttcctgactcgcattacctcttatgtgtactcgttagtcactcacacacaaccctgccaggtgaaacccactcaggttagatactaagatagaaaagccaaggtaaaaagatacgcactatttttcgggcatggccagccatttgcatttgtgcttcacgcattgcctgggttggaggttcgttcgaggaaggggtaagagaatagcgttctgacgcagccagcttaaaaattcatatcacacagacttttttatatcccaacgtaatgataagagctagctcgcgtggacagtcgctaacacaggtagctgttagtggcctacgctgacattttctaagagacattatttacatatatgtatttatatgtttaacaatttggagcttgcttttttcggttttatatttgcgcccaaatgcacccgccaatactttcgagagtgctggtctcggtgtttgaagtgtcgttaaaactattaatttagctatataaaaattcgatgaatagatagttcagtaagtatatacatgtatatcatattatttattatattaaatatatcttatgcacattctttaaataaggcttaccttttcaatttttgattattattattattgttgttattgttgttgttatttataatggtgctgctatccacaacgaactgttgttgctgttgttgttgttgtgtcgtagtagtttcggctaattttccaaaacaaatgttacggctattgtcgcgtaccatgtttcgacaacggaacattcgcagcagaatcttcttctatttaggaggagcattgcgtcgtatgccgcgaatggaggggcatcattttaaatgggcgccctccttcccattaaacattatgcactctttttatatattccagtgtgaggattgttaagatactcggcttgtttgatttaagaacttttatggatatttttattttattttctttggtaagatttccgcttcacttgcacatttttaacactatataacgaaatggggataataaaagatagagggaatatgtgggttagatccagcggacactaatttttattttacactgcacgtgcactttatatagaagctttttcattgtgattacaatatttgactttttcttaaagcgatttactttattacacaatttttttttccactaatgccaatttgccttaatttaccaactaaaaatacgcttttaatttaattcaactagagcaatttaaatttattgaaatttcaatggacccaagatatgttctcctccttttgcctcaatttaagcacggaatacggcatgtactaaatatacatatgtatgtatgtatattcaaagataaacttcttgtatagggccatttcctttgcaacaatacgaatgcgagaaggtggaaaatgcgagcagcgacgtcagcagcgcgttattataatcccccatcccccgtaaagagggttggtggtacagcatgttaaaattccatgcactaaagaagcatggaaactacaagaacaacacgcagtcgacgctgaagtttggcaacgttgccgcgaagcgccatttcgcttgctctcgctctgcctcgctgcggctttcgtgaaatgaggcaacgtcgctttgtttgcttataattgacgtttgccgtctgacgtggttgctagagcgagatagccagctgttgttgctgcttcagcgcacaaagtacatagggtgtttgggtttgtgtgtgcgtgccatatactcgtgtacata

SEQ ID NO: 24107 - DNA, 18439 bp, DROSOPHILA
atgttccgttgtcgaaacatggtacgcgacaatagccgtaacatttgttttggaaaattagccgaaactactacgacacaacaacaacaacagcaacaacagttcgttgtggatagcagcaccattataaataacaacaacaataacaacaataataataataatcaaaaattgaaaaggtctacagaggaaccaccgacaaacagcttcgaacggaattattacgaccgcaccaccagccgtttagtcacgcagtatcaagcgaacaactcaacttccttggccaattcaaactccagtccctcgtccgtgagcgcctccgcgtcagtcttcgctacggcggcaggagggtcttccgagagatcacgcaaccgagatcgcccgtacaggaatggttctgccagcgttcaaggcggcggcatcaacagcagcaacacgacgacgacgacagcagcctgcacagctggaggatctggatcgggagcaattggaactgggactgggggtttggtaggctcaggtcctgggggagtaccgcaggcgctaggcgaccgcagcagcacccagaatatccaccagaaccatcagagcgcgcgggtggctccaccacagtcatggtacgaagccgccactgctgcaacgacggcccaattgaaaagttctggtggcagtggcaatgccggcgcctcagcagccgtgggcttcacaatgagcagctcaccgatcaaccatcatccgcaccagcatccgcatcttcagaatcctcaacacccgcactacaccagcagtccagtggtaggagccggatcttgtccctccgccgctcaaggacagccacagattcagtcgcaatcgcagaccacggccgtgcatcgaagcgtggcctatgcgggaagtgctgcggatgacttactgaacaccgccacctcacgaaatatgcttctgcacagcagcaaactcaataagctacttaagggggcaggagcaacgggaagcggaggagaacgctctggttcggaatcaccaggaagagctggaggagctactcctttgactacgacaagtacaatcacaaacaatagttttagtagtaatagtttaaataatacaataaccacggcgactccaacaatgcccacgatagcttctggagcagcaggatcggtggggttaggatctggagcagaagcgggagtatgttccaattccggtacagccagcggtgacattctaaatgtggccgctgttttggccgccgccgtggacaatggggtgccaacgcatccgatccggacacgacacaacctgcacggacgcagcaccacctcctccagtcgctcgcactcgcgctcaccgagtagctacagcagttcgcacagctcctcctcctcatcgcactcctcatcccactcgcacgcgtccagtcccgtccagtcttcgggcaattgtgcgatggcagaggggcgcagcagtcgcaccgttaattctgtcacagtaaccagcaactcttcaaatcccagtggcacagctgttaccgtcagcagtgcaggcgtcggagggggatgtgggtccagttcatcttcaagcagtagctctagttccagcggatcctcctgtctgacggccaatcccgtcgtgcattccgaagacaaccggccgctagcgatacgagtccgcaacctgcctgcccgttcctcggacacatccctcaaggatggtctatttcatgagtacaaaaagcacggcaaggttacgtgggttaaggttgtgggacaaaattctgaacgctatgctttggtttgctttaaaaagccagatgacgttgaaaaagcgttggaggtctctcatgacaaacacttcttcggctgcaaaattgaagtggaaccgtaccagggttatgatgtcgaggacaacgagtttcgaccctacgaagccgagctggatgagtatcatcccaagtcgacaaggacactctttatcgggaaccttgagaaggacattacagccggcgaactgcgtagtcattttgaagcatttggcgagattattgagatcgatatcaagaagcagggcctgaatgcctatgcattctgtcagtattcagacattgtctcggtggtaaaggcaatgcgcaaaatggacggtgagcacttgggcagcaacaggataaaattgggctttggaaaatccatgcccaccaattgcgtctggatcgatggtgtggacgaaaaagtctccgagtcgtttcttcagtcgcagtttacacggtttggtgcagttactaaagtgagcatcgacagaaacaggcagttagctttggttttgtatgaccaggtacaaaacgcccaagccgcggtaaaggatatgcgtggaacgatcttacggagaaaaaagcttcaagtggattttgcatctagagagtgccaggacgcattttacgataaacaagagaaacagcaacaacaaagttcgggttctaacccgcgctttagtcgctatgagtcaagcgcctcttctttgcaatctcgatctcgtgcatcttcctttagccgccatcaaaacaactctaacgatgactgctctcccattaacacgccaggaggagcaagcagtggaatctccagcgcgagcaatttaattaaccaaagcaccagcatcaacatttcaaacattggtactaatgcctgcagtgcgatgccagcccccagcctggcgtccgctgtagtcagctgtaatgtcaacgcctccggaacggtaccagcgagcacatccatgccctcaggggttagctcctcttcaagttcattgcctatgtctccggccgctctggcccaaagacatcgaatggttcgtaatgcgcgtcaaaccgtcgactgtgacttcaatgaagttggtcgcctccggtttcgtagctccgaggaggtttctggaggtgcaggaaattccacgcagtttgaagatgtccgctgcgattctccagttaccgctcgacaaggttcagctgtaaattgttttactggacctacagcagccgttggagaatctattgatggaacgttaaataacaatcaaattacgggtggagctgaagggtttactggatccggaggcagcattctgagcaggagacgttgcggtaagacacctaaagacttgcacccagtgcacaatcaacgtatccaattggcagaacaagttgaggaatgcccgtccagtggtgatgaaggcgttgtcagtccccgtaagcgcatcaaaatggattaccatcatcaccaccatcattccaatgctagcggggtggagtccactggcgagcacagcagcatcaataaaccaagccctcttttactgtccaactgtgatgtgatacacgatcccctaaaccgcaaaagcgagattcgaagggtatccgagacgccaagtggttcaccaagcattaagtttcctggccacctgccctcggctccccaatccctgatgctcagttgccggcgcccttccatcgatgtgggagctttgtcggcgctctctagttcctcggctttccggcacggaatcgtgggagccagcagcatggatcaacagcacatgatgaatgcctcggcggcagcaaagaggaggcgagtgaccactactatgcaacaacccagctcatcctcaaccactaatagttctagtggatctggattgggtgggataagtagtttaactccggcggatgaatatcatcatcatgtctccagaggtaggggacatcaactacattcccatcactcacacgaggctagcggtggcgaaagtgcggatggatctcgccctggtacgccgctgtgtgatgagcgacctgaagtgctgcccacagagccacgtcgattgcctccgcccagagaaagagttcgggaaagaaccagggatgtgatgtggctcccccttccaaagtttggagtgcttttcttccaacaacaacagtccagaagcagtggaggaggaggagcaggaaatagctatctgcagcagcaactgggaggaggatctaccggagggttggggtgcataggagctgcttcctcttcggcatgctcccttaacaactctagtcttaacgccagtcagggaatgggctcctgttctggatccacattcctgcccagcccatcctcgcgatattggcgttcctcttcacaccaccaaaaccaacaaaataatcaccaacaacagtcgcagcaattgcacggatcctcatcttctaacacttgcttgatggccagtccagcacgtccacgatcactgagttccaactccagcgattcggatgtacctggccaaaatgccggaggaagtccttcactagatgaaagactgcgcaactttgaggaaaactatgaacgatggtctgggggaagcagtagagaacatatctccggtcatacgccctcgagtgccacgccttcttggcagctctctatgcacatgaatttgagtactggtctaaattcccatcagacaagctcggcatccggaaatagcaacagttccagcggaacagtatccagttcagcgagcaattcacggcacaagtttttggatattgatgaactgcagccctctgacattgtcaaatctgtgctagccaagaaaagtgtttttgatgacgattttcaacggctaaataaaaaccaatggtacgacccatccagctctgattttgcattgggatcgagttccaatatcgttacaggatcttcgctggtcgctaatgtgtcccgacatcctggaggcccatgtagcggaaacacctcacctgctttgcctaatctcgcggcgaccaaggctactccaattattggaaactgtagtggtggattgggtaactcgacaggtagcaaatctgcgggattgcttcaaagactaagtagtttatcacccatgaattctcctcaagcttcgatgtcgccctacaacagcccatcaccctcgccttcggtgggaggagttaccgcatgcctgggacaacttaccaaacctgcagcaccaggaaccgcaagtgcaggactaagtgggggaactgctgcctcctcatcctcaccagctgccaactcgggacctacaaaaggattgcagtacccgtttcccagtcacccgcctttgccgaacaccgctgctcctcctccagctgtacagcctgctcctccacctcttccagaaatgggaaaacaatctagattaactggccagagctctggaaataatctaacgaagagcttaagcgtgccagatggtcctcagtcatcgccagcgagagttcagcttcagaaatctgcttcagtgccaggtagtacaaacgtaggcgccccaagcagcctttccttggattcaaccacagcttctgtggaaacatctgcatctatttcatcatcaacgtccaacggtaacagttccttaacctcagcagcgattcacgtacaaaagccgcaacagtcgacctttgttgaggaagagcatacaaaaaaaagtggcacctccacatcccaatcctcgagttctagctctaaaaagatcagcagcacccacgacaagctgcacagcaagcacaacaatagatcggaaagcgacaagaaaatcaagaagtctgacaaaaatgcatcgtcctctgacaagcgaaagaactcgtctacctcccagtcctctaagtcagctactccccgcattgaagacgactccagcgaggccgatgatacggcggacaaagctgaaaagaaccagcgccacgagaaagagaaaaaggagcgtcaggaaaagcgtgagaaggatctccgtaaacaggttgaacgggaggaaaaggatcgtaaggctcagcaggaggaaagagaaaaagaagaccgaaaagctaaagaagaggaaaaagaaagagaacgggagaagaaggcccaagaggatcgtgaaaaaaaggaaagagaagagcgagagcttagagaaaaggagcagcgtgataaggaacaaaaagaaaaggaaatccgtgaaaaagatctgcgcgaaaaagaacaaagagagagagataacagggagaaggagctgcgtgataaagacttgagagaaaaggaaatgcgtgagaaggagcaaagggaaaaggagcttcaccgcgaaaaggatcagcgcgaaagagagcatcgagagaaggaacaatctcgccgagctatggatgttgagcaagaaggccgtgggggaaggatgcgtgagctatcttcataccaaaaaagcaaaatggatattgctggcgaggctagtagtctcaccgcaatcgactgtcagcacaacaaggaaaatgccatggacaccattgctcaaggaactcctggtgcatccccatcaactccttcagacaacaccccgaaggagcgctcgagaaagttgtctagaaattccccagtgcgcctgcataagcgacgacttagctcgcaggaaagcaaccacagtgctggaggtggtggatcatgcggcggatcgagtcatcaaattcatcatgaggattatgtaaagcgcataagaatggagaactcccagaacatctcggttcacagcagtaatcaaagattaaatgatcgccgggactccaaggaacacaagagcagcagtttcaaagaagataaaaatagtagttcacatatttcaaggcctcacggttgtggaggaagttccgcctcgtcctcaaaacatcaccatcgtcgagataaacatcatcaaaagggcagtgccagctccatagaaacgaactcctccattgaagtggtggtagatcccatttcccaaaccaagcacaacttaaacacaagtgaggaggagctgcagtctcatcaacccaaaagagaaaaggagagggagcacttcagtagtcatgcaaatagttcatcttctaggcataagagtaagcgagatcatcatcaccatcgggaaaaaaagcggcattcggtggcggaatccacgaatacagatgaagagcatacaccacagcagcataatcctcacaggagaatctctgctgcgggaagtgggtctgctggagagctcagctcagcagccactaatacttcgagcggaaaactccatcatcaacaccacaggagaagtgtggaacggaagtcatcacggggatctgatgaaggacatcattcttcatctaaatctcttcgcgccaaattgatgatgttgagctccgcagactctgacgacacagatgatgcctccaagaagcattccatctttgatatcccggatgattgtccaaatgtatctatgtacgacaaagtaaaagccaggagctgcaagaatatgcaacgccaggcggaggaaaaaaagatcaaggcgaagttctcgcagctaaagcaatctcgcgccaaaaagaagcgctctactagctatgatggagactcggacactgagttcgaggatcgacaacatcgaaatagtggtagtagcagcttccatggtcgttatcctggactgtctagcagcgatgatgatgacgatgaggagacccaccaacggcgaatttcctccgattcggatgcagagcacggaggtcaggataaccagggtgcaagcaccctagctgatgctaaccgagtacgtcagatgcaacagaatttaagaagactttgcgatggtgatgatagctccgaagatgaaataagaaggaatgtgatgaagcatagccattttggaaaaaggaactccaactccactaggattgcatctgattctgagtctcaatcccagccggctcctgatttgactattaagcaagagcatcctatagctcctgctcaggaaatcaagcgggaacagctttccgacgaggaacagaagttcaagtctcggcatgattcaaattcttcaatagaggagaggaaactgaagacggaacgtgaaataaagacagagcttggagatttctataattcttctgaatacacctatactggaaagcttaaagagtactctccagaaactcgcaaaaaacataaaaagagcaagcgacgtttgaaatcctcttccacagcggatacttcagcagctcaaactcctttggtgatgaccccgttaactccctccatatttgatgttcattcatcctccgagtgcaagacgaagttcgataattttgatgatctaaaaactgagtgttcttcaataccgttagagatttcagccggcgaaaggagaaagcataaggaaaggaaggaaaagaaacgtgagaagcttagaaatatgacggaagccactgtacccaattcgcccaccaccaatgatacaagttccgaaaagttatcgaaagaagagcggcatcgactaaaaaagtcaaagaaatcgaagagcatggataattcctgcaataccaaaatatacaactcaagtggagcccatccttctacctcaccttctttgcctgccactccaacgtcagcgccttcgacggcccaaacttcaaaaagaggagaggataaaatggagtttatatttggcattatttccgatgaagaagaatcacagtttcccgagcaagcggaaaccaataaagacattatacctagttccgtgtctactactggtccaattgtctccgctgctttgcaaacgtacaaacaagaaccttccacacctaacagcaaaaatgaggaagcacatattcaattaactgtgcatgagcctgagcaacaacagcagctggagagaagtcgcctatcgggaggcagcagctcatcttctcatgctgatagggaaagacaccggagagagaagcgcgagaaaaagagacgcgagaaatctcaacgagaacagcaaaatcaaattcaccagaaatcttccaaggttgaaactaaggtggatgatgataacagcgtggatatggatgaagcagggagggctctagaggctcaactaatgagtgactttgataccaagccgatttcagaagaagccactccttcaacggccgccacatatagatcggatatgacagatgtattccgattctctgataacgaagacaacaactcagtggatatgactaaacagggtgtcaaatcggagcagcaggaacagcataaaagtaaagacaagaagaaaaagaagaagcggtctaaggaggaaaagcaagaaaagttgttgcaacaacagcgaagggaatccctgccaaatgtggcttccacttcatccgcacctcctactcctggaaagcttactgtcaacgttcaagctgctagcaaacatgcagacctgcaattggacgccaagcatatctcatcgccacccgtttgtaagccatctcctagtttaccatgtctaataggcgacgatgacgatgatgcgttgcacaccccaaaagcgaaacctacaacgccctcgagtcgtggaaacgatggtctcactccttcacgtgagaaaccccgcctaattagtcccatacccaaaactccaaccatagccaacagttccacgctatccactcagtctgcagaaacacctgtaagcagtggtacagttatttcctcttctgctttggctaccactcctacatcttcgacagcagcgggagtcagtgcagccccgggattagataattcgcctaccagtgcttctgctcaatgcaaaaagaaggaaagcttcattcccggtttcgatggtcagcttgacgataggattagtgaatcggccgtgcaatccatttccgcagaatttaattctacatctttactagataacattgcagatgagccaaaaattccggtagcatcccctccacgtgcgactaaaccgttggataagttagaggaaagcaagtcccgcgtgaccatctctcaggaggagactgagagtgccgtatccgcactgttgggggaaagctttggcacttcctctacgacggactactccctcgatggcatggatgaaatgagctctgtaaatgaattggaaacaccaactttagtcatagcagaaccggatgaagaggcagctttagctgcaaaagcgattgaaacagctggagagcctgcgtccattctggaggaaccagaaatggaacccgaaagagaggctgaaccagaccccgatcctgaggcagaaattgaatcagaacctgtcgttgaggtcttggatccggaagaactcaacaaggcagtgcaaagtttaaaacacgaggatatgatggacatcaaggctgatactccgcagtcagaaagggatctgcagattgatactgacacagaagagaatccagacgaagcggatagtagtgggcctagtctcaagattgatgaaactgtgcagagctcatcgtcgccggagaaatcaattagcaataacagtcctactcctagggaaacagcaaatatagacatacctaacgtagagtctcaaccgaagctcagcaacgagtccacaccgcaaccttccgtgatcactaagttgccatttttggatacgccaaaaacagtaccagcaggcctacccccttctcctgttaagattgaaccaccaactataagtaaactccaacagcctttggtgcagcctgtgcagaccgtcctgcctgcaccgcattcaacgggaagcggcataagtgcaaattccgtgatcaacttggatctgtccaacgtgataagcagttgctcgaacacgagcgcggcatctgccacagcttcagcgtctgcatccatatcatttggaagtccaactgcaagtcagaatgccatgccccaggcttcaactcccaagcagggtccgattacacctcagcaagcaatccggacgcaatctttgataatgcaaccgccaacgatatctataccagaacaaacacctcactttgcggtcccccaaatggtgttgtctcctcagtcacatcatcctcagcaacctggaacttatatggttggcattcgagccccatccccacacagtccgcttcattcaccaggtcgtggtgtagcccaaagtaggctggtgggtcaactgagtcctgttgggcgtccaatggtaagccaaccatcaccccagcaacaggttcagcagacacagcagcaacatgccctaataaccagcccgcaaagtagcaacattagtccattggcaagtcccacgactcgagtgttgtctagcagcaattcgcctactaccagcaaagtaaacagttaccaacccagaaaccagcaggtaccacaacaaccctcgccgaaatctgtggctgaggtgcagacgacaccgcagttaatgactattccgctacaaaaaatgacaccgatacaggtgccacatcatccgacgatcataagtaaagtggtcaccgtacagcctcaacaggcaacccaatcgcaagtggccagctcgccacccttggggagccttccgccgcacaagaacgtgcatttaaatgcccatcagaatcagcagcagccacaggtgatagccaagatgactgcacatcagcaccagcagcacatgcagcagttcatgcatcagcaaatgatacaacgacagcaacacatgcagcagcaacaacttcacggtcagtcgcaacaaataacgtcagccccgcaacaccaaatgcatcagcaacatcaagctcagcagcagcaacaacatcacaaccagcaacatttaaatcaacaacttcatgcccaacaacatccgactcagaaacaacatcaagctcagcagcagtttaatcaacaaattcagcaacaccaatcccaacagcaacatcaggtccagcaacaaaatcaggcacaacaacaacacctatcccaacagcaacatcaatctcagcagcagttgaaccaacagcatcaggctcagcaacagcaactgcagcaaatacaaaagctgcagcaaatgcatggtccccagcaacagcaaaagtcgcctcaaggagtcggccatttgggaggttctacgtcgatttttgcatcccaacaacataattcccagcttccagcgcgaggtgtacctcagcagcaacatcctcaacaattgtcccacagttcaccttgcaaaccgaatactttggtttctgttaatcagggagtccagcctcccgccatattaacacgagttggatctcattcgcagccaaaccaacagcaacaattaccacaccagcaatcgtcgtctggtcatccgcatcagaaacagctgtcgtcgccaggagcaaatcttcctcttcaaacgcctttgaatgtgatacaaaatacaccgaaaataattgtccaacaacatattgttgcacaaaatcaagttccaccaccacaaacccaaggtaatgccatacactatcctcaaaaccagggcaaggatagcactccacctggtcatgtagaaccaacaccagctatgtccgctcagaaaacatcggaaagtgtttcggtgattcgcacacccactcctacaacaggtttggcagtaatctcggcaaatacggttggctctctgttaacggaggagaatctaattaagatttcgcagccaaagcaggatgagttgatcgaacaggactcaaaggaagttgacagcgattactggtcagcaaaggaggtaaatatagacagtgtcattaagaaattagatactccattggctagtaaggatgcgaagcgagcagtggaaatgcaggcaattgcaccggctcctattcccaatccgcagcctgggaatcagtctatggcccaagaaactgctcttccaacaacttcaatgagtgtgaacaactcaaacgatcatgatacagaggacgaaacggagaccaggcagttgccccctgcaaagccacctatacccactgttgggagacctccaggaaggggaggtagtgctaagagaggacgccagccaagaggggcgaagaaagtgggaggattcccgcttaactcggtaacagctgcgccgcctggagtggattcattggttgtacaaccgggtgacaatggggtgcaaaccaggctaagaaaacccgtaacagctcctgtaaccagaggcaggaaaggacgtcctccaaggaatctactattgcagcaacagcaacttcagcagcagcagctcgatattcagcgaaagggaatggaaatggtgacgtcggcaacatcttcgactccactgccaactcctattcctaccagctctgtgttgacagctgcagagaaaaaggcgaggaatcaagccctaactcaggctcaagaacaaaaccaagtcgcaagtcaagtaggaactggccaggatatctacgagttccatgaagacggtggtgaagagcccaagcccaagacaatatcatctgttgcccccagtgctgaggaccaacgaccacgacttattcttaccatcaataaaacgcaaccctcgattaagaatattagtgaaatggagcaaacaattcagcagcaacaacagcagcagtcggaggttatatcaaatactgatccaatcggaggagacaactccgagtcttgtaacacacgcaaatctcgccgtttacaagaaaaggaggatcgcagcacagtagacgatatcattgaagatgtggttcgaaataccaacacgccaactggaacaggaccacatttgccaaaaggtgcacaaactccaccacgacgttctggcagaaatgctcaagccaaaaagacggatgcggtacagatcattaatgcagtgggtcgtccaaggcgttccaaggacagaaaaacaatcggtgaacaaacagcaaacttgattgaagaagttactgcgtctaatgcaactgttgccgccagtcatttggcaccaccagaaggagctggtgtggagtcgcatgtcccccaattagatgctaaagaagtggaaccggtatcagttgtgacaccaatttctacaccagcgcctgttagtgtagctgccccggttaccgttcctgtgccagccatggtccccgtcaaacctacaatgcctcaacatcccaagaaaaaagctattgcggcagcagagattgaatcttaccaggccatcaactcatccattcccagtggggggcttccgatgcatcagacagcggcccctgctactcaaaagataaccggtggggttgcggatgcggtcagcaaggctctagttgatccagttactggagttatcaccgctggaatgccccagggcaaagagggtaatcttccagcagctaccgctgctgcacctgccaacagcagcaatgaagacggtcaagcagctcctcccccgcagctacaacaccagcagcagcaacaacatccgcagcaaccaccacaacaacaagctaatttacagataaatactactctgattccatctggacttccaaatcctattacagccttaggaaaatcggtacaacttgagacctcggcagccgctttgttgaacaaacctgtaagtgttctggtgaaaggaaacgcctcgcaggttattcagcagcaacaaccgcaaattgtggctccagcaaaacaacccataatcctacaacagaatcccctgcccactgtgctgcaccatgcgcagcataccactgttaggccacctcaaccactgaaagctcacgtcctgaatagggaaaagaatatccagcagcaattgacgcccacaaagcaagcagtagctcaaccaccacagcacgcaccgcattccggtcacatgttgctcacggatactgcaggaaatcaacaactagtgcagccccagatcattgcacgtcacctgcagcagcaacaacatcttcaggtcaacgtgccgccaccaacagcacactctccgcactctccaagaattcctagccagcagcaacaattggggccaggagcttctataagtccgcagcagcagcagccgcaaacggtggtgatcaagcaagcggcatcagcagcccagccgcaaatattgcacgtggtcagctcaaaggcgtcggtggtgcctcaaccgcaacaacagcagctaccaccaacttcatcaacaggcccccacctgcagttggctaaaccgaactatagctatgcacccactgttttgacacccactttgccagccgttcagcagcagcaacaacagcatttgtataagcaaaacaatcagcaaaagggagctcagatacaaatgcctcctcacggaataattatgcctacccatcctggcatgctactgcagcaaaaactaccagcacatctgcagcctcagcagcatcaattgaacccttcaccgccgcctggaaagccaaatcccgtactgcacggactacagtctggacagattatgccaggaagtgtgggcagcccaccaccggtatcagctgcagtcttgaaaacagctcagcagcaggtcaattccgtcgtaccagtagctggtatacgcacagccatcccaaacataagcccgcagagccagccgagagtatctccattggttttaccacccggcatttctggagtaccaccttttgacgccagtctgaatgattctacgtatcgaggagtgactgcatccagggattttatgctctaccagcatcatttaatgcgaggtggcgactacgatgacaagatgggcagcagtccgccgctagagttacgacgccccggtagtggacctccaaggaccatcgcagttccccacagtttgcagagtcctcaggatcgcactgcagctgactctccacaaatggctcaggtttacgtacacaatacgcgcattcccccggcccatttcagcgaaattgcatcaaggggcttgtacgatagtggtgccttacaactggaaccaccgccggcccatcgcccaactgcaaccattagtgtggtggtgccacaacaaatgcctgcagtttcctctggaagtccgtttatcggtcgtgatgggagcgtgcagccaggaagccaccatcatccaggcaaggcaatggatatgcagttggatgagatggaccgcatgtcaatgattgcagctgtcgttcaacaacagcaggaacatctgccacctgctttgcctgcaggcatggaattggcctcccagcaagcaccaccagcgatggcaccgccaccaggtgattcgctggttactctgctgcagcgatatccggtaatgtggcagggcttattggcccttaaaacagatcaggccgctgtccaaatgcactttgtgcacggaaaccctaatgtggcaagagcgtcgcttcccagtttggtggagactaatacaccgctgctgaggattgcgcaaagaatgcgactagagcagacacaactggagggagtagccaagaagatgcaggttgacaaggagcattgcatgcttttggctttgccatgcggaagagatcacgccgatgtactgcagcattcaaggaacctccagaccggtttcattacctatttgcaacagaaaatggcagccggcatagtgaacatacccattccaggaagtgaacaagcagcctacgtggtacacatatttccatcatgcgattttgctaatgaaaacctagagcgcgccgctccggatcttaagaatcgcgtagctgagcttgcacacctcctgattgtcatcgctactgtctaaaccactataacaaccaaacccacggactttgaacgataaaatatacccagatgttaaacttcacaggcttacacgacaacataagaggaaccagataaagaaaccaacaaaaacatgttacgctcttctagtattttaagtaattttaaatagcgattaaacaagcaaaagtttaaaaaaaagcaaaggaaaacaaaacacaacaaaaacgtaaacaagctgaaacatgcaaactaaagtttgaataaataaatgcaagaatgcaaaagttcattgaggccaagatcacataaaagtgtaaagagatccgcaagagactcaaacaaaacgaaagaaaaccctttaaattccgacactttgaaagcaaaatatttgtctaaattaattatataactctccgtaattaaaaaccttaaagaaaaagcttgcaaagtatcgttaagtttgatctcaagaaagaatgttttatttttgcttatttaaaaagaaagaaacaaacagaaaaacctacacatacaaattgaattgaaagaaatgttacagaaagcttacaacatattaactgtttactgtactatgcatactactacccatacataatattaatattcgatcctaatcctaaaacgattaagtttttattggtgaataactttcgactacttcgatagaaacgtaactacaccacgttatacaaagtttccgccttcgaacaaccgaccattttttttgacagatcggttccttggctctatggaatgcctgcatataaaactagtatacagggcctagcatagacccaaagaacttaagatgagtccggactgtcacccacgctgttaagcacaattaggtttaaagttgcgcccagaggcttttcctacgataacatacacacacatacattatactacgattatttatctagacgcgtatttaattataattaatatgttaagctcattattttaaaactcagacacgtttcacatcgtgtttatttcactctgcaccagagtttcttctattcaagtaaaagatacggtagttttcgatttaatgatgtaggtcttttgtttgcaaaagacggcaaatttttgttttttctttacattttttatcactttcaccactgccacaaacctaactacaacgccctggtctaaatctaaatgtaggtgttccgatctcccacttcccactttttagtttttgtgagcgaaactttgtacaatgttgggtagtttcaggatccttcattatgtttataccataattctgacaccccacaaaaaaccaacacgtaaacataccactcacaaaataatacaaaaatctatatactactctccttgaacactccctaaacttaaacgtaattttttacacaacttgtaaattatgtaaccggaataatatagaaagcaaaacacacgagtgaaaaaaaaaaacaaaaaataaaaaaatacatctgtaacatatttaaattatttaggctctaacaagtaaaaaatgtaaatacagtttaattagtgtttagcgtgtatttagttgtatgttttaaaactaaacctaaaagaaatctgtacattatataacataattaacgatacaagaacacgagagatcagatctataaaaggtcacccagaaacagataaacaaaagaagtttaaaagtgaataattcagaaaataaaaagaacacgttttcaagaaaaagcataggaagcgctgttaaacaaatgttaatgtataagttgtatgatttaagagactttttagttatttcctaagttacattgaagaaaaagattaaattacacttatttcataca

SEQ ID NO: 24108 - protein, 5533 aa, DROSOPHILA
MFRCRNMVRDNSRNICFGKLAETTTTQQQQQQQQFVVDSSTIINNNNNNNNNNNNQKLKRSTEEPPTNSFERNYYDRTTSRLVTQYQANNSTSLANSNSSPSSVSASASVFATAAGGSSERSRNRDRPYRNGSASVQGGGINSSNTTTTTAACTAGGSGSGAIGTGTGGLVGSGPGGVPQALGDRSSTQNIHQNHQSARVAPPQSWYEAATAATTAQLKSSGGSGNAGASAAVGFTMSSSPINHHPHQHPHLQNPQHPHYTSSPVVGAGSCPSAAQGQPQIQSQSQTTAVHRSVAYAGSAADDLLNTATSRNMLLHSSKLNKLLKGAGATGSGGERSGSESPGRAGGATPLTTTSTITNNSFSSNSLNNTITTATPTMPTIASGAAGSVGLGSGAEAGVCSNSGTASGDILNVAAVLAAAVDNGVPTHPIRTRHNLHGRSTTSSSRSHSRSPSSYSSSHSSSSSSHSSSHSHASSPVQSSGNCAMAEGRSSRTVNSVTVTSNSSNPSGTAVTVSSAGVGGGCGSSSSSSSSSSSSGSSCLTANPVVHSEDNRPLAIRVRNLPARSSDTSLKDGLFHEYKKHGKVTWVKVVGQNSERYALVCFKKPDDVEKALEVSHDKHFFGCKIEVEPYQGYDVEDNEFRPYEAELDEYHPKSTRTLFIGNLEKDITAGELRSHFEAFGEIIEIDIKKQGLNAYAFCQYSDIVSVVKAMRKMDGEHLGSNRIKLGFGKSMPTNCVWIDGVDEKVSESFLQSQFTRFGAVTKVSIDRNRQLALVLYDQVQNAQAAVKDMRGTILRRKKLQVDFASRECQDAFYDKQEKQQQQSSGSNPRFSRYESSASSLQSRSRASSFSRHQNNSNDDCSPINTPGGASSGISSASNLINQSTSINISNIGTNACSAMPAPSLASAVVSCNVNASGTVPASTSMPSGVSSSSSSLPMSPAALAQRHRMVRNARQTVDCDFNEVGRLRFRSSEEVSGGAGNSTQFEDVRCDSPVTARQGSAVNCFTGPTAAVGESIDGTLNNNQITGGAEGFTGSGGSILSRRRCGKTPKDLHPVHNQRIQLAEQVEECPSSGDEGVVSPRKRIKMDYHHHHHHSNASGVESTGEHSSINKPSPLLLSNCDVIHDPLNRKSEIRRVSETPSGSPSIKFPGHLPSAPQSLMLSCRRPSIDVGALSALSSSSAFRHGIVGASSMDQQHMMNASAAAKRRRVTTTMQQPSSSSTTNSSSGSGLGGISSLTPADEYHHHVSRGRGHQLHSHHSHEASGGESADGSRPGTPLCDERPEVLPTEPRRLPPPRERVRERTRDVMWLPLPKFGVLFFQQQQSRSSGGGGAGNSYLQQQLGGGSTGGLGCIGAASSSACSLNNSSLNASQGMGSCSGSTFLPSPSSRYWRSSSHHQNQQNNHQQQSQQLHGSSSSNTCLMASPARPRSLSSNSSDSDVPGQNAGGSPSLDERLRNFEENYERWSGGSSREHISGHTPSSATPSWQLSMHMNLSTGLNSHQTSSASGNSNSSSGTVSSSASNSRHKFLDIDELQPSDIVKSVLAKKSVFDDDFQRLNKNQWYDPSSSDFALGSSSNIVTGSSLVANVSRHPGGPCSGNTSPALPNLAATKATPIIGNCSGGLGNSTGSKSAGLLQRLSSLSPMNSPQASMSPYNSPSPSPSVGGVTACLGQLTKPAAPGTASAGLSGGTAASSSSPAANSGPTKGLQYPFPSHPPLPNTAAPPPAVQPAPPPLPEMGKQSRLTGQSSGNNLTKSLSVPDGPQSSPARVQLQKSASVPGSTNVGAPSSLSLDSTTASVETSASISSSTSNGNSSLTSAAIHVQKPQQSTFVEEEHTKKSGTSTSQSSSSSSKKISSTHDKLHSKHNNRSESDKKIKKSDKNASSSDKRKNSSTSQSSKSATPRIEDDSSEADDTADKAEKNQRHEKEKKERQEKREKDLRKQVEREEKDRKAQQEEREKEDRKAKEEEKEREREKKAQEDREKKEREERELREKEQRDKEQKEKEIREKDLREKEQRERDNREKELRDKDLREKEMREKEQREKELHREKDQREREHREKEQSRRAMDVEQEGRGGRMRELSSYQKSKMDIAGEASSLTAIDCQHNKENAMDTIAQGTPGASPSTPSDNTPKERSRKLSRNSPVRLHKRRLSSQESNHSAGGGGSCGGSSHQIHHEDYVKRIRMENSQNISVHSSNQRLNDRRDSKEHKSSSFKEDKNSSSHISRPHGCGGSSASSSKHHHRRDKHHQKGSASSIETNSSIEVVVDPISQTKHNLNTSEEELQSHQPKREKEREHFSSHANSSSSRHKSKRDHHHHREKKRHSVAESTNTDEEHTPQQHNPHRRISAAGSGSAGELSSAATNTSSGKLHHQHHRRSVERKSSRGSDEGHHSSSKSLRAKLMMLSSADSDDTDDASKKHSIFDIPDDCPNVSMYDKVKARSCKNMQRQAEEKKIKAKFSQLKQSRAKKKRSTSYDGDSDTEFEDRQHRNSGSSSFHGRYPGLSSSDDDDDEETHQRRISSDSDAEHGGQDNQGASTLADANRVRQMQQNLRRLCDGDDSSEDEIRRNVMKHSHFGKRNSNSTRIASDSESQSQPAPDLTIKQEHPIAPAQEIKREQLSDEEQKFKSRHDSNSSIEERKLKTEREIKTELGDFYNSSEYTYTGKLKEYSPETRKKHKKSKRRLKSSSTADTSAAQTPLVMTPLTPSIFDVHSSSECKTKFDNFDDLKTECSSIPLEISAGERRKHKERKEKKREKLRNMTEATVPNSPTTNDTSSEKLSKEERHRLKKSKKSKSMDNSCNTKIYNSSGAHPSTSPSLPATPTSAPSTAQTSKRGEDKMEFIFGIISDEEESQFPEQAETNKDIIPSSVSTTGPIVSAALQTYKQEPSTPNSKNEEAHIQLTVHEPEQQQQLERSRLSGGSSSSSHADRERHRREKREKKRREKSQREQQNQIHQKSSKVETKVDDDNSVDMDEAGRALEAQLMSDFDTKPISEEATPSTAATYRSDMTDVFRFSDNEDNNSVDMTKQGVKSEQQEQHKSKDKKKKKKRSKEEKQEKLLQQQRRESLPNVASTSSAPPTPGKLTVNVQAASKHADLQLDAKHISSPPVCKPSPSLPCLIGDDDDDALHTPKAKPTTPSSRGNDGLTPSREKPRLISPIPKTPTIANSSTLSTQSAETPVSSGTVISSSALATTPTSSTAAGVSAAPGLDNSPTSASAQCKKKESFIPGFDGQLDDRISESAVQSISAEFNSTSLLDNIADEPKIPVASPPRATKPLDKLEESKSRVTISQEETESAVSALLGESFGTSSTTDYSLDGMDEMSSVNELETPTLVIAEPDEEAALAAKAIETAGEPASILEEPEMEPEREAEPDPDPEAEIESEPVVEVLDPEELNKAVQSLKHEDMMDIKADTPQSERDLQIDTDTEENPDEADSSGPSLKIDETVQSSSSPEKSISNNSPTPRETANIDIPNVESQPKLSNESTPQPSVITKLPFLDTPKTVPAGLPPSPVKIEPPTISKLQQPLVQPVQTVLPAPHSTGSGISANSVINLDLSNVISSCSNTSAASATASASASISFGSPTASQNAMPQASTPKQGPITPQQAIRTQSLIMQPPTISIPEQTPHFAVPQMVLSPQSHHPQQPGTYMVGIRAPSPHSPLHSPGRGVAQSRLVGQLSPVGRPMVSQPSPQQQVQQTQQQHALITSPQSSNISPLASPTTRVLSSSNSPTTSKVNSYQPRNQQVPQQPSPKSVAEVQTTPQLMTIPLQKMTPIQVPHHPTIISKVVTVQPQQATQSQVASSPPLGSLPPHKNVHLNAHQNQQQPQVIAKMTAHQHQQHMQQFMHQQMIQRQQHMQQQQLHGQSQQITSAPQHQMHQQHQAQQQQQHHNQQHLNQQLHAQQHPTQKQHQAQQQFNQQIQQHQSQQQHQVQQQNQAQQQHLSQQQHQSQQQLNQQHQAQQQQLQQIQKLQQMHGPQQQQKSPQGVGHLGGSTSIFASQQHNSQLPARGVPQQQHPQQLSHSSPCKPNTLVSVNQGVQPPAILTRVGSHSQPNQQQQLPHQQSSSGHPHQKQLSSPGANLPLQTPLNVIQNTPKIIVQQHIVAQNQVPPPQTQGNAIHYPQNQGKDSTPPGHVEPTPAMSAQKTSESVSVIRTPTPTTGLAVISANTVGSLLTEENLIKISQPKQDELIEQDSKEVDSDYWSAKEVNIDSVIKKLDTPLASKDAKRAVEMQAIAPAPIPNPQPGNQSMAQETALPTTSMSVNNSNDHDTEDETETRQLPPAKPPIPTVGRPPGRGGSAKRGRQPRGAKKVGGFPLNSVTAAPPGVDSLVVQPGDNGVQTRLRKPVTAPVTRGRKGRPPRNLLLQQQQLQQQQLDIQRKGMEMVTSATSSTPLPTPIPTSSVLTAAEKKARNQALTQAQEQNQVASQVGTGQDIYEFHEDGGEEPKPKTISSVAPSAEDQRPRLILTINKTQPSIKNISEMEQTIQQQQQQQSEVISNTDPIGGDNSESCNTRKSRRLQEKEDRSTVDDIIEDVVRNTNTPTGTGPHLPKGAQTPPRRSGRNAQAKKTDAVQIINAVGRPRRSKDRKTIGEQTANLIEEVTASNATVAASHLAPPEGAGVESHVPQLDAKEVEPVSVVTPISTPAPVSVAAPVTVPVPAMVPVKPTMPQHPKKKAIAAAEIESYQAINSSIPSGGLPMHQTAAPATQKITGGVADAVSKALVDPVTGVITAGMPQGKEGNLPAATAAAPANSSNEDGQAAPPPQLQHQQQQQHPQQPPQQQANLQINTTLIPSGLPNPITALGKSVQLETSAAALLNKPVSVLVKGNASQVIQQQQPQIVAPAKQPIILQQNPLPTVLHHAQHTTVRPPQPLKAHVLNREKNIQQQLTPTKQAVAQPPQHAPHSGHMLLTDTAGNQQLVQPQIIARHLQQQQHLQVNVPPPTAHSPHSPRIPSQQQQLGPGASISPQQQQPQTVVIKQAASAAQPQILHVVSSKASVVPQPQQQQLPPTSSTGPHLQLAKPNYSYAPTVLTPTLPAVQQQQQQHLYKQNNQQKGAQIQMPPHGIIMPTHPGMLLQQKLPAHLQPQQHQLNPSPPPGKPNPVLHGLQSGQIMPGSVGSPPPVSAAVLKTAQQQVNSVVPVAGIRTAIPNISPQSQPRVSPLVLPPGISGVPPFDASLNDSTYRGVTASRDFMLYQHHLMRGGDYDDKMGSSPPLELRRPGSGPPRTIAVPHSLQSPQDRTAADSPQMAQVYVHNTRIPPAHFSEIASRGLYDSGALQLEPPPAHRPTATISVVVPQQMPAVSSGSPFIGRDGSVQPGSHHHPGKAMDMQLDEMDRMSMIAAVVQQQQEHLPPALPAGMELASQQAPPAMAPPPGDSLVTLLQRYPVMWQGLLALKTDQAAVQMHFVHGNPNVARASLPSLVETNTPLLRIAQRMRLEQTQLEGVAKKMQVDKEHCMLLALPCGRDHADVLQHSRNLQTGFITYLQQKMAAGIVNIPIPGSEQAAYVVHIFPSCDFANENLERAAPDLKNRVAELAHLLIVIATV

SEQ ID NO: 24109 - DNA, 4167 bp, DROSOPHILA; identical to SEQ ID NO: 6268

SEQ ID NO: 24110 - DNA, 2045 bp, DROSOPHILA
ttaagcacaaataatttaggctactgtaagtttagagcgacaagatgatcgatattttgtcgctgccgcggcgaaataaggtgtccggaaacccggccctgctaaagatgatctcctacaagactggactacccatcaacagtctacccggatgggagctgatccctcttaattgcaagctgccaatgctcaaatgtcccggcaatcaggtcatattctccaagaacaagatcggacaggacttcaagagcggtaaacaggagtttgagtgttccgttaccgaacacatcccggagtacaatccgctacacgactccaacctaaagacgttctactccaatgagcgtaatctgaagcggttgagggaaaacggtgagataacgcaggacaacgatgtaatatgcaatctgaaggacttcaatcagcatcgccaggagctgcacaaatcgcagttgtactacattttgcaggcatacaagcggcgcgagtcggagcaatatgatcgaatgctgatcgccaacgcggagtccatcacaaaaaaggatcaccagaatctcgcagcccgtcaccagtgcactgaggaggttcttgccagaaagaaactacaggagcaggaacgccacgaaagaaaggtccatctgctgaatatcacatatgagaagtttaagcgcttagagaacctggccaccatgcagaatatgttgctggagcaccgcaagatgctgacaaacatgcgtgtagctgcccacataagcatgtgccaggatttgatgagaaagctattgatcaaacagaagaagctcttccagttcaaaaaggatcggttcaacaaaaacatgcgaatcctgaggaaacaacggctggtaaagaacactgagcaccagattcagtcgtggaggaagcgacttgatgagcgaattgctaatcagcgtaggatcgaatacctcctgcaggaggtggaaaaagagcgagaggcgtttatagacaggcacaaggctcattacagagaaaagtggcaacggattcaggacgagattaaggaaagagctcaaaaggccatcactgctcgtcagcccaaaagaaagcgccgcaagaagaagaagtcgacacttcaggaacgcaagccatcattctgcgatgagtatcaggccacctttgagggattgttagacagtgatctttgttacgccttgaatgcagccattgccatggagggtcagaccgctctcagcttcgcaccagacgaccccatctataaggcggcacaatatatactggactacataatttctggtttaaacgacgatctcagcgaggatgagtgtgccttgcaggtgctgatctcgcgcattaaggattttgtctgcgatgcaaagaaatatgtgcactacaaagcttatcagatcattggattcgccagagaccacaaagccatggaagtgcctccgtcgatggccaaacagccgaaaaaccactcgcgcgcctcccatgtatcatttagcggtgtagccagcaccattggcgtgggcagctacgagattcatccgttcgtggacgtccgcccgtgcagcgaacgtcgggccactccggcgggatcattagcctctctggttgtcagccagatcggcgaacaggtaatacaggacaaggtgcgcctgccgcatctaaatcgcaaccagatcgtgttcatagagcactacctggtgaagtttaagcgggatctattggtgggtctggacaagctggtatttgcagcgattcagtgccactttgaaaaccgtatgatggaggtacgagaggagctccttctgcttgacaggaactatttgttcgagcagattgccaggggtatcctcagctatgcggttaatccgctcaactatcagtcggtgcttaagctggccgtgagcgtccagtcgtgtgaaatcatctgggagctgcagcagacgatgctcaagccaggcatcgatccccggggccagaatcacccagtgtcctgcggcaccgagcaggaacgcgagaccctggctctctgcataccctag

SEQ ID NO: 24111 - protein, 666 aa, DROSOPHILA
MIDILSLPRRNKVSGNPALLKMISYKTGLPINSLPGWELIPLNCKLPMLKCPGNQVIFSKNKIGQDFKSGKQEFECSVTEHIPEYNPLHDSNLKTFYSNERNLKRLRENGEITQDNDVICNLKDFNQHRQELHKSQLYYILQAYKRRESEQYDRMLIANAESITKKDHQNLAARHQCTEEVLARKKLQEQERHERKVHLLNITYEKFKRLENLATMQNMLLEHRKMLTNMRVAAHISMCQDLMRKLLIKQKKLFQFKKDRFNKNMRILRKQRLVKNTEHQIQSWRKRLDERIANQRRIEYLLQEVEKEREAFIDRHKAHYREKWQRIQDEIKERAQKAITARQPKRKRRKKKKSTLQERKPSFCDEYQATFEGLLDSDLCYALNAAIAMEGQTALSFAPDDPIYKAAQYILDYIISGLNDDLSEDECALQVLISRIKDFVCDAKKYVHYKAYQIIGFARDHKAMEVPPSMAKQPKNHSRASHVSFSGVASTIGVGSYEIHPFVDVRPCSERRATPAGSLASLVVSQIGEQVIQDKVRLPHLNRNQIVFIEHYLVKFKRDLLVGLDKLVFAAIQCHFENRMMEVREELLLLDRNYLFEQIARGILSYAVNPLNYQSVLKLAVSVQSCEIIWELQQTMLKPGIDPRGQNHPVSCGTEQERETLALCIP

SEQ ID NO: 24112 - DNA, 6131 bp, DROSOPHILA
ctgtcaactcgttgtatacaaagttgccatatagtcacaaaaatctttcgcataaagaagtaaaacgtaagaattttcatatgcgtttttcgccaggaaatccgcattaaaataatgtaaaaagtggtaaaaaagttggcgcaaagagtgagccagtcaaaggcattgaaattcagctcgctctaacagttttcggcgttgttttgcccctcgcataaatttgttgcgcgccattttgtttttggaaagcaaaagaaaaagaagaaatacaacagcaaaaacctaccacaaaaagtcaaagtttgtaaaagcgataaaaagcaagaggaaaaggaattctgtggggggaaaagcgagtgaataacatgtggcggcttggctagttcgagcatcatctttgtgcctctaaaagacatacgaaaataacgcgcgacatgcacataaataaatacgactgaaacactgaaaactgaaaatatcgatacgatgaataaacgaagaagcagcgattagtacgtcgtcggcggtcgtctgtgtgggtgagagagtgaggaagacgggaatggggaaggcgattaagtgcgaaagagatggaggagcgcggggcgcgtatataattacgtcataagaattaaagaaaattcaaggtctacagcactgcggctatacaaaaagctatacgatttcgttacgttctcggttttatcaaaaataaaactttggccagtgagcagcaacaacaacaagtatggctgttgtgttccagtgtgtgtgtgtgttgtgtttcattttcgcgactgtataattacatacacacgcagtcccgccgatgttgttgtttctgtttgattttttattgtaagcgagaagagcgcgcagctgtgaaaagcagatgagagagagagaggaagaaagcgagagagtggaatttgttgttgagcaatttgtgtaaccatcgataatgtttgatttatttaaaccccatttttattacccctttttgcagtgactcgcgatgcgtgcggcatagaagtcgtcgccccccaaaaaaccgtgatcccgaccccccacacgcacacacacatgtacagactgcgattgttcataaatttaaattgattaaaagtcggagcgaaaaagtaaagcgaacaaaacaccggaaagcaaggaaaattaataaaaatcaatagaggcgagcgggaggcgataaaaagtgttatcagtgcgaattaattggctacgaagaaggaaagaagcaggaggcggaggagcgggagcaggaggaggaggttgctccggagattgaggtttagggagctccaaatccgcatcccggacgcggatccggacccctcgacatcatgtccgtgcagcagttctgcctgcggtggaacaaccaccagccgaacttcatctccgtgtgctcctcgctgctgcacaatggcaccctggtggacgtcaccctggcagccgagggtcgccaactacaggcccacaaaatagtgctatccgcctgcagctcgtactttcaggtaagttggagatcgccgcagcgtatatcccttacgaattacactcaaatgtgttcgacaggctttgttcaccacaaatccgtgccaacatcccattgtcatcctgaaggacgtgcagtacgatgacctaaagaccatggtggactttatgtactacggcgaggtaaatgtgtcgcaggagcagctgccgcacatcctcaagaccgccgagatgctcaagatcaaaggcctagcggagatgccaacggatccggccaatcttaccaagtcggatagcaagtcctccaccgacggcaccgagatggtgggcggtgcgggagtgggcactggagcgggcaactcggctggcagcctgggagccggcagtggaagcagcgtcggcgactccctgtggagcagcagcgaggcccaacagttccagcagcagcagcaacagcaggcccagcaacaggcacagcagcagcaccatcaccaccagcagcagcagcagttgcagcagcaacaacaacaggcgcagcagcagcaacaacagcagcagcaccatcaccaccaccatcagcagcagcagagcggacaggcgcaggcggcgcagacgcatcaccaccagatgcgacgtacgccgtcgcctttgagcgctggaacctcgccggccaccaggcgcaagcgcttgcgcaaatcctcgaataacggtgagttggagttgggtaaagcatcgtcgtgatagatccaaaattgtaaggtctcaaaaaataaccggttttcgtaataacgcaggttctggcgatcgcaacaacgcggaggagcagcacaacagctcactggacgcgggcagtggtgccggcaacgccggtctcagtctcgcccagatgaaccagatgacatttggtgcgggcggcggcttggccggccactcactgcacgcggctaagctgctcaaggagtcggccagcgctgagctagagcagcagccgcaggactcggatcttgacgatggacacggacacttacacatgcaaattgtaatgaaattggtcacgttaaccttgtaccctcgtccgcatgagcaaagtcactaattgttttctttttcttctcggtgcccacgtgcagaagcccgaagtcgacattggcggcgtgaaccaaacgatgcccttggacatctccggcggtaccacaccatccgagcacgatgcgccgaactcccagtcctcgcactcgggtaagtcgcaattggaaatcaaaagccagcacactgttccatcaaagctcattgttcatcgggtagggatctcattcgccaggttggattctttttttttatcgtttcttagttttgtttgccttgattactttaaaaaacacaaatcacggacaacttaactgcaattcgtagtcaaaagaaagctgacacactatagactaagcaggagtcaagagggaaaacgtgtatagatcagaaatgacttgacttttttgaaacgagcatgactgaaagaacatagctttacaatgttggtatcatttgcgaactgactaggggttcactgaactgataagcactgtcacctatgttctcttaagcaaatcaatgtgaaatctgaaccactgtgtactctcgattcatcgaaataatgcccacaatcatacttcatctgcatatctcacacacgaacggtgccatttcgaaacaatttcagtacacagcgcttggagaaatgaatgctaaagctaaatatgagatctagtataccgattattcattactgatttaccgactaagtgcaacgaaataattgtgaaatgccgaaattttctatgtttaactattattgtgtattgtattccaaaaaaccgaatcctgcctgaacttgggaatgggagagagctagcacaaagtccaaaacaaaaactaaaacttccaaaaactaaatctatgatttgtttttcaattgttcattctcgatttgcgtttacttgcgtttttttgatttttgttttgtgggaatttccaaaacagcggtttccgatgataatgatttagccttagcaatctttcctctactacttacctctattgtacctatctaagaactgcctcagaacctataaactgtctcagtaccaacacaactgaactaagatcaaacctgacctgaccagactcaaacagacccaatcccgatccattagagctaggagagagcgatctcaacttcaatttcgatcgaaatgccccagtaaccagtaccagtaacagaaccaatctttcattcgctgtctctctctctctccccttcccaggtctgcaatggacagttgttgattccaactatccgcgcttctccctgcccgcctgccagtccaacttgttgggcaacggcggaggcagcggtggtggtgccggtagccagagcagtggtgcgaatagcgccggcggcgtcaatagcgatcagcggcagcagcacgaagcccagcagcaggccacgcaacagcagcagcatctgcagcagctgcactaccagcagcagcaacagcaggagcaggcctctgcctccggacaggcctactcgtcgcagatcattaccgtgaacaacctagtcggaagctatgcgacggcggcccagaacctttcgcccacctcgcccaatgaatcaaacatggtgcaatcggtctacagtcagggtccgacgcccacccaatcccccgtgcacgcaggagtcggtggagcaagtgcggctggcggagcagcgggcaatgccagtgctggaaacggtggagcccctggagcggccaaccaggtggtgaagcgcaagagatcggtgaatccgcagggagacgaaaactttatccgagccctggaggcggtacgcacgggaggtatcggattctgcaaggcggcacgactttacggagtgaacaacaggacactctggctggaatacaaaaagcgtggctatccggtgtcacgtcccagcataaaagcgcgtgtggtcaaacaggagccgaatctgtcgccctcgccgacgccatcgacgaatcagggcgatgacaacaccaacgaaacgctcggcatgcagataccaccacaggcggagactccgacaccttcgctcatgtgcacatcgcaccacactggcctgggaagcggagctggaagtttgccggccggaggaaactcgcacccagcgatcggggtgatgagcctgttcgatcctcgatacatggattcgcccggcaatgtgcactcgatgacgcggcagcgttacatcgaagccaccggcggcggagcaggtgcgggaacgggcgcaggcaccggcaccatcaacgttaatccgaccaccgccatgaatctacagagtattaacttcaactcaatatagaatacgatttcgagccaggcggggacggccactctgctccaggcagccgccgtaatggccgccagcgagccagcggaatccctgagcatatcagccatgcccgtctccgttccaatgggcatggcgcacagtttcctcatcaacaacttcgtaacggtggctgcaccgccggtggccacggtgaccagcacgggcctgcagtacttggacaagtcgtaggtccggacaccgagcccccaaattgatcgatacaggtattagagaaacggcagcaatctactgtatatatagcggaccgcttgtacggcacagtggcaatatatgcagcgatatatgccgacccaggatggcacagaagtggaatcggattcctgcgctgagctgagctgagctaagcgaagcaggaggatcgcaaggaagtgaggcggaagtgaacggcgaggagcgaagcgagttaagagagcaggcaagccggccgcacttgtaataatactttcatagaacctaattccttgagctaaacgttttgaaccctacatttttacgattgttaactaagaaatcggtagtgcagatcttcgatatacatacatatatatatatatatatagctatatagctatattacgtgtaaaagaataatgtaattgtacataaattataaaattttattagtgttaatcgcgaacatcaaatgatttgtaagcaactgcagctaaaaagtggtgctgtgtgccagcagccgacacaaaccttgcggaatccgctccatattccactttttgtaatgcaagcaagcaatggactaaaccaaaaattctatctgtaatcgtaatgataaacattaaggacaaaatgagatttattggcaatttctggcgaaaatttcccacatcctgcggtttgctaggctctggcgcatcagaaataagttttcttcctcgtttcgaaaagaatttaatttctgcacttgtgttacaatagcaaataccagtatgtaggaactccccgtgagcattatatttagcttcctatcaatgtgagaccattttctgtgtacagtgacgcaagtccactctattcgaagcataaggtaatcgttggcgactcccgactccatgccgcagaatgtcaagagcagggagatccgaggatcgctggaccgcgtacaatagactaagatactagatcgacggaggaggaggagcatgtaagcgaa

SEQ ID NO: 24113 - DNA, 2848 bp, DROSOPHILA
ttgcagtgactcgcgatgcgtgcggcatagaagtcgtcgccccccaaaaaaccgtgatcccgaccccccacacgcacacacacatgtacagactgcgattgttcataaatttaaattgattaaaagtcggagcgaaaaagtaaagcgaacaaaacaccggaaagcaaggaaaattaataaaaatcaatagaggcgagcgggaggcgataaaaagtgttatcagtgcgaattaattggctacgaagaaggaaagaagcaggaggcggaggagcgggagcaggaggaggaggttgctccggagattgaggtttagggagctccaaatccgcatcccggacgcggatccggacccctcgacatcatgtccgtgcagcagttctgcctgcggtggaacaaccaccagccgaacttcatctccgtgtgctcctcgctgctgcacaatggcaccctggtggacgtcaccctggcagccgagggtcgccaactacaggcccacaaaatagtgctatccgcctgcagctcgtactttcaggctttgttcaccacaaatccgtgccaacatcccattgtcatcctgaaggacgtgcagtacgatgacctaaagaccatggtggactttatgtactacggcgaggtaaatgtgtcgcaggagcagctgccgcacatcctcaagaccgccgagatgctcaagatcaaaggcctagcggagatgccaacggatccggccaatcttaccaagtcggatagcaagtcctccaccgacggcaccgagatggtgggcggtgcgggagtgggcactggagcgggcaactcggctggcagcctgggagccggcagtggaagcagcgtcggcgactccctgtggagcagcagcgaggcccaacagttccagcagcagcagcaacagcaggcccagcaacaggcacagcagcagcaccatcaccaccagcagcagcagcagttgcagcagcaacaacaacaggcgcagcagcagcaacaacagcagcagcaccatcaccaccaccatcagcagcagcagagcggacaggcgcaggcggcgcagacgcatcaccaccagatgcgacgtacgccgtcgcctttgagcgctggaacctcgccggccaccaggcgcaagcgcttgcgcaaatcctcgaataacggttctggcgatcgcaacaacgcggaggagcagcacaacagctcactggacgcgggcagtggtgccggcaacgccggtctcagtctcgcccagatgaaccagatgacatttggtgcgggcggcggcttggccggccactcactgcacgcggctaagctgctcaaggagtcggccagcgctgagctagagcagcagccgcaggactcggatcttgacgatggacacggacacttacacatgcaaattaagcccgaagtcgacattggcggcgtgaaccaaacgatgcccttggacatctccggcggtaccacaccatccgagcacgatgcgccgaactcccagtcctcgcactcggactcaaacagacccaatcccgatccattagagctaggagagagcgatctcaacttcaatttcgatcgaaatgccccagtaaccagtaccagtctgcaatggacagttgttgattccaactatccgcgcttctccctgcccgcctgccagtccaacttgttgggcaacggcggaggcagcggtggtggtgccggtagccagagcagtggtgcgaatagcgccggcggcgtcaatagcgatcagcggcagcagcacgaagcccagcagcaggccacgcaacagcagcagcatctgcagcagctgcactaccagcagcagcaacagcaggagcaggcctctgcctccggacaggcctactcgtcgcagatcattaccgtgaacaacctagtcggaagctatgcgacggcggcccagaacctttcgcccacctcgcccaatgaatcaaacatggtgcaatcggtctacagtcagggtccgacgcccacccaatcccccgtgcacgcaggagtcggtggagcaagtgcggctggcggagcagcgggcaatgccagtgctggaaacggtggagcccctggagcggccaaccaggtggtgaagcgcaagagatcggtgaatccgcagggagacgaaaactttatccgagccctggaggcggtacgcacgggaggtatcggattctgcaaggcggcacgactttacggagtgaacaacaggacactctggctggaatacaaaaagcgtggctatccggtgtcacgtcccagcataaaagcgcgtgtggtcaaacaggagccgaatctgtcgccctcgccgacgccatcgacgaatcagggcgatgacaacaccaacgaaacgctcggcatgcagataccaccacaggcggagactccgacaccttcgctcatgtgcacatcgcaccacactggcctgggaagcggagctggaagtttgccggccggaggaaactcgcacccagcgatcggggtgatgagcctgttcgatcctcgatacatggattcgcccggcaatgtgcactcgatgacgcggcagcgttacatcgaagccaccggcggcggagcaggtgcgggaacgggcgcaggcaccggcaccatcaacaatacgatttcgagccaggcggggacggccactctgctccaggcagccgccgtaatggccgccagcgagccagcggaatccctgagcatatcagccatgcccgtctccgttccaatgggcatggcgcacagtttcctcatcaacaacttcgtaacggtggctgcaccgccggtggccacggtgaccagcacgggcctgcagtacttggacaagtcgtag

SEQ ID NO: 24114 - protein, 828 aa, DROSOPHILA
MSVQQFCLRWNNHQPNFISVCSSLLHNGTLVDVTLAAEGRQLQAHKIVLSACSSYFQALFTTNPCQHPIVILKDVQYDDLKTMVDFMYYGEVNVSQEQLPHILKTAEMLKIKGLAEMPTDPANLTKSDSKSSTDGTEMVGGAGVGTGAGNSAGSLGAGSGSSVGDSLWSSSEAQQFQQQQQQQAQQQAQQQHHHHQQQQQLQQQQQQAQQQQQQQQHHHHHHQQQQSGQAQAAQTHHHQMRRTPSPLSAGTSPATRRKRLRKSSNNGSGDRNNAEEQHNSSLDAGSGAGNAGLSLAQMNQMTFGAGGGLAGHSLHAAKLLKESASAELEQQPQDSDLDDGHGHLHMQIKPEVDIGGVNQTMPLDISGGTTPSEHDAPNSQSSHSDSNRPNPDPLELGESDLNFNFDRNAPVTSTSLQWTVVDSNYPRFSLPACQSNLLGNGGGSGGGAGSQSSGANSAGGVNSDQRQQHEAQQQATQQQQHLQQLHYQQQQQQEQASASGQAYSSQIITVNNLVGSYATAAQNLSPTSPNESNMVQSVYSQGPTPTQSPVHAGVGGASAAGGAAGNASAGNGGAPGAANQVVKRKRSVNPQGDENFIRALEAVRTGGIGFCKAARLYGVNNRTLWLEYKKRGYPVSRPSIKARVVKQEPNLSPSPTPSTNQGDDNTNETLGMQIPPQAETPTPSLMCTSHHTGLGSGAGSLPAGGNSHPAIGVMSLFDPRYMDSPGNVHSMTRQRYIEATGGGAGAGTGAGTGTINNTISSQAGTATLLQAAAVMAASEPAESLSISAMPVSVPMGMAHSFLINNFVTVAAPPVATVTSTGLQYLDKS

SEQ ID NO: 24115 - DNA, 13206 bp, DROSOPHILA
gaaactaaacgtctcgcaattctttgtctgggacttcgattgcttgggcagataagcatctgtcattagtttgttgcggtggctggttttaataacaaatgcggtggaggtggttagagtagatcaatggcattgtaaaggggaacttcacttctcgtagggtatattagttgctgcgaaattctttaaagactttttgtgattatagaaggcctgaagtaactggtaaggtccttcgcttttataactaacataagattataatagttaaaaaacaaaaatgtgtaattatactactttacgtacaagttaaaattgtctaagctttgaattcaaataacagaaagatgaaaaataattttaggtgcttaaagttcttagtggacaaactaattcggaaaaattagaaaatatgtatgaaataattataagctgaaatctgaaattttaacttaatctgttttaaaaaccgtaaaataagctataaatttatcgtcacaataaaaccaattttatttcaaattatgaattaaattagaaattaagtatgaccgtaacctcccgtctcaatccctgttctggtcacactttgcaggcaaggcgaagaggcagttaactaactgttaattgatagcccactgcgtcgccaactaaccttttcccatattcccaactcaacccattaagtgcgaaatccacacccgcgtcgccggaggggcgtgggcgggatcggatggggcgctggctttggggccaagctggaggctaagacgcggatgcggtctatgcactttgcgcacacaaacaacaacggcagcggcagtaacaacaacaacgacaacagtgggccaaaacaaacaaattctgttatagacgtcgacgtcgctgccgttgttgttgctattccattttggacagcacctgcaatttgagttgtagtttcagttttagttttgggttcctggcgagcagacgctccattggacagtttatacacatacacatacagacctacatatttgtatttttggttgatttgcaagtgagttctcccacccatagttgtgccacctgcccctaaatccgacctttttgccagtgctgaaatcgatagtgaccgtcatccgtttgcacctggaggagctgtggctcaggtaagcgaatcgccggtgcgcaagaaccccgccccaatcactcatcctgcacggctactactccgcctgtcggaacaggccaatcaagcgattacgttcaaggccagggaatagaaattattattagaaatagaaatccatagaagaaaacgactatcaccttcttgtcacaaagaaaagaggtcaatggacaactgcagaatcattggagaatattgcatcaaggacttaaagtgtagagtgcgttaggacttcttgtgtagacaacatatagctcgatcgacattaaggtcaatatttgataatcagttagatcttatgatattatgatctacttgatggaagctgtggaaagaatgttttcacgtattgacgcagtctaaatttgcttggccggtatttacctattctatttttcgaaatgatatcaaaagtctataattctgcttaagcaatatattattcatatccatggagcttggtttcatgtaatctttctatgtatatcgctgaaatctgaacattaccctttgaagaccgtttataagaccgtttcataatggctcatgcattgtttaaactactgccttaaactaaaggcgcgcatattgttcttaagcccattttcagtcgtagtagttataccatgtaacattcgtttcggaatttcagcttagcctaatttcgatttctatagagatatcgcattttgagtttgtgagatactaattgacgatatttaacgaacgtgtttttgattatagctttaagtgttgacgtttaatccagtatatttcaccccgaccaggaaatagctttctagccgtatttgtttggttgcgtatacatcgtaccttaactaggtaaaaatcaaaatgtttacagtcatttacttcatgatatttacgacacatacgagattatacgaaaaataatctttgccctttttcatggtcttttgaccccgtcgtagaagttagcaaatcgagttctaatgaaattccgctaacgactttgtattacttagctatcagatcgttagtccagcctcttcatgttattcgttgcatttttatgagaaattgtcatttattttttaaggcctttagtcggtctaatggtaaatgcatgattatcactaaaatattggtcgcaaaagaccatataaagcagtatatatcagaggatttaggaattcaaatcactttagactgtccgaaatcccaatcgggttactgaataatgttatccttcttcagcttggccagctcatccggcccgtaacccagtagttcgcccagcacttcatccgtgtgctggccaagaatcggaggagctgtccgggcatcgtttcgcgcttcgctgaaggtcacaggaggaccaaccaccttgactgtttcgtccttgggatgccgcaggcttttcaccaggccaatggcttttatatgctcgtcctcgaagacctcgggaatggagttaacaggtcccacgggaaaggaggcgccctcgaaaagtttcatccagttgcgcgaggtgtcctcggatagcatttgctctaggattcccagcagctccactcgattggtcacacgatccttgttggtcttgaatttgggattctgcgccaaatgttccacttttaggcggcgacacaggtccacaaactgaacatcactgccagtgcccagggtgagatagccgtccttcgtcttgaagctctgatacggaacgatgctggagtgtgcggtgcccatccttcctgcttcgaccccggaattcaggtagttgctacccacgttgagcagcagggagcagcaggtggacaacaggtcgacttcgatcttctggccacgttgcgtgcgggtcctttgatagagggctgccaaaattgctccatgggcgtacagtcctgtggacatatccgtcacagccacgcccaccttgctgggcggtccatcccgctcgccggtgatgtgcatcagtcctccaaccgaggaggcaatcacatcgtagccgggtcgcttggcatacggtcccacagagccataacccgtcattgagcaatagatcagtttgggattcaccttacgcaactgctcgtagcccaggccgtaacgctccaaggtgccgggcacataattctccaccagcacgtcgctaatctcggccaggcgatgaaggagttgcgtgccgcgcttgatatcgatgcagatgctccgtttattgcgattgggagccaggaagtaggcggcatcgttgctgttctttagaaagggtggtccccacttacgcgcctcatcgccaaagtgtggacgctccaccttgataacttccgcgccgagatccgccagaaccatggtgcaataggggccggcgatgatgcgcgataggtccaaaatccggataccatgcagcgggtggcgttcgtccacatcgctggcattagcattatcggctgcgttgtttttatcgccaacggctgcgaagtttctcaagctcgggcggcaaactccgtaattaagcaatccccggacgaggcgtaaattctgtgacaacatggttctttttttgttgctacttgtgggtcaactaatctgtcgccagtacacatgtgtatgttgtgtgtggaaagttttgcgggccgacttgatccgcggccacttttatcgtcactgaaagtggccctccatccaaaagtcgtcggaagctcgtagtcttatctctttttagttgctcttaacattcgcctaagagtgggagctttttgtttactatctaaagactgcgataaacaacacctggaagcccaaaaacaaaaagaaaaaaagaaaagagtctctctctcattgcgcttcaccttggggagtttccaccgagaatgtcgcgcatcctttcggtttcatgggggggaatcgcctcagctgaccaccagataatgagaggttagtcatccgcgatggcatgtcattaagtggagatcgaatgcctcgctttgcattgttttctgttctgtactccgattatatcaccttgctgacatcttggatagcgtgatcttatattaagcgatccgcttggaatcaaaacaagcgttttgcctttcttgaaatactgacaggccacgagcctaatgtacggcaattattccctaatgaccagcacaattaaaatgtaatttgaatgtcgtggctggataacttacgcctcaatgctcaccataagtgtcaggcggattagtaatccgcaagtacaacgtttagtgatcttaattgttgggcagaactggttcatccacgcgcagacgattaattaagattcatgctcagggaaggaattgtactcaaattaattcgtagaactcgattttcaataataataagacattttattcaaattgatatgtaataactagattagcatacaaagtatgaacgtgacaaacttttagggagcaataaactatctataagattcgtttgcaattttgatagatactaatgaattcatgttaaatattttttttgttctattggttcttatctgagttgtgagcaaattagaataaccagtagtatcatcttaaaagtaaaagtaaagtataagcgtaggcacattattatctcgccaagatcactgcccacatcttggggattcagtttaaaatagcttggtcttttccataattattgctccttatcggcaaagtcgacgtagccatcagttcttgaggaccatggccttgaaatagttttctcttgtatagaaattctagctaattttagaaaatacctgttcctgaccagttactaacttgttagcggggtgtaagagtaggttcaaggttctagttccttggaaatgttttctcaatgcgggcttttcccccggaaacctcgcctcgtggaatcaatatttattttcagaatgacgttgcactaatatgtgcgcagtgatctcagttttagctggtactggggtcagcatacatggcctaaacagctcgatacgatgcgaaagccatagacatagcccatttgctctcaccgatctgtgtaattacgatgggagtcctccctttgttcgcaacgttgtaaacaaggcgatatcattgcaagattcgaatataactttaatcacttgggatcaagagttcaggccatgtaattgtcgatctacggaatgacgcacttgctcgctttatggccatttcctttgggccagccgggaatcacgttcacaatcacgccggtcattatgcccaagcggatcttaagagacagcctaagagaaccagtttccgagcagatagagcttcgcagcgtttgggagattgggaaatgggagagtcggactttaaatactcggtggcaagcttaaccagcgtttatttactcagctcgtcttgctcgcgtcggttcggctcgtggatccatcagatacacacgtacagatatatatacatatacatatatatagaaagaaaccgaaagcgataccgattcagatgcagatgctgatgcagattgagataaccagtgtgttttgagtgaaacaaaatgaaagccggccaaaggctgggcatgcgtcggcagctcggctgttcccaatcggcttattcgcgagtgcatcccgcagataccactgccaactacgattactagcggccaatgcagtccagaaagccgcgactcgactattagccaactgaccaagccaaaaagccaaaagcatctcgtcgagctctcaactctcggtacccaaaaaaattgtgcaagccaaaaagtcgattgcagtcgtcagctgcggattgccgattgcggattgcacaatcctggcaacctgttgctgttcgttggctgctgctgtgtgtgtgtgtgtttggtgtctgtgttagccgcgttgtagaatcttgtatccagcgtatccagtcggtgatacgcagatcacatcacattttcccccatcgagtggtgcgttgagagaaaaccgtcaaaattgctgtgctactctgttccaggatcctggggtacatcatgcgccgcttcctgcgctcggccatgatcgtcttcagctggttcgtcgtcccctacagccggtacaccaacatcaaggtgatccggcgcaaattgccgcccatccggagccacctgctcgagattcccgccgtcgacctggccaagctgattcgcaccagaaaggtgagtacttgcaatcctcaactcccccaaaaaattgggtcacttacgcaaagcaaagcagcagcacctggtaaatgggtcggctcaaaacttgccaaatcaattggaaagactgttgccacagtggcggtttttgttgccacatttattggatactggtgaataataactattgcttgcaaccaactcccggggagttggagaaatagatagtttcgctttttttttttttgcagaaagtaaaaacgcagacgagacaatgacgcgcgtttctaatttttcactttataagacgcggagcactggcccctaacatttcaattagacaagtaagccattaaaaaggtcgagggtagaacgaatggacgacaagcaaaggggtaaataccctaaccagactaataaattcaaaaagaactgaagactaaaattcaagtcaggttcaaagtctatgcgtaccttaaaaaagaaatgtaattataagatgaatttatattttagtttgcttcatcaaaaggtcagcctattactgtcaataattacttgttaaattcaaattcacaaccattcgagtttacattttaatgatggcgaacagaatttattatttattattttgaggtcataattaggtggcaattgcttcacattaagccaattatttctgcgtagccgtatagccaaacttcaggggtcaataagctcagatcaagtggctaaggttcataacacataaaagttaccagcgaaaaagagcgaaaaaaaaaccgcgcgcagttttgtttataaattcagaataacgatgattcttacttttggaagatttcgtaaaaaattccaatggcgaaatttgccaacatttaataaaaaaaaaaaacgtttttattcaaaatcctgtttttaatacgtcttttcgacgcttcgagaagcataacatcgcatcgagtgaccctaggccagagtattaccgccagatgaaatcgaaatcaatttgggtttttttccctccatttctaccgacgtctcgccatcgcaagcacttaagccaattggcccaaaaccaaaacaccgagggactgggatatagacgcgaggcattgaggaaaccggcggcttagtcatctaaagcactagccaagcatttttttatgacgccagcgccagtttcgcaaatcatcatacatatgggcaaggcctgagggtctcactctctgcaagcgaagctgtatctgtatctacatctgtatctatatctgtatctttatccatatcatatcaaaatcaaagttgaagatacgagcttttcgggctgccaattacatgccacatgccacatgtgtctttgtttttgagtgtacatatccacgggatgtgcaacatctatgggtcgttcgttggtccacatcgtgtgaggtcaccactggcgactgtgggggggagaccttatcgtaacaccaagcggcgaccaccacccgccctccagttaccatatcgtgatcagtgggctgcctttgtttaatcgctgtgcgctgctgcatggaaaaaacttgcacttgaatggatggatagtagttgggtttttagtgcacgtccgtctgaagtacgaatattgtactttatttattttttagtgacgctttttacggcttctgtcttctttcggcaaggcggtcatatggtgcgtacgagtgctaaatattattattttaattatgcatctttatatgtttttttgttgttgtgtttaaccctcttaattgctcgttggtttcattgccataggttaggcattgcctcacagcgagccaagcgtaatgattttgcaattggcattatatcagaacgcgcgcgtctagttggccgatcaactactagcgaattaaataataataatcaccgtttcagcgaccagaagttgcatttaagaaagtgatactgctaattgcccttgtccgcttgtgaacttaagtgaataccctaggttttaggtttctgggtagatctatctgcaatcttaaatctgctcatgtggattcgtacttgaatcgcataattcgtgtttcgtttttttgtgtttttctttttcgcttcgcctgttgactcttttagcacgtacttcatacaccatatagtaccatcatacgtacttataagcaccacttgaatctgtgtgtctgtgtgtcgcgatttctttatactatatactatatactctatagtatatgatctatactctatactctatgccgtgccacaagatattttctacattgtaaacatcagagcgttggatcgttggtatcggttcggaatcggagtcgaaagcgcttttcggtcgctgatttcgtagcatgccccccttggtgaagccctcgcgacttgccattattggttgcatgctattggccggttgcagcgtgtttacctggtcggaaccccctctggccaccagtggcttcttactacactggaagtcattgaaaaagtcaagtagccttaattttaattatacataggcacatatgtacatacatacgtacatacgagttgctttcatatacgccggtgcatcatttgtgcgttgcatgagcccgaaattaaggcgaagtaagacggcaatttatgtctcaatcgtaataaagacggggcacatggaaggccttctgcctccgattacccagattaactgaaatcaagttcagaggttaccctcgatggcagaatgtggtttgctatgccaactacgagtatgtggtttcgattgagtgatacccatttgatttgagtgcaacgaagctcggtttgattgataagtgcttccccccatcaattacctaatcagatatctgaaaagcgggtgagaatgtgattaattacattatcggctgcatcacagtcagtgcttacgactctaagtgttgttgatcatgggtgattataattgtatcgattctcggtataattataagtttattcactgctaattccatggctaatatgtgagtcatgagagaacatacgtgttttgatctattgatcgctttattatcctctaatatcgaaattctttgtattcacaatcccattcatatacgcacgcttatattttattgttttgtttgtcagcctatttggttttatcgctgcaaatggtttctttgtgaattaattgtgacacataaatatggatggcaaataattgatcaagacgtgctgaagcccatggattagctacttattgttcgttcccttttatttaaataatcgatcaacgctttgtcaacattttgttgtgattaacacatagagaacttgttttctgccttagaattctaatttactcaagatattgcacaatcttacgaccataatacttctattattatctccgtgactttagttggcgttgagtgttttttatttccttaatcttaatttgattgatacattgttgatcgcctgctcaatccataaagaactcttcacgacaacaaatctattgattacactgaggaataacacggaaatcagtctgaatgaatgcctcaatcgacatatggcactggattatgtattttagcatatttcgatctatgtattgacaagtgaatcaattccaagagtagcctctttgaactgagaccccaagagttctataccccccatggtattcgcacattactcatacgtcatgtggccgctgataatgggcggtcgaaagtgcatgtatcgcacgatgaacgtcacgactgcaagttgtgtttgggtttgtctttttattgattttaatttaactcaaattgctttttgcttcgccactgccactggccgcttcccaatagactgctgaattgattgctgggaatttgaattaaaatggggtaggggtataggtacgggtatgggtatgggaatccgagaggaatgtgagctgttcggaatgcgaggtaacctgcggaaatactcaaacattctatgctttccacttgcagattaaaagcgaagaagtcgtggaagcctacatcgaacgatgtcgacaggtgagtttataatgggtatcatatcatggtattatagaataaatatccattctaccaggtgaaattcctgtctagaactatacttatgtgaattttagcgtgttttacttcccataaaagagttcaattcctatatcgttaaacttttaatggctggacattaagttttacgattgtcatttacagagtaataacaaataagtgaattaattgtatgtgaagttttgtataatcgccggtaaataaaactaattttttattagttatcctaaaatatctataatattaactttacactcatccgtatatattttttttttgtggtcaataataaagtataggtatgctttataatttgattttgtaataaatattaaaaaattatttgaaatgttgtttacttttctgtgctctaaacttttccgtttgatttcttgcaggtaaatcctctgataaatgccatcgtccaggatcgcttcgaagaggcattggaggaggctcgggagatagacaacgtgatagcgatgggcattaacagcgtggagtcgatggaggagctgaccccgttgctgggcattccggtgaccgtgaaggagagcattgccgtcaagggcatgaccaaccaggcaggtcgcgtcttcaagacgccgcagatagccaagtcggatgcgccggtggtggagcagatcaagcgctccggcggcatcatccttctggtgtccaacacaccggagctttgcctgctgtgggagacgtacaacaacgtgacgggtcagacgaagaatccgtacgacctgaagcgcactccgggcggctcatcgggcggcgaggcggccctcctggccagcggtgcctccctgctgggcctcacctcggacattggcggctcttcgcgcctaccggccatgttcagtggcatttggggccacaagcccacaccgtatgcggtctcctttaaaggtcatcatccgacgagtgactttcccaagtggggagatttcttcaccatcgcgccgatgacccgctacgccaaggatctgccgctgctgctcaagtgcatgagcgatcccacgggtcccaagctaacgctggacaggcctatcagtgtgaatggtatccggttcttcttcatggacaacgacgggccatcgggcatgatgcggccgctgagcagggatctgcatgcggccatcaaccgcgtggccaccgatttcaatgccaagcgggtgaacatacgcaagatgaagtggtcgctggacatctcgctgtccgccatgctgaccatgaaaaacatcgagaccatctaccacaagacggaggagggcgagcagcccaagaccgtgtgcaaggagacggtcaagtacttcttcggatgctcggacagcatcctgccgtcggtgatctttggccatctgcagaacttcatgaagatcatcccaaactcgcgccacaagcacctggccagcatcatcgaggcgctcaagactgaattcaaggagatgctgggcaacgacggcgtcttcctctatccgacctttcccaacacggcgcaccagcattaccagatctaccacaagctcctggagcccatgtacatggccatcttcaacacgcttggcctgccggttaccaactgcatgatcggtctggaccggcgcaacctgcccatgggcatccaggtggtggccaatccaggccaggatcaccttagcctggcggtggcccgcgaaatggagcgccgctacggcggatgggtgcgtcctccgtccgaggacagccacagcagcggtgggagcagcaagcagcgtggctagggtatggcctgtatatatcctgtgcgtgattcatttgtactttgttttgttattagctaattgtacactgtcgagcagttagggaatttcagagagactttaaatggatttagacaaatcactgttatcagccgcagttggctgaatggtagaaaggaaaggaatccctagatcagcctccatactttatcagcattttattcgaccattacaccatcacaccaccaaatgttcgttcgggaccttcgaaattagtaatccctcaatcgcgagtcattaccacccattgtattaaattattgtcaaaaaaaaaaaaaaaactccaatgagctgtacatcgtattcgtattcgtaatcgtattatctttacctatatgtaaatattcgtctagcatctaagtgttaggtttatgtcgcgtccggcagagatcgataaatataaccagtatgtgtacgttttgtagcatctctcgcttaaacaacttgaaaactttacaacttttgcaaagaaccaaattcgttgaataaatacgtaacagaaaaaatattaaccgaattttcaacttctgtggcgcaattgccgccgaaaagcagttggcctccacttggaagccatcgagggaggtccgagttcgagtccgagtccgactcggagaatcggagtccgcgctagtgcttggaaattgggcccacctgagcggtggacccgaagacatagtgaaacaagtattagacggctactagagacaatacacgctcggatacgtgtaccacttaataaatggttccacttcgctgcccgtcatggagaatcttactacagtcggacctgtttttgccaaattccgatactaactaactgattggaataacagatttaatatagtcagcagaagactccagacattttgacgacttccagttttacgctgtgaactttgatcgtcgctattagtacttaattaatggtttattatgaagaatataatttttaacttct

SEQ ID NO: 24116 - DNA, 1456 bp, DROSOPHILA
cacatacagacctacatatttgtatttttggttgatttgcaatgctgaaatcgatagtgaccgtcatccgtttgcacctggaggagctgtggctcagattaaaagcgaagaagtcgtggaagcctacatcgaacgatgtcgacaggtaaatcctctgataaatgccatcgtccaggatcgcttcgaagaggcattggaggaggctcgggagatagacaacgtgatagcgatgggcattaacagcgtggagtcgatggaggagctgaccccgttgctgggcattccggtgaccgtgaaggagagcattgccgtcaagggcatgaccaaccaggcaggtcgcgtcttcaagacgccgcagatagccaagtcggatgcgccggtggtggagcagatcaagcgctccggcggcatcatccttctggtgtccaacacaccggagctttgcctgctgtgggagacgtacaacaacgtgacgggtcagacgaagaatccgtacgacctgaagcgcactccgggcggctcatcgggcggcgaggcggccctcctggccagcggtgcctccctgctgggcctcacctcggacattggcggctcttcgcgcctaccggccatgttcagtggcatttggggccacaagcccacaccgtatgcggtctcctttaaaggtcatcatccgacgagtgactttcccaagtggggagatttcttcaccatcgcgccgatgacccgctacgccaaggatctgccgctgctgctcaagtgcatgagcgatcccacgggtcccaagctaacgctggacaggcctatcagtgtgaatggtatccggttcttcttcatggacaacgacgggccatcgggcatgatgcggccgctgagcagggatctgcatgcggccatcaaccgcgtggccaccgatttcaatgccaagcgggtgaacatacgcaagatgaagtggtcgctggacatctcgctgtccgccatgctgaccatgaaaaacatcgagaccatctaccacaagacggaggagggcgagcagcccaagaccgtgtgcaaggagacgaacttcatgaagatcatcccaaactcgcgccacaagcacctggccagcatcatcgaggcgctcaagactgaattcaaggagatgctgggcaacgacggcgtcttcctctatccgacctttcccaacacggcgcaccagcattaccagatctaccacaagctcctggagcccatgtacatggccatcttcaacacgcttggcctgccggttaccaactgcatgatcggtctggaccggcgcaacctgcccatgggcatccaggtggtggccaatccaggccaggatcaccttagcctggcggtggcccgcgaaatggagcgccgctacggcggatgggtgcgtcctccgtccgaggacagccacagcagcggtgggagcagcaagcagcgtggctag

SEQ ID NO: 24117 - protein, 408 aa, DROSOPHILA
MGINSVESMEELTPLLGIPVTVKESIAVKGMTNQAGRVFKTPQIAKSDAPVVEQIKRSGGIILLVSNTPELCLLWETYNNVTGQTKNPYDLKRTPGGSSGGEAALLASGASLLGLTSDIGGSSRLPAMFSGIWGHKPTPYAVSFKGHHPTSDFPKWGDFFTIAPMTRYAKDLPLLLKCMSDPTGPKLTLDRPISVNGIRFFFMDNDGPSGMMRPLSRDLHAAINRVATDFNAKRVNIRKMKWSLDISLSAMLTMKNIETIYHKTEEGEQPKTVCKETNFMKIIPNSRHKHLASIIEALKTEFKEMLGNDGVFLYPTFPNTAHQHYQIYHKLLEPMYMAIFNTLGLPVTNCMIGLDRRNLPMGIQVVANPGQDHLSLAVAREMERRYGGWVRPPSEDSHSSGGSSKQRG

SEQ ID NO: 24118 - DNA, 3761 bp, DROSOPHILA
ggtgatctgtgcaggaatctcgtgctgttagcaatggagctactaacacgacagctactcaccagcgaggagagcacaaatccggcgcccaggatgtacacggtctgtgagaactgctgcacgaaggctccgtagacgaggcccacaattccgaagaacgtgatgatgaagcgcgaccagcgctccgcctttccctgacccgcgaagtcctgcggcggtagagtgccgtgttagtgttatgtgctaatggttgcgaagcatacctaccatatgcgtctggatgtccaacattttgtgcaattcacaagctgcgattcaacaattttcggcgtaaacaattttcttttgcggcacgtcagcagccgaatggtgtgaccgtgccgagcgaaaaatgccaaggggatgagaatatactggaatttggaactcggtgaatttcccattatttttgtacatgcttatttccctctttttcaaaataagtgtgtttgaaaaatagcgaaattgtttgtagctttcaattgtgttttattattttaaatttaaaatatgcaaacaaaacggagattattactctctaaatgatgttttcctttgcagagtaagctcttgaaacaaaataaataagttcagttcaccttttcttatgcaaaatatgtaaaataagtttatagaaggcaaaaatgttgcatctttaaatgatttatataattttaaaccacgccaattaatgcaaactaatagcccatttaaaatacttaacttcatttacatatatgtatgcatgcatatctttaatgcaattatagtcattttattgaaaaggcttgcgatgtgaataatcgctcgttgttcatacatatgtatattatttgtacaatgcgttcataacgtggacgttctggcttgtgtgtcactataactaactaaataagttaaaaggcgaacaggtggaatgtaaagtgtagaggacctcgcgcctcccgattcatggcaggactcagaccctggcggccttcgtgcgccgcagctggacgacattgatcacgcagacgagcagccatgcgagcagtgcgatccaggcaaagaccagggtgaagtacaggcaggcggccgtattgatgcgcccgtagcgtcgccgctcgtacgacacgctctccaccagatagtccatgaagtcgaagacggcggcgcacgagagccgcgacttgatcacgggcacaatgttgcccacgccctggatctccttcagcagcgactccctgtactgcttgcaagtcacctcgaagccatccgtgaacacggccgagtagaccagttggtagacggccattattgtcgagatgacggtggcgggcagccctaaattagttaagtattacacatttgtacatagttaagttcggagacgatggacactcacagtagtagggcgagagaccatcgggcgtgagttccgactcggtggtcaccacgatcatgtcaccggagctgcaagcagagagcagagaggcgtaagcaaacagttgatgctgctccaagttggagcccatgatggcattactcatagccagacagacgaacgagtgtggctggccgattaaccccattgacccgccgacactcgatcgcgatcgcccgctcttaccgctgacggatggtggccgtgcccgccttgggcttgccccgaccgatgcacatgcggtagccgtggtagacgcccaggacgacggcgaagagcagcggcagcagcaggccgtaggtggcgaagtggcagtaggcgacgttgccgccctcgaagctgtggaacgtgctcttgccgtgcagcacgcagccgcaattggtgtccgggcaggcattgagcacgtactgccagtgtgtccaggccaccgccgaggtgatgcagcagaccagcgatgaaacgatggccagcgggtagagtagggacagggctcgctccgcgtagtacgacatcgtgcgaatggtatctgctcgcaggagtatctgaaataagcggacaagtgaatagtgaatagaatatgggtatctttgatccccagccaggtcaagttgatcttaattcaactttaaagtacttatggtaatgggcagtcaagttaattaattggccacttttcgagcgctctaattgctcatctaattgtaattatgcccaattcgttcaagatgattgcttaaacgcaattgtgggtttcgttttacatttcctcaaatggagaaagaacattattactagctgttcaaatttaacagcaattttgagtttgtaacgaagcttttttctaagaagttactaacaattgttagcttatctgattagtttaaaaaactcctttttttgacgatagtgagcatctcttgaaatttaaaatcgataactttgcaacaacaacaactctttgggcgtcccttaacacacacacacactgtcgcacctgcccaaacacacacacatagaacaggttgcaacgcgcactgtaccagatataaacaaactataatgtttgcagctaccactttcgatgtccctttaagcagctgaatttcggttgcgcaaagcgtttagttgttcgctaatgctgtttctatatcacatttctcacagaattcagggataaacaggaaaactgcactgctgacacatacacgcacacaggcgcactgcaggcacacctacgtttatcgatatcgataggcgggcgaccgaagaagcgaccgaacggttgagcggcgaagaaacgactgaacgaccgtcgtttcgccactgcgttctgatcagaacgggccgctagtgctaacgcttttagccgtctggcaacgccgatcaccaaaattcaaatgggatttccgttacaagtgatctgtgtttaaaattttatttttgattattacaagttttatttaaactaaagcgcagtaactagacagtatttcatgactatgtgtttgagttatgttagaagtaaatttcccgagaactgggcctaatcaattttcctaataacttggagcgcatttgccaactaagcgaattccctgcacccactgtgagcgtataaaatcgctgtttgccggggtgaaaagcattagttctcccagtaaatccaatcatggcatccccagtagtcagcctgcttctcgtcgggatctgcgccctggcctttgtccatgtggctcggtcggaatgctgcacctcccgggagctggtggaattcaagatggacagaggcgactgcgaggctgtgcgtgcaatcgaaaactatcccaacggctgcgaagtgacgatctgcgccgatggtgttgcccagttgggcgcctactgcggccagggatcgtgcaacatcttcggctgcaactgcgacggcggctgtctgagcggcgattggtcacaggaatttgtgaggaggaaccagcagtacggaatccagatcatcaaagtcaccaggctgccattttaaccccttgcatcacataaacaataaagagaagctttaattgcatccagaaattactaattaattatgtgtattttattttatatatgcatgaaattgataaggttcccactttctaatcaaatgtaaacagttcaatctgattactaggaactattcttatttttaatcttgaattccattaattacgctattaactaaaactattatactaaaaaaaaaacaactatcatcaaaatctgagatgatatgggctaatttttgaataaaatccagtgctcaaat

SEQ ID NO: 24119 - DNA, 849 bp, DROSOPHILA
gtttcttcgccgctcaaccgttcggtcgcttcttcggtcgcccgcctatcgatatcgataaacatactcctgcgagcagataccattcgcacgatgtcgtactacgcggagcgagccctgtccctactctacccgctggccatcgtttcatcgctggtctgctgcatcacctcggcggtggcctggacacactggcagtacgtgctcaatgcctgcccggacaccaattgcggctgcgtgctgcacggcaagagcacgttccacagcttcgagggcggcaacgtcgcctactgccacttcgccacctacggcctgctgctgccgctgctcttcgccgtcgtcctgggcgtctaccacggctaccgcatgtgcatcggtcggggcaagcccaaggcgggcacggccaccatccgtcagcgctccggtgacatgatcgtggtgaccaccgagtcggaactcacgcccgatggtctctcgccctactactggctgcccgccaccgtcatctcgacaataatggccgtctaccaactggtctactcggccgtgttcacggatggcttcgaggtgacttgcaagcagtacagggagtcgctgctgaaggagatccagggcgtgggcaacattgtgcccgtgatcaagtcgcggctctcgtgcgccgccgtcttcgacttcatggactatctggtggagagcgtgtcgtacgagcggcgacgctacgggcgcatcaatacggccgcctgcctgtacttcaccctggtctttgcctggatcgcactgctcgcatggctgctcgtctgcgtgatcaatgtcgtccagctgcggcgcacgaaggccgccagggtctga

SEQ ID NO: 24120 - protein, 251 aa, DROSOPHILA; identical to SEQ ID NO: 3870

SEQ ID NO: 24121 - DNA, 3308 bp, DROSOPHILA
ttgtacagctgccaaaggttctgcttctgctccaggctaatgttcaggttccacagcacctcgcgggacacgcggtagacctgcgccttcgcgaactcggcgcccagctcccggcaagctttcacatggacgcagtccgtcggctcgcctcccgttcgcttgcacgactccacgaagcactccgccttgctggacaccactgcagcgtccggctgcagcgacagcgtgacgtcctggatgaccacaaagttgcgcggctgctgctccttctccttggtcctcagcgagtagacagtggagcctggccgcagcgacaccagctgcacggcatcgagaacgttcctgcgctgcggacactcggaattcttgcagagcagcgcccggttgccattgatggcgccgcagtgaacacacttgcgaacgccgcgcatgactcttgcatcttaaattcccggaaaatggctataaaatgcgtttcttagttttcgcaaaagtttgccggcttttgatttgcgtggcgcagtgtgaccgtttcgcgcgctgatgccagcagggctggcacacacattctacatatgtgtgcattaaattaattttacttttgaattattgctacagtttttgcatacactacatatattttacatttatttttcataacatttgggctattccagccagcttgtgtaggcagtgctgcgcagccctggtcgcatcagccgcttgttatcgataaccaaattggctactttaataggaaatttgttatttcaatttaaaaagttgactttccgctaaaatgacgcatccgctggaggcgccgcagcgcagccgcaaataccccttcgtgcatatgcgcatcgcggaccacagcgcactggacaccatcgaggggcgccacaactgccgcctgtgcaaccgatcgcgcaagttcttctgctacagctgctgtgtgccggttggcgagctggaggagctgctgccacgtctggagctgccgctccaagtggacatcattaagcacaaaaaggaaatcgacggcaagagctcggcggtgcacgcggccgttctggcgccggcgcacgtgaggatccacacatttccggacattcccgactatcgcgaggaggcgggcgtagtgctcatattcccaagcgccactgcgcttgcggtgccgcagctcttcgcgcgcaatgtgcagcttcagatcggcgacaactacgggctgcccaagggccaccacatgggcaccatgctgcgcaggcgaatggacgaggtggaggtaaaggagctgcaggaggaggtagatgagccggagacggtgcgacgaacctggacgctagacaacctgcccgtccgccgagccgtcttcatagacagcacatggaaccagagtcgcgggatctacgcggacgccagggtgcgcggcctacgaacggtggtgctgcagaatcgactgtcgcaattctggcgccaccagcgcggcagtccgcgctggtatctggccaccatcgaggccattcaccagttcctcctggaggtgcacatcaatgcctggggcctgaacaccgcctatcgcggactcgataacctggagatcaccgcgggcttccatcagctggcagagccgctgaccaagacagctgccagtgagaatgtgggcagggaggcgccctacaatgggcagtacgacaatctgctcttcttcttcgcccacatgtacgatctcatccacaagtactatgaccacaacgacctcatcgcctaccgacgacccatctagcgttctaatggacatacatatgtatatatatatattatattggatgtagtgagaagtacacgtaactgctggcctaactaactactgatcccactgattctactgcttcttcttcttcttgccctcgtcgccggactcggagctcgacgacttggcgtccgtatcgatgggtttctgccatttgagcgcattgcgacggtacagcggccacggtggaatggtgatctgtgcaggaatctcgtgctgttagcaatggagctactaacacgacagctactcaccagcgaggagagcacaaatccggcgcccaggatgtacacggtctgtgagaactgctgcacgaaggctccgtagacgaggcccacaattccgaagaacgtgatgatgaagcgcgaccagcgctccgcctttccctgacccgcgaagtcctgcggcggtagagtgccgtgttagtgttatgtgctaatggttgcgaagcatacctaccatatgcgtctggatgtccaacattttgtgcaattcacaagctgcgattcaacaattttcggcgtaaacaattttcttttgcggcacgtcagcagccgaatggtgtgaccgtgccgagcgaaaaatgccaaggggatgagaatatactggaatttggaactcggtgaatttcccattatttttgtacatgcttatttccctctttttcaaaataagtgtgtttgaaaaatagcgaaattgtttgtagctttcaattgtgttttattattttaaatttaaaatatgcaaacaaaacggagattattactctctaaatgatgttttcctttgcagagtaagctcttgaaacaaaataaataagttcagttcaccttttcttatgcaaaatatgtaaaataagtttatagaaggcaaaaatgttgcatctttaaatgatttatataattttaaaccacgccaattaatgcaaactaatagcccatttaaaatacttaacttcatttacatatatgtatgcatgcatatctttaatgcaattatagtcattttattgaaaaggcttgcgatgtgaataatcgctcgttgttcatacatatgtatattatttgtacaatgcgttcataacgtggacgttctggcttgtgtgtcactataactaactaaataagttaaaaggcgaacaggtggaatgtaaagtgtagaggacctcgcgcctcccgattcatggcaggactcagaccctggcggccttcgtgcgccgcagctggacgacattgatcacgcagacgagcagccatgcgagcagtgcgatccaggcaaagaccagggtgaagtacaggcaggcggccgtattgatgcgcccgtagcgtcgccgctcgtacgacacgctctccaccagatagtccatgaagtcgaagacggcggcgcacgagagccgcgacttgatcacgggcacaatgttgcccacgccctggatctccttcagcagcgactccctgtactgcttgcaagtcacctcgaagccatccgtgaacacggc

SEQ ID NO: 24122 - DNA, 1194 bp, DROSOPHILA
tgtgaattgcacaaaatgttggacatccagacgcatatggacttcgcgggtcagggaaaggcggagcgctggtcgcgcttcatcatcacgttcttcggaattgtgggcctcgtctacggagccttcgtgcagcagttctcacagaccgtgtacatcctgggcgccggatttgtgctctcctcgctgatcaccattccaccgtggccgctgtaccgtcgcaatgcgctcaaatggcagaaacccatcgatacggacgccaagtcgtcgagctccgagtccggcgacgagggcaagaagaagaagaagcagtagaatcagtgggatcagtagttagttaggccagcagttacgtgtacttctcactacatccaatataatatatatatatacatatgtatgtccattagaacgctagatgggtcgtcggtaggcgatgaggtcgttgtggtcatagtacttgtggatgagatcgtacatgtgggcgaagaagaagagcagattgtcgtactgcccattgtagggcgcctccctgcccacattctcactggcagctgtcttggtcagcggctctgccagctgatggaagcccgcggtgatctccaggttatcgagtccgcgataggcggtgttcaggccccaggcattgatgtgcacctccaggaggaactggtgaatggcctcgatggtggccagataccagcgcggactgccgcgctggtggcgccagaattgcgacagtcgattctgcagcaccaccgttcgtaggccgcgcaccctggcgtccgcgtagatcccgcgactctggttccatgtgctgtctatgaagacggctcggcggacgggcaggttgtctagcgtccaggttcgtcgcaccgtctccggctcatctacctcctcctgcagctcctttacctccacctcgtccattcgcctgcgcagcatggtgcccatgtggtggcccttgggcagcccgtagttgtcgccgatctgaagctgcacattgcgcgcgaagagctgcggcaccgcaagcgcagtggcgcttgggaatatgagcactacgcccgcctcctcgcgatagtcgggaatgtccggaaatgtgtggatcctcacgtgcgccggcgccagaacggccgcgtgcaccgccgagctcttgccgtcgatttcctttttgtgcttaatgatgtccacttggag

SEQ ID NO: 24123 - protein, 91 aa, DROSOPHILA
MDFAGQGKAERWSRFIITFFGIVGLVYGAFVQQFSQTVYILGAGFVLSSLITIPPWPLYRRNALKWQKPIDTDAKSSSSESGDEGKKKKKQ

SEQ ID NO: 24124 - DNA, 16560 bp, DROSOPHILA
acacatcatatgtatgtacgtatcagcgttggcgaataaaaaagtgcagtgcatacccggcggacttatctaatagttttcactttcaatgtcgagcgaaagctctgctgcccctgacgcggtcgctgcctcgcttatcgcgattcgcaattcgcaattcgcaattctcaattcgcatttcagcgcgagcgggacggaaacaggagagagacagagagagaggcggcaagagagagagagagagagagagagagggagaggtgaaatgccccgaaagttgtctgtattcaaattatttatttttttttgggatttcttttctgcaagatgtccagatgggaacagagcggagcgaccgacccccatccctgtttaccccgcaacgcaccgtaccgtacaagtgttcttggtatattcgcatttgttatagttcgctttttttcactcctccctccatttgcgatgcgttggctttttcactccgtttttttatgggccgtgttttttttcatccactttttttcggcggttgtgcactcgttataagtttttgcttgtgctgccactgctgcttcttctgccgccgcgagtgctaattgtcgtcttgatagtttatttaattttgattcgccgtgtgacatagaaatggtttttgctgctgcgtcgtcgccgtggttgacattttaaactgcatttgttaacaatttttaaacatttcgcatagttgcaagcgaaacagtagcagaacaggcaaaaaacgcaaaagcgagcaaaaaaccatcgcaaagcagaaacaaatgcacaactttcagctagcgcggcacaaatccgtcagaaaaagcagcagttaaatttcaaggcgaactctgaactgcagtgaaccttagtagagggggggttgtttggtatatcatttggggtggtgggggctgtctgatccacttgtaatttcaactcaaattctaattgtttgctcttccgctttctttctttcgcttgcagttaaataatcattagtgaaaggtccatctgcagcttcacaatccggcaagcggtctagtaatcagcagccagaaggagcagcgcatcgcatcgtaacgcatccttagtttcggtgggccaggccgccagaaagccgtcaaaatacgaaagaaggtgacctcgaagaaggccagcgttgtgtcggttgacgacgatcacaacaacaacaacaaccacaacaacgaccacaacgctcggcagcccacaaacacagcgaacacaagcacacccacaccaataggaacacctatagacacgcccacgcccacgcccgttgacccagagcaggagtgcccacagcccaggagcaacccgatccacagccagaaccagacacccatcgagatggacgacacacagcacttctgcctgcgctggaacaactaccagagcagcataacctcggcgttcgagaatctgcgcgacgacgaggccttcgtggatgtgaccctcgcctgcgagggacgcagcatcaaggcacaccgcgtcgtcctctccgcctgcagtccctacttccgcgagctgctcaaggtgagtgaccatttaacatctgtgatcttccatcaatttggtagctaccctgcattcccaacatactggcgccctgtggctgctaatctcgatagataaggacctctcacacacacgaactcatacaagatgaacggtgaaaaagaaaacacaatgggcttaatgcgctctgtggttaaatgtttgcctttttcctcctcctatgcttttgaaattgcaattcacacattcacagttgcagcggatgcagcaatcttcttgcgagactgtatgcgtgacctacttagcacccatggcaatttctccctttttctccctccctcgcgatctgcgtctttatcttagccagtgcagcacagccacacatgtgcaacagccgccaaagttgctgcagcagcatcctgctttcattcgactgccagtgcggatctcttcattatttcacatatgtacatatgtatgcatgtatgtatgtacaagttggatccgaatgtgatcggcttggtttgccaaagtagaaagaagaccaggtcctatccaccattgtggccacaataattcggaaaagctggctaagcaaaaagttggagaggggtagttgtgtgtttttggccaaagtggcgtggcgacgagcacgtttagacgagaggggagcagcagatggctggcgttttgctagcgttttaatttatttagttgcacaccacggcaaatagcgcctgcagtaagaaaactgacaagaaaggcaccgacagccgcgatagacacaaaaacacggcaattgtggacgggctgcggaaggggaaagggtggaaagggaaggcaggaaggaaggaaggaaggaaggaaggaagttgtgtgtacgccgtacagtcgaagcacgttatgaatgccggcgcaaggcggcagggggatgcagtgagaatgagtcgatggcagggttcttggcgctgggacaacgctacgtatgattgatttgtgttgcctgatcatgcaacgcacgcggatctgcgaaaactcgcagcgcgcaacttgcaacttggaactcgcaattggctgctaggaaacttgcaacttggaacccgcaggtcggaagtcagaactagagcgggctcaaatgagaccgcacacccttatttcgcttatatagccggctaatccttgaagttggcccggctcgaagtcaaagggaactggcaactaatgcagcccgccccaaaggccgcagtttggttcattatttttattatgacattaaaattatgtgattcgctgttgttgccccaacatttacgtttgcccgccaaaactttggcgctgcctgcattctgcattgaaaatatttgcacgcaattgcggttttgagcgacagggacgaagggctgctaagttagactagttagagagagacgggaagggacagaacgggacagcctcgacgtttgccatttgcattgttcgagctgtcattggagccccggagcggtggagcccaggagcactggcagcggtgggggtcaggaggaggtcctgcagcagaaattatataaattacaaagtgccccgcccccaggaacaccgccccccgtttctgttgctgtttcagttgctgtttctgtttctgtttctgtttgttcaactcttgtctctttcgacatgatttgttaacatgatagaaaacttgctgggctttccgttattattttccgtttttgttccaaattatgcgcgaggcaaacaaaaagagtgtagtttgtctgttctgtttggtttttgggaagaactgcaattaggagagagtttttagtgtggaggggcaggggcaaaatggggaatggtgagtggggagtgggcaggggcccaaatccagcgctgattacgcaatggcaatggctatggcaactggggacgcgaaccaaaccaagccgaaccgaatgcgaaacaagaacatgtcaagaagtcccgggcaaactggaaagtttcttcccccaactccgtccgtccgtccgtccgaacaagaaattgcgcgagcagaaaaagtcggcatttaatttgttaaaaaggccaactaaatgcagcgggacaaaaacagcaacgccaacaaaaggcaacgggccgactgaatttttctcgagctctttttgtgcattcccatttgttgctgcagtcgctgtggaattatgtacccaagaaattagtatacaaaactttgctggctggcaggcagcacaaaaaacagcaaaggcaactgcaacaacaagagcaacaacaacaaagggccctggcacaaaactttgtaaattcaatttgaaatacatacaagtgggcagtaggtggtgaacaaaggacagagacaacggtggacagtagtcgcaactggcgaggaaaactggacacggccgttcagccgtccagccgaacaactggacacttggctcgcgcccagaaatacccaaccccaacctcaatcccaacccatcttgcccagcacttggcgtcgcaattgtgcgcgactttgcgcctatgcataaatatttaattaactgcagcgcattattttaattaggtgtaaaaactgccaaacaacgaatgccagcgacaaattgaggggctcgggggactcggatacagatacagatacagctacagagtcagatacagctacagattcagatacagatacggattcgttttgagactcagagatgccaggggctagaggtgacttaatggctgctactgagctgggggcaattgctaaaagcatttctggcttttgtgtaatgacctgggaccgggccacgcccctccgccctccattcccatttgcatgatgtgctttgcccaccagttcaccatctcaccatctcaccaactcaccagctcaccagctcagctgcagctgcagtagagatcattcgatcggcgtctcctgacgcatttgtctttctttcgtcaaattgacctcaatttcgcaatcgctgatacatatatgtatatgtatgtatgtatgtatgcaagtgcatatatgcacaatcacactctcactggcaatcttttagcgctaactcaatcgcaaatatccagtgcgtgtgtgcgagggcatataaattgcaaaagccagtaaataagacaaacacacacggaatgcagggtctttcagggcagagcaacaaaagacgaggcgagacttgacccaatttctagccaggcagcagcagcaacagcagcaaaaaacagaaactgaaactgaaacggcagaggagcagctccctttgttggagttccacttgataagtgaaatttgcagtacagtgtacacacacgcagcgtaaactggaatgcactggccctgaatgtgctccaagtggaatggggagtggggaatcagatcggatcgaattggatggggatggggatggggtaggggatagggatgggataggaaaccacacatgccagaagaaataaactgcagctggctggcggcgaaacgagcgaatgcaaacttcaaatcgctctggcctgttgacattttagcgacaattgaaggttgtctgggccagagaaccctgataattgccagggcaaacaggcttatcgagggatccagagttggggacctggttgactcacccaccgattgaggggccaaccgagatactatacgtacatatctgactgactaaaaccaccactcaaattacagagcacaccctgcaaacacccggtcatactgctgcaggatgtcaacttcatggacctgcacgccctggtggagttcatctaccacggcgaggtcaacgtgcaccagaagtccctgcagtccttccttaagaccgccgaagtgctgcgcgtctctggactcacgcagcagcaggcagaggacacacacagcgtgagtattggccatgggccagcagtcgccgcagtacgagcccctctatattgccaactccccctccgcccgcagcatctggctcagatacagaacctggccaattccggcggccgcacgccgctcaacacgcacacccaatcgctcccacatccgcaccatggctcgctacacgacgacggcggctcctcgaccctcttcagccgccagggagcgggttcgccaccgccgacggcggtgccatcgctgccctcgcacatcaacaaccagctgctgaagcgcatggccatgatgcaccgcagcagtgccgccgccgccgccgaggagacctcccacgcctttaagcgtctgcgcggctcggacaacagcctgccgctgtccggcgccgttggcagtggcagcaacaacaacagccccgacttgccgccgcttcatgcgcgcagcgcctcgccccagcagactccggccgacttcagtacgatcaagcaccacaacaacaacaacacgccgccgctgaaggaggagaagcgtgagtgtcccagtggaaactgggtttcggattggcattggtgagcccaagggtactaaacactttcattccatttcccgcaccgttaggcaacggacccacaggcaacggaaactctggcaacggcaatggcaatggcaacggagcgagcaacggcaacggaatctccatcagcgacaagctgggcagcctcacaccttcgccgctggctcgagcgggcgccgatgatgtcaagtcggagcccatggacatggtctgctctaacaacaatgccaatgccaacgacgaacacagcaacgactccaccggcgagcacgatgccaatcgctccagtagcggcgacggcggcaagggatccctgaggtaggtcgcaccgcacacctcgccggaacgcctaacatatctggctcggagcactagctaacccttggtatcctcattcgattgcagctccggcaacgacgaggagatcggcgacggactcgcctcccatcatgccgcccctcagttcatcatgtcgccggcggagaacaagatgttccatgcagccgccttcaactttcccaatatcgatccctcagcgttgctaggtgcgtatgagcaacgtgctcagttaacagctcagttaataactcagctaactgaccgaccaactaacgctataactcttttcctctccccctctgcccacacatgacgtgtcacccaacctgtcgggttttggccaactctaggtctcaacacacagttgcagcagtccggtgacctcgccgtgtcccctcaaggtgagtcagaacatttctctatccgtactctattgttccgctctatttgcgctcaaaagctcattattacattttttacatcaaatgcaaatgcaaatgcaagtaccaaaataatataccagagtctatccaagtcagataccagataccaaaagaaatgaaaggctaaaagcaaacgtaaaactaaaagtaaagagaatacgaatacaaatctaaatccaaatcaacaaaaaaaaaaaaaaaaatgagagcaaaaaccataccaaagttaaatccaaaaccagagccagaatctaagtcgaaattactaaaaaaaaaaaactgctgagagatcatttgattgcctgtaattttgttgaattttgaatatattttttaacgtaccttttccgtttcgttgtaattgtcaaaatatatcgttatcgttttcattttcgttttcgttgatcttttgtttctttcgatttttgcgtttcgactgacttgaggacacacacatgcatgcatacatgtcgcatatgtatgcgtgtcgatcaggagcaggacttttgatttaactttcgatttatttcccgttggactcaactcgaatccgcacccgcaaagtaaaagaacgaacccgaacttgatccttggaaccaacggcagacccaaatcaaaccgaacctcctcacctcctcaccaatcctccggttcgttgcgattccaagtcgagttcccgtcgtatcgtatcaagtgtataaatttctttcttgtttgattgtttcgatggtaaatgttttcatttgtttcggtcacactcacaccctcacacacgcacatgccagaactgcagaatccacgggcaagaacccagaaagtacgccgccccccccccttcccccttcccccaacaagaagattcacctgaccacccctttccacccactaaaaaaaaaaaaaaaaacattaaaagaagtacctgcacatgcacttaaacgattttccatgtcatccatgttgcgtactaaacgacgctggcctcgagatggcttgacgcataatgaatactgcataatgaataccgcataataaacaatgaataatgaataatgtgtaatagcaaagcagggtaattgctaaataaacgccagccccgaaactttggcaaacactcaaacatcatcatgcccgactgccgctccgccaggcttgtttgatgaactacgcaaaattaattaactcgctgctttccagcttcagctcatctgccagccgcagagtgtttagcaaaattctatcacaagtttcgcgccacaccagttgcggtgtgtgtgttctgcatgcggtcaggccgcaacaatccgattccctggcaagtgccccacatggcggcaaagcggcaaggcggcagggcggtagagcagacccccagcatcacccataagtcccaggcccaactacaactagaaaccgaatgctacacgacgcactctgacgtttatgtttattaaccgctgttgtttcgactgcgcaatccgcttaccatttcatttccgtttgtgttctgcatttattcctttccgtttcgttccgttacgtttcattttgtgttccaattatttcgtgttccttgtaagaaacccaagtaaactgatcaaacacaagcaaaatgtactacacaacagcaaaatgtcgcatccacccacaaaatgcaatacacacacgccaatacacgcaatattacaaacaacacacgcatagatgttccaaaaattgtcccacagttagaaatactagtaagtttcgttttgccccaatttgcattccacggccaaacagcctcctcctttttttgttcgtttaaacccaaatcagaatgggtcaggaattagagattaacttgactatgatttcggtagagttctcgattcacaaatgtgtctatttttcgttcgttccttttcgttacgttctttttccgttattcccagtttcaagaatatggctaaataaaattaaaaacactagacatgacacgggaaaagccccgcagagaagcaaacaccgagtacattttgcaatcgaaattttattggtgtgaacttttagtttccatgtaaaacgcaacgcatttgaagatcgaatatatacatacctacataatatatcataatatatattgaatattgaactctttcctttatttgtacgtcgtcgtgcttgtgtctaaaactatgtaaaccccacccgaaccaaattaaccacccatcgacccgatcccattagcaaagtcaaaagaaaagctttatttacaacaattgcattcgaacgaattttcacattaattttcaatgtgtcttttgttaacaactgtcgatgcccccgcagcctgtgatggagggaaaagcggttttcgtttagtttaccaaccagttaacccctgaaatagacacccccatcgcccgccccattgcccctgggtctgtctctctagcttgtcccctcgaattcggccacactttgctttgagcacacatctgttcacgaagcccgaccaaaaccccctaaaaccacaaccaagcccaacaagtaccccacagtcacacactcaaacccaaactcgccgcaacgaatacagaagtcagtgcaaaaccaggttcacgaaaatcctttgcaagcccagaacctctagcccttgatccttgatctgagtcccgaggggtggacggatcagtcctaactcagcacatattggcaattgttcactcatgcgtacacagttcacagttaggtacagtcacaccgggcgcgtctcgtctcgtttcgtttcgtttcgtctcgtttcgtttcgtctcgtttcatttcggtcaggtccgtgtcgcgcctctcgttccacactcgaaacacaatacggccacactgcaggttcacttgtttacttggccacgcttactcacagcacgcacatacacacacacgcacacaggactctcacactcacaagggggtccgtgaggtaaacttgatagaaggggtaagcccttcgcctctttgagtagtcgaaaagcacacactacacactcacacacatacatacatacatacatgcccgcccacacaccagcacacatatacccacacatacatgaactatattatgcgctcaaaaacacagctaacaaaatgatcaccagagggcactaacaccgatgttgatcgactaacgctaatctttatttactttccaattgtactaaccgaccaaaatttaaaatcccccaataatcgtgagacctatatatatttatatctacctacccacacacgtatatatatatgaatcaaagtatatacatacatattgttaagaattgatcgatctaactccctgtatacgtatataaatccgctttactaaacccccaatggatccaaaatcaaaataccacaatcgtccactgaggcgaccaaagcagacaactcgatacatgaaacaataacacccaacgcccctactcccacccaaccacctcctttcttccaagtcaaacaccaaacccaaacaatccacacacccacaccaccaccagcacaaaagaacacaaactgagattaccaactcaaggctttaagtatataaatttgattgagaaaccgctttaaattatgctctatatatacatatatatatttgttgctccttttttaaaaccaaagaacacaaacacacacacaaacactgtgagaaaaggagaattcagaattatatcttacgcttagcatatctagaataaattaattactttaacttccgtgcgaagcattcaaaattcaataattttaagatccacaattggtgacccaggcaatatgaaaattgaagagcaaaaatcgaaaaatgtatccattactaatctatttaagttaccacctaagcacacaaccgaattaaaagctgtggatggattggatgggatttggaaatgacgtaaattacataaattagaaatttggttgtagtacatatataatgtcaaaataatactgttaaactgcaaaggcacagctccaatccgcccacagtaacaagaatatcaaagcgaaacaaaaacaaaaattataatttaagcacaatgtacattttacgaaattccaagcaaaaaataagtcaaaatttaaaccgaaactagaaaatgccactaagatcccggagagagatgatgatggtggagacaaaggtgatttggcaaggggtataattctagtgctttttaagtgacacaaccacacacaaccccgaactccctacacacacagctcacacacacaagaacacacacaactacacacaaagacacgaggtacgggaagtcaaagaaccagaacaacacaaaaaaaaaacacacaaaacacgcacaataaaagcgatacagagatgatatgaacttcttatggtgacggtgttctacaaaatgcacccacacacaaaaacggaaacatacacaagcacccagacacacacacacacacacacacaaacagacacaacaaacacaccacttacgtctctgaactcaaaggctcctcctactattcctaatcctaattttaaattgccacacaacaccgcacactatggtaatgagtaaaacaagaacaaaccaaactacaaaaaacaaaccaaccagcaaacccaaaaccaaaccaataccaataccagccaaccaacaagtacctcaaactaaacctaaaccaaaaccaagccaaaaccaaaaccaaacgaagaaccccaacaattttgcacacgttgagtatccggtagtgtccatcgagcgatcagatcgacatcgatgtccatatgtagacgcagacgccaagaaagaaagaatgaaagaatcgattctgacctaaactgggctggaactgaactgattcacagtcgcagtcacagtcgcagtcacagtcacgcaattcggttttgagttgaatggtgaagaactgaaactgaatcgtcgtcaaacaatcaaaaagaaatcaatttctcacatttgccatgcgaagccaaccgttttcttttccacatgccacttacccgatatccccagatatcccaatatatatcccccgatatatccatcccttcctaccacaccatatacttctttctgtctctctctctctctctcctctctctctctatctctctctccgccgttctatatatccgctagaaaaacagattgaacaatcgaaaaataaatccaaagttaaattagccaccagcttttgttaacaaaaaagctaaagcagaaatgaagcaaacttatatatttgatgcaaaaaatgctaacgaaattcgttttctgataaccatccggcaatgcacacatgaaatcaactgaaattaaatcaaaaattctgaaaaaattccaaaatttcaaaatccaaatcgaaaccaatgagaaatcacgcaaaattgagacgaaaaaagcaattcaattcaataacaactcgttgtccttgggctaatgcgacgttttctgacttttttccccaccttgtcgtcaggtaaactgacgacaaatgctacaactactacaacaacaataaacaactcgattaccaacaacaacaacaacaacaactacgattactctctaccaacaaaaaactccaactctcaaaaaactccatcaccaacaacaacaactctaacaactccaacaacaacaactccaactcgacctacagccatcacaagtgcctccggcatctgtggccttaacctctccacatttgcagccaacgggagcagcagcggcgggagcaacggtggcctgtcaatgaccgccctgctgccccagcagcagcagcagcagcaacagcagcaccagatgtcgcaacaacagcagcagcaacagcaacagcagcagcagcaggggaacagctccagcggccaacaacaacagcccaacgggatcctggcctgcagtacgcccaaggccaatacgcccaccaccacacagcagcaaatgtacgcggcggtgatggccgctgccgcatccgcgtccgcctcgacgagcggcagcgccaacagttcgctgaacaactcgaactcaacattgaacacctcggggggactgaacaattcagcgagcggcggcgacgacttccggtgcaatccgtgcaacaagaacctgagctcgctgacgcgcctcaagcggcatatccaaaacgttcacatgcgccccaccaaggagcccgtgtgcaatatctgcaagcgcgtctacagctccttgaatagcctgcgcaaccacaagagcatctaccaccgcaacctcaagcagccgaagcaggagccaggcgtcggcgcaacccaggcggcggccaatagcttctatcaccagcagcaccagcagcagcagctcaatcaccactcctcttcatagggcttcatgtactttgattaccaccagcagcatcaggcccagcaccacccacacccgcacctgcatccgcactcgcatccgcgcccgcatccgcaccacggggggttctccagttgaggggaagcaagtttttgttaagtttgaatgaaccgaatgtcaagcatatgtaggaacacatatacacactcatactcactcactcacacacccagaccaacacccacacactcaagacggtgctttttgtacacattaactattaaagaccaggacgaaggaagcgaatgtgcacatacatacacacagtctaggctagttacaattagttgccttcggtagttgctaagcacaggatacgcagtttatacagattaaatcgatagctgttagtaaacccgagacccgcccatcccctgtaaagttccaaggagtttggtatgggcaccccattaccatcccactgcccagtcccgaacccaatctcaatcccaataccaataccaatcccaatcccaatcccaatccctgtccaggttcactgtttgtcgtcttaataaggagctaacagaggtgcccgtagtgaattcttcgaaatggctttaactaaatacaatttatccgatggacagcatattattctgtatacacctcatgataggcggcaatcgcgcacatcgattagaagagggaaatgtgaagcgttagacgtatgaataatctctctcttaaagttagactaaactaaagaacgaactgcacttttttttattaccattacgaagtatatgcataatgttaaaaagttacgatttatagctagttgtaggcgaagaaacacatgtttggaagcttaggagtttacaagaaaaatgaaccgacgagcaggggagcgaccgaccgaacgaccgaccaattgcaaagatcttttctttagtactttaaactagttatcagattttgaatagttagggttaagcgcaccgtaacacacgcacacgcacacacctatttacatacgaatcacgatgcatatgtatgtctagaataaagaaatgtttaatcatagcgtatttttttttttttggattttttgtatatttaatattagttatgcgaatattgagtaatgataccgaaatgttgaccggatactttgatgagtaaacctgtgttcgttaatttttagtgctgctaagtaaagatacagacacttgtttgtgcgtaagacctatgaatacaagcaaatatatatatatatacatataaacaccatacactcacagagcgccaagccaatgcagctgagatccatgtaccagcgtttgcggctctgcgcgaagaactccactttctactctaattcaattcattatatttacaataaacgtctacacattaaagcgatatttcatttaccctccgctccccaggccactcccccaaagcacccacgtccccagcctcgtatgttgtatgcatgtgaatcgaggctttgtcatcagcgaaaccttgggaaccgaacctaatgaaataaccaaaagataggaccgatagaggtccaaagtcctcaccctctatctctctatctctgtacgtccagccacttatcatgcacatattgtccacactcataaccatacatcataacctagatcgtagtgccaggacctggcccttttgggtcacgtcagtgtaacatgtcatgtgtgcctagccgagcagagccgagccgagccgagccgaacctatccgaatcgcatcgaactttgaccccatcacactaatccgccacatacgttaatctcgggtcgagcgcgaactttgcccattttaggaaccccccagaatcttgggctgatcagcaagaaaataactataactagaactatactaacacctcacaatcaaccaagccacgaactcgatccctctgctccgctccgctccgttccactccactgtgaggggcggtgagccaccaatgaagcgctaagtatctgaatctgaatctcagaggtgacccccccccccccatccactgacccctaactaccaacccacgcacacaaccgaacattggaataagccccctgtgtgtgagacccacccgttcccgaaagcacgtttaatctaccgcacatttggttcgttttaaccagttccccccgacaccccgaaccccaagaatccagagccccacccaaaactcccacctatgcaaacccaatcgaacccaacacaggcaacggtgctgcgattgagtttgaaaaaaagagacactagtgacaaccgcaagaaaaaattgacaacttgcaagtaaacaaaataaaaatcgaaaaaaaaaaaacagaataactaaaagggaaaatcaaaataatactaaacattttatatatacaacaaatcaatcaggccaaacatgtttcaaaattttgctaaacttaacaaacaattgaaaaatcacaatcaaaatcgaaatcgaaatcgagcgaaaaaatgaacgcatacaaattggaattgaagtcgaaattgaatcgaaaaacgagaaatgcgaatcgaatcgaaaaaatgacaagacaaattggtttaaagcatccacgaaattcgtgacaaattatcaacgatcagagcacacccaaattggcaaaatagacaccacaaaattatccaccagtttacaaggtcgtccccaaggtcgtggcaactgcaaatgcaactgcacctgcaactgccaacgatcggggtgcaaatttccgaatcgaaccgaaccgaaccgaaacaaatccgattcggactcggattcgatatcgaatttgagccgagtttcccaccttcggcattatgaactgtgcaattcgagttcaaagttcaacaacaaccatcacaaactagccacagcaacagcaacaacaacagaaacagcaacaaaacagtcaacaaaccgttttattaccattttatttccatgcgttttccccaaaaaaaaaagccaaaaccaaaaaaaggaaatgagaaccaacccgaaactccgaaaatgtgagattgcgaatcgcactccaaaaatgaatctgaatttaaatctgaactcgaacagcgttttttcaatacaaaattccttgatcaaaaccaatgagagccagataaattccgcactaaaaaaccaaatgaagcaaccgacctaagcaaaagactgaattaaaacagtttatggaaaagcaaagttagcaaatgtacattgttttgagcctggatttgttagtgttataaaagtaaacaaaacaaacaacaaacatacagatacagatacaaaaacagatacagatacagatgcaaatgcagataaca

SEQ ID NO: 24125 - DNA, 3971 bp, DROSOPHILA
agttaaataatcattagtgaaaggtccatctgcagcttcacaatccggcaagcggtctagtaatcagcagccagaaggagcagcgcatcgcatcgtaacgcatccttagtttcggtgggccaggccgccagaaagccgtcaaaatacgaaagaaggtgacctcgaagaaggccagcgttgtgtcggttgacgacgatcacaacaacaacaacaaccacaacaacgaccacaacgctcggcagcccacaaacacagcgaacacaagcacacccacaccaataggaacacctatagacacgcccacgcccacgcccgttgacccagagcaggagtgcccacagcccaggagcaacccgatccacagccagaaccagacacccatcgagatggacgacacacagcacttctgcctgcgctggaacaactaccagagcagcataacctcggcgttcgagaatctgcgcgacgacgaggccttcgtggatgtgaccctcgcctgcgagggacgcagcatcaaggcacaccgcgtcgtcctctccgcctgcagtccctacttccgcgagctgctcaagagcacaccctgcaaacacccggtcatactgctgcaggatgtcaacttcatggacctgcacgccctggtggagttcatctaccacggcgaggtcaacgtgcaccagaagtccctgcagtccttccttaagaccgccgaagtgctgcgcgtctctggactcacgcagcagcaggcagaggacacacacagccatctggctcagatacagaacctggccaattccggcggccgcacgccgctcaacacgcacacccaatcgctcccacatccgcaccatggctcgctacacgacgacggcggctcctcgaccctcttcagccgccagggagcgggttcgccaccgccgacggcggtgccatcgctgccctcgcacatcaacaaccagctgctgaagcgcatggccatgatgcaccgcagcagtgccgccgccgccgccgaggagacctcccacgcctttaagcgtctgcgcggctcggacaacagcctgccgctgtccggcgccgttggcagtggcagcaacaacaacagccccgacttgccgccgcttcatgcgcgcagcgcctcgccccagcagactccggccgacttcagtacgatcaagcaccacaacaacaacaacacgccgccgctgaaggaggagaagcgcaacggacccacaggcaacggaaactctggcaacggcaatggcaatggcaacggagcgagcaacggcaacggaatctccatcagcgacaagctgggcagcctcacaccttcgccgctggctcgagcgggcgccgatgatgtcaagtcggagcccatggacatggtctgctctaacaacaatgccaatgccaacgacgaacacagcaacgactccaccggcgagcacgatgccaatcgctccagtagcggcgacggcggcaagggatccctgagctccggcaacgacgaggagatcggcgacggactcgcctcccatcatgccgcccctcagttcatcatgtcgccggcggagaacaagatgttccatgcagccgccttcaactttcccaatatcgatccctcagcgttgctaggtctcaacacacagttgcagcagtccggtgacctcgccgtgtcccctcaaggtaaactgacgacaaatgctacaactactacaacaacaataaacaactcgattaccaacaacaacaacaacaacaactacgattactctctaccaacaaaaaactccaactctcaaaaaactccatcaccaacaacaacaactctaacaactccaacaacaacaactccaactcgacctacagccatcacaagtgcctccggcatctgtggccttaacctctccacatttgcagccaacgggagcagcagcggcgggagcaacggtggcctgtcaatgaccgccctgctgccccagcagcagcagcagcagcaacagcagcaccagatgtcgcaacaacagcagcagcaacagcaacagcagcagcagcaggggaacagctccagcggccaacaacaacagcccaacgggatcctggcctgcagtacgcccaaggccaatacgcccaccaccacacagcagcaaatgtacgcggcggtgatggccgctgccgcatccgcgtccgcctcgacgagcggcagcgccaacagttcgctgaacaactcgaactcaacattgaacacctcggggggactgaacaattcagcgagcggcggcgacgacttccggtgcaatccgtgcaacaagaacctgagctcgctgacgcgcctcaagcggcatatccaaaacgttcacatgcgccccaccaaggagcccgtgtgcaatatctgcaagcgcgtctacagctccttgaatagcctgcgcaaccacaagagcatctaccaccgcaacctcaagcagccgaagcaggagccaggcgtcggcgcaacccaggcggcggccaatagcttctatcaccagcagcaccagcagcagcagctcaatcaccactcctcttcatagggcttcatgtactttgattaccaccagcagcatcaggcccagcaccacccacacccgcacctgcatccgcactcgcatccgcgcccgcatccgcaccacggggggttctccagttgaggggaagcaagtttttgttaagtttgaatgaaccgaatgtcaagcatatgtaggaacacatatacacactcatactcactcactcacacacccagaccaacacccacacactcaagacggtgctttttgtacacattaactattaaagaccaggacgaaggaagcgaatgtgcacatacatacacacagtctaggctagttacaattagttgccttcggtagttgctaagcacaggatacgcagtttatacagattaaatcgatagctgttagtaaacccgagacccgcccatcccctgtaaagttccaaggagtttggtatgggcaccccattaccatcccactgcccagtcccgaacccaatctcaatcccaataccaataccaatcccaatcccaatcccaatccctgtccaggttcactgtttgtcgtcttaataaggagctaacagaggtgcccgtagtgaattcttcgaaatggctttaactaaatacaatttatccgatggacagcatattattctgtatacacctcatgataggcggcaatcgcgcacatcgattagaagagggaaatgtgaagcgttagacgtatgaataatctctctcttaaagttagactaaactaaagaacgaactgcacttttttttattaccattacgaagtatatgcataatgttaaaaagttacgatttatagctagttgtaggcgaagaaacacatgtttggaagcttaggagtttacaagaaaaatgaaccgacgagcaggggagcgaccgaccgaacgaccgaccaattgcaaagatcttttctttagtactttaaactagttatcagattttgaatagttagggttaagcgcaccgtaacacacgcacacgcacacacctatttacatacgaatcacgatgcatatgtatgtctagaataaagaaatgtttaatcatagcgtatttttttttttttggattttttgtatatttaatattagttatgcgaatattgagtaatgataccgaaatgttgaccggatactttgatgagtaaacctgtgttcgttaatttttagtgctgctaagtaaagatacagacacttgtttgtgcgtaagacctatgaatacaagcaaatatatatatatatacatataaacaccatacactcacagagcgccaagccaatgcagctgagatccatgtaccagcgtttgcggctctgcgcgaagaactccactttctactctaattcaattcattatatttacaataaacgtctacacattaaaaaaaaaaaaa

SEQ ID NO: 24126 - protein, 724 aa, DROSOPHILA
MDDTQHFCLRWNNYQSSITSAFENLRDDEAFVDVTLACEGRSIKAHRVVLSACSPYFRELLKSTPCKHPVILLQDVNFMDLHALVEFIYHGEVNVHQKSLQSFLKTAEVLRVSGLTQQQAEDTHSHLAQIQNLANSGGRTPLNTHTQSLPHPHHGSLHDDGGSSTLFSRQGAGSPPPTAVPSLPSHINNQLLKRMAMMHRSSAAAAAEETSHAFKRLRGSDNSLPLSGAVGSGSNNNSPDLPPLHARSASPQQTPADFSTIKHHNNNNTPPLKEEKRNGPTGNGNSGNGNGNGNGASNGNGISISDKLGSLTPSPLARAGADDVKSEPMDMVCSNNNANANDEHSNDSTGEHDANRSSSGDGGKGSLSSGNDEEIGDGLASHHAAPQFIMSPAENKMFHAAAFNFPNIDPSALLGLNTQLQQSGDLAVSPQGKLTTNATTTTTTINNSITNNNNNNNYDYSLPTKNSNSQKTPSPTTTTLTTPTTTTPTRPTAITSASGICGLNLSTFAANGSSSGGSNGGLSMTALLPQQQQQQQQQHQMSQQQQQQQQQQQQQGNSSSGQQQQPNGILACSTPKANTPTTTQQQMYAAVMAAAASASASTSGSANSSLNNSNSTLNTSGGLNNSASGGDDFRCNPCNKNLSSLTRLKRHIQNVHMRPTKEPVCNICKRVYSSLNSLRNHKSIYHRNLKQPKQEPGVGATQAAANSFYHQQHQQQQLNHHSSS

SEQ ID NO: 24127 - DNA, 7161 bp, DROSOPHILA
aattcacattctctgcgtgtgcaaaaagcaaagaaaaggcgagaaaaaaaaattagactgcaaacgacaagaaaagaagaaaaaatagaaaagaaacggcgagcggaaagaagaagagcgcagaagaaggccgagcaaaggcaacgtagagttgaagaaaatgttgtacaaaaggggcggaggagcaggagccgtgttttcaagtcgcaagcagcagaagcagtataaataaataaccatcgtcgccaaagagagtgctcgctattcagcgcgattggaatcgcggaaaagcaagttggcgaagtacgaaatatcgcagtgaaaatcaaattttccaaatagaaagaagagctcctcctctcgttcgttcgcctgctcgctctctttctctctcatcctctccatcgctctctcgcttccactctcgcgactgggtggcaacgtgtgtgcgtgtgttgctgtgtgtgcctgctgtgtgtgagtgtgccgcgtgcgtaagtgtgtgtgtgtagctcgaaagagcgaaaaaatagatttaaaagaaaaaaataagaggaaaagcaaataaggagaagcgaaataaccgactgtgtctttgtgtggaatttcttgataattgcaacatacgttaccatggaatacttcctaggttggtaaaatgcgttaactagcacccgtgcatgcgtgtgcgccaccccctatgcatcacccacatgctcgaaaatttgcatacgtatgtgtacgcttatgctggcactgctttacgcttgtttgttttttgttgttattagctcgaaatcggcagagttttcccagcatctggcttccttcgattacgacagtttcccgttacgtctacaattacaaaatattgaccttgtttatacacacactcaccatatcacacacacaacaaacccaaccacaccacccatcacccgcccacccataatgtaaaaaccgtcttatgtgcaaaccacttgcaggaggatatgtatacatgaacggagatgcactcaagatccagccgcccgtctacaccaacgttcctgtcgagacggcgatgctagcaactaatctgtttggcgccacaacccaaattgcagcctcacccgcagcagccgccgctgcccacataccgttgatcacagccgcagctgcagccgccgccgccgcaggcgctccagcagtagctcctccagttgccgttgctccagtggccaccgcatcagcagcacaagcagcagttgtgcccgcccaacaacagcagcaggcgcatccacaccaggcccagattttggcccatacgcacgtagcccaccaacaacaacagcagcagcagcagcagacgatccaacagcatctccaccagcagcagcaacaacagtcgccgcatcccgcccagcatctgacctacggccatcagccggcgctttcgcaggccacggctggaggatcaggaacaatttccggaggagcagtaggaccatccggagtagtcgtggagggccaggacaccaacgagtacgccatcatgaatggcgcactcggccagacccaggatggcactgtggtctgctacaccacagacgccctgaacaacacgaatttagttgcactcgatccgcagccccatcaaattgtagtgccggtccaggttcctgtccaagtcccagtgcccgttcagctaccagcaaatggatccgctgatccgcagcaaggcagccacaatgcagctggtggagaggagcccaacataccgctggacaagctcaaacaaatgctggccacccaacttgagtactacttctccaggtgagatttggcacacaaaatccaacagcaaaccccttttgacattgcttcttattccgctccaaacagggagaacctggcaaacgacacctacctgctctcccagatggacagcgaccagtatgtgcccatttacactgtggccagatttaatttggtgcgaaagctaaccaatgacatcaatctcatcactgaggtgctgcgtgaatcgcccaatgtccaggtggacgacaaaggcctgcgcgtgcgtcccaatcgcaagcgttgcatcatcattctgcgcgaaatatcgaacaacacgcctctcgatgacgtcaaggtgagtgactgactctacgctctcccgagccagccgaaatactaattggattttgcttatatcacaggctctgttcagcaatgagagctgcccccgcccgatatcctgcgaattcgccgccaataactcgtggtacataaccttcgagtcggacgaagatgcgcaaaaggcgtataagtacctgcgcgaagaggtcaaggagttccagggcaagccgatcatggctcgcatcaagcccaagtcgtttatcaatcgtatccaagctgtaccaaagaacggctatcgcctcacgtcgccgccgactgctaatgtctttgatccagccggagccggtggcgccacagttagctatgcggctgcccagcagccccgctatctgtacaccaacggagcggccatcgcggctcccgcttcagttcagtacagcaacccagtactgattgtgagtatcaagttttgtattgttatttgagttaattggcgtttcaataacttcaatttcgatgaagggatgcagtgttttttatatactaggcttttcacgactaaaacgatttcatttatttgttaatgatgccaaacattgtttgtttacagccgattccgcagaatcaattctaccctggattggtggctggtccctggccgcctggcactgtagcagctactaccgcccatgggcaaaacttctacgagctcggaggaaacatatttaccaccaatcctttacctccgcagccagtgacagcgggattcgctcaagctccaccacccacctcacaagcaatggtcacgcccaaaccgcagggcggtgggcgctacaataacaatcaccgcggcaatccaaacaacgttggcggtgcaaactcgggaccacgcgccgagtcgaggagcaaaccaccgcgcagcacaccatcagcctcccatatccagggcggtaacatcatgcccatccagataactgcacccattccaggaggaatggttagcgtggttccgaccaacattgtgcaggatccattacagccggcacctttgcaacagcaaccccagcaggtgatccaacaaattcagcagcagccatcgagctcagctcagcagcaacaggccgccacggtgcagatgaacaacactacgcgtcactaccccatcaagagcaactggaagggtgtgttttcaaataccgcttatttgcgaaacagtcaaatacaattttcacccgctacaggtggcatgcaaaagaacctagacaagagctatagcggtggtgtggccacccatcatcactacaccacccaggtgcaggctctgcccgcccacagccatcatctacaggctcagcagcagctgcagggacagacccagcagcagcactatcaattggcttcctccagcgctgcaagcgctccgcaagttacctatgtaaccactgcaccggccccacagcagccgggccagcatcaacaccacttggtggtccagcaaacgcagccacagcagcagcaacaacagcaacaggtagtccttcagcagcagcaagtgcaggtgcaggagctgcaggaagctggggacggcgtcgagcatagctctcacgccatgcagcaggtgaatcgcagtagcaacatgtctgccagctcctcctcatcgctggccacttcgatgagcaaggagccactgcaatggcagaatcgtccgcgtcgtcgtcgtcgtgatgaggagggcggtatcaactattccccaggcgggcgagttggggtgagtaatctacatgcatacaatatttagcataaaagagagaagccttgaatggagtttaaatttaacgtaattttataaagcaaagcgtaatttttattcttaacctatatatctttgcattcttaacagctctacggcagctcgccctcaaacccgcatccgcagcagcatctgatgtcatcttccaccgggagcaatgtacaatcagctggcggaaccgatggcggcggagcctcccatcgcggcggagagcgccagagccactacaacaccatccacgacgtcccaccgccccagcaccgtggcaactacaagggcaataactacaatccgcattatcatgcccagcattcttcgatggcgagtggctcgcaccatcaccatcaccacaacgccctgtcgtcgcagcagcagcaacatcacttgaccacaggcactgggcagcagggctcgggtcatcactatcatcaccatcaccaccacaattcgattggcagcaatgtgggcaacagcggtggcttaggcgtcagcagtggcggatccgggggtggcggaagtggcggaggatcgggcagcaacagtctgtctggcggaagcaacgagcgcggtattcaccacagctccttgggctatcagggtcaccagcatcagcaccaacagcagcagcagcagcaacaacagcagcaacagcaacaaccagccgcaccggtgcaaccgccgcagttcgatttagaggatgccgcctttccaccactgccagccacgtcagccacagcaccacatacacctcaggccactggcggagcatccctgcataactctacgacctcgtcctcctcgtcaacaggtctgggccaaaagcagaccctacaccagcagcaacagcaggcgccgcaacagcaccaggtgctgagcagcagcgtggaaagcgccggcggtgatgaacaacgctcaagcaatcagcagggaatcgagaccagcaatatccacttggccaacagttccaccgccaacaattgggttgagaaccgcctatcggacgtggtgcgcactggcggtggcggtggaggcggaggcaagggcaaggctcgtaaggataacaggcacccacagggccagaaccagccccatatggcccccaactatcagcagcatcagccgcgcaatccacctgttagccccacgccagccctgggcgctgagtatgggatccagattcaggagggcaacaatactaagaacgttactaagcagagctccagtaacaacaattcgatccatgtgataaagtgtcaaacaccaaatatcaatgccagcagcaaggaggaggcagccggagcccagcaacagcagcagcagcagctggacaaatcaaacaagactgaggatgaaatgcatccaaagcagccatcgcagcagcgactggtcgaaggctatgtccagcagcagcagttgccgctgctggctgcccataacgagtattccgctgccctggccgcgggcgctggcgcctgtagcgtggtggagggtggtctgaccaccagtttggccgagtgcagtctgggccagcacaagaagccgccctcggtggccgccctgcacgccaagaaagacgccaatttgctggagaagggcgccagcaagcacaagagcgtggccacgtccacgtctacagaaaatctttcggctgccgccacggccagcaaactcagctatgcccaggtggcacagcaccacaaggccgcggcctcttctgattcaaaggagacgggctccggtggctccactggcacgctgtcgcccactggcagccacaagatggacctagtctttggtgatcccgccgtcgtggtggcggccgtagagaaaagcggcctagccacagtttctaccgagaaacgcgtcgcaggtggagcctcgcccgccgcgttgatcggcaagccagctggtggacttccggccaccaacacaacccaaggcagcagtgctgtcgtggtctctgccaaagagaaaggtatgttcgaaagccactaaaagcgttctttagatgagtaaatttttatgaaatgacttgattgtgatctaagcaacataatttatatcgaacaaatctttgcaccccacagataatcgtcccaatgcctccgttcgcccactgagcaaggagaaacagcagcaacattacggctctgctacagagcacaacactaatgccaatatcggcttgggggctagcggaaaccgcaagtccagggccaacaactcttaaaggacggagagaggagaaacaaaccgcgttgccaaagcgaggcatctgtgaaacaccttgcaggatgcctctaaagctgcatccgactgtaaatatatgaaattccatgtgtaaatatgagcaaacctttttgttaaacctataagagctagagatatctgtaaacgaactaaggaggcatatgacaggtgagttgtggtgcgcatatgtaccttcaaaacttactatttacaatccgttttgcagcagttgccgctgctcgttaggacgcggaaacgagagcagaggaaggagagagcagcaggcgatgcttggaccagttatcatattagtaggcaacgacgaagaatgaatggtgcataccctttctccagctatatttaatcagttatcagttaatgttaatcaacctaagctaatgttacctagactcggtgggtacacacacacacacacgcagcttagcgcggcgcggaggagcaggactgtggcgaccggggacaaaggaaagaacagacaagaaatgaatgagatgtatatgcctaagctaagctattattacgattaccaataacgatgccgagtgaataagtcttaagaggtttgagcgtagttagctaactatcatcgaacgacaaaacaaaactaaagcaagctaagccaagcaatggaagagaggagaaggaaatgttaggttttattgctaaattaccgatgaactcatgaatcacacgtcgattttacgatatatgatttgcctttaatatttcatcattctcatttttgcttacacatcagaacgtaatgtttatagccaaaacagaagtacacagataagagtgcgtagcccacatagctatgtctctgctagtctcacaggttagggttacttctattatttagatatattatatataatctatatatatttatatgcgattgttttgaatcattgtaacattttaacggatgatcttgtttgcgcaagagggtttttttt

SEQ ID NO: 24128 - DNA, 4566 bp, DROSOPHILA
atgaacggagatgcactcaagatccagccgcccgtctacaccaacgttcctgtcgagacggcgatgctagcaactaatctgtttggcgccacaacccaaattgcagcctcacccgcagcagccgccgctgcccacataccgttgatcacagccgcagctgcagccgccgccgccgcaggcgctccagcagtagctcctccagttgccgttgctccagtggccaccgcatcagcagcacaagcagcagttgtgcccgcccaacaacagcagcaggcgcatccacaccaggcccagattttggcccatacgcacgtagcccaccaacaacaacagcagcagcagcagcagacgatccaacagcatctccaccagcagcagcaacaacagtcgccgcatcccgcccagcatctgacctacggccatcagccggcgctttcgcaggccacggctggaggatcaggaacaatttccggaggagcagtaggaccatccggagtagtcgtggagggccaggacaccaacgagtacgccatcatgaatggcgcactcggccagacccaggatggcactgtggtctgctacaccacagacgccctgaacaacacgaatttagttgcactcgatccgcagccccatcaaattgtagtgccggtccaggttcctgtccaagtcccagtgcccgttcagctaccagcaaatggatccgctgatccgcagcaaggcagccacaatgcagctggtggagaggagcccaacataccgctggacaagctcaaacaaatgctggccacccaacttgagtactacttctccagggagaacctggcaaacgacacctacctgctctcccagatggacagcgaccagtatgtgcccatttacactgtggccagatttaatttggtgcgaaagctaaccaatgacatcaatctcatcactgaggtgctgcgtgaatcgcccaatgtccaggtggacgacaaaggcctgcgcgtgcgtcccaatcgcaagcgttgcatcatcattctgcgcgaaatatcgaacaacacgcctctcgatgacgtcaaggctctgttcagcaatgagagctgcccccgcccgatatcctgcgaattcgccgccaataactcgtggtacataaccttcgagtcggacgaagatgcgcaaaaggcgtataagtacctgcgcgaagaggtcaaggagttccagggcaagccgatcatggctcgcatcaagcccaagtcgtttatcaatcgtatccaagctgtaccaaagaacggctatcgcctcacgtcgccgccgactgctaatgtctttgatccagccggagccggtggcgccacagttagctatgcggctgcccagcagccccgctatctgtacaccaacggagcggccatcgcggctcccgcttcagttcagtacagcaacccagtactgattccgattccgcagaatcaattctaccctggattggtggctggtccctggccgcctggcactgtagcagctactaccgcccatgggcaaaacttctacgagctcggaggaaacatatttaccaccaatcctttacctccgcagccagtgacagcgggattcgctcaagctccaccacccacctcacaagcaatggtcacgcccaaaccgcagggcggtgggcgctacaataacaatcaccgcggcaatccaaacaacgttggcggtgcaaactcgggaccacgcgccgagtcgaggagcaaaccaccgcgcagcacaccatcagcctcccatatccagggcggtaacatcatgcccatccagataactgcacccattccaggaggaatggttagcgtggttccgaccaacattgtgcaggatccattacagccggcacctttgcaacagcaaccccagcaggtgatccaacaaattcagcagcagccatcgagctcagctcagcagcaacaggccgccacggtgcagatgaacaacactacgcgtcactaccccatcaagagcaactggaagggtggcatgcaaaagaacctagacaagagctatagcggtggtgtggccacccatcatcactacaccacccaggtgcaggctctgcccgcccacagccatcatctacaggctcagcagcagctgcagggacagacccagcagcagcactatcaattggcttcctccagcgctgcaagcgctccgcaagttacctatgtaaccactgcaccggccccacagcagccgggccagcatcaacaccacttggtggtccagcaaacgcagccacagcagcagcaacaacagcaacaggtagtccttcagcagcagcaagtgcaggtgcaggagctgcaggaagctggggacggcgtcgagcatagctctcacgccatgcagcaggtgaatcgcagtagcaacatgtctgccagctcctcctcatcgctggccacttcgatgagcaaggagccactgcaatggcagaatcgtccgcgtcgtcgtcgtcgtgatgaggagggcggtatcaactattccccaggcgggcgagttgggctctacggcagctcgccctcaaacccgcatccgcagcagcatctgatgtcatcttccaccgggagcaatgtacaatcagctggcggaaccgatggcggcggagcctcccatcgcggcggagagcgccagagccactacaacaccatccacgacgtcccaccgccccagcaccgtggcaactacaagggcaataactacaatccgcattatcatgcccagcattcttcgatggcgagtggctcgcaccatcaccatcaccacaacgccctgtcgtcgcagcagcagcaacatcacttgaccacaggcactgggcagcagggctcgggtcatcactatcatcaccatcaccaccacaattcgattggcagcaatgtgggcaacagcggtggcttaggcgtcagcagtggcggatccgggggtggcggaagtggcggaggatcgggcagcaacagtctgtctggcggaagcaacgagcgcggtattcaccacagctccttgggctatcagggtcaccagcatcagcaccaacagcagcagcagcagcaacaacagcagcaacagcaacaaccagccgcaccggtgcaaccgccgcagttcgatttagaggatgccgcctttccaccactgccagccacgtcagccacagcaccacatacacctcaggccactggcggagcatccctgcataactctacgacctcgtcctcctcgtcaacaggtctgggccaaaagcagaccctacaccagcagcaacagcaggcgccgcaacagcaccaggtgctgagcagcagcgtggaaagcgccggcggtgatgaacaacgctcaagcaatcagcagggaatcgagaccagcaatatccacttggccaacagttccaccgccaacaattgggttgagaaccgcctatcggacgtggtgcgcactggcggtggcggtggaggcggaggcaagggcaaggctcgtaaggataacaggcacccacagggccagaaccagccccatatggcccccaactatcagcagcatcagccgcgcaatccacctgttagccccacgccagccctgggcgctgagtatgggatccagattcaggagggcaacaatactaagaacgttactaagcagagctccagtaacaacaattcgatccatgtgataaagtgtcaaacaccaaatatcaatgccagcagcaaggaggaggcagccggagcccagcaacagcagcagcagcagctggacaaatcaaacaagactgaggatgaaatgcatccaaagcagccatcgcagcagcgactggtcgaaggctatgtccagcagcagcagttgccgctgctggctgcccataacgagtattccgctgccctggccgcgggcgctggcgcctgtagcgtggtggagggtggtctgaccaccagtttggccgagtgcagtctgggccagcacaagaagccgccctcggtggccgccctgcacgccaagaaagacgccaatttgctggagaagggcgccagcaagcacaagagcgtggccacgtccacgtctacagaaaatctttcggctgccgccacggccagcaaactcagctatgcccaggtggcacagcaccacaaggccgcggcctcttctgattcaaaggagacgggctccggtggctccactggcacgctgtcgcccactggcagccacaagatggacctagtctttggtgatcccgccgtcgtggtggcggccgtagagaaaagcggcctagccacagtttctaccgagaaacgcgtcgcaggtggagcctcgcccgccgcgttgatcggcaagccagctggtggacttccggccaccaacacaacccaaggcagcagtgctgtcgtggtctctgccaaagagaaagataatcgtcccaatgcctccgttcgcccactgagcaaggagaaacagcagcaacattacggctctgctacagagcacaacactaatgccaatatcggcttgggggctagcggaaaccgcaagtccagggccaacaactcttaa

SEQ ID NO: 24129 - protein, 1521 aa, DROSOPHILA
MNGDALKIQPPVYTNVPVETAMLATNLFGATTQIAASPAAAAAAHIPLITAAAAAAAAAGAPAVAPPVAVAPVATASAAQAAVVPAQQQQQAHPHQAQILAHTHVAHQQQQQQQQQTIQQHLHQQQQQQSPHPAQHLTYGHQPALSQATAGGSGTISGGAVGPSGVVVEGQDTNEYAIMNGALGQTQDGTVVCYTTDALNNTNLVALDPQPHQIVVPVQVPVQVPVPVQLPANGSADPQQGSHNAAGGEEPNIPLDKLKQMLATQLEYYFSRENLANDTYLLSQMDSDQYVPIYTVARFNLVRKLTNDINLITEVLRESPNVQVDDKGLRVRPNRKRCIIILREISNNTPLDDVKALFSNESCPRPISCEFAANNSWYITFESDEDAQKAYKYLREEVKEFQGKPIMARIKPKSFINRIQAVPKNGYRLTSPPTANVFDPAGAGGATVSYAAAQQPRYLYTNGAAIAAPASVQYSNPVLIPIPQNQFYPGLVAGPWPPGTVAATTAHGQNFYELGGNIFTTNPLPPQPVTAGFAQAPPPTSQAMVTPKPQGGGRYNNNHRGNPNNVGGANSGPRAESRSKPPRSTPSASHIQGGNIMPIQITAPIPGGMVSVVPTNIVQDPLQPAPLQQQPQQVIQQIQQQPSSSAQQQQAATVQMNNTTRHYPIKSNWKGGMQKNLDKSYSGGVATHHHYTTQVQALPAHSHHLQAQQQLQGQTQQQHYQLASSSAASAPQVTYVTTAPAPQQPGQHQHHLVVQQTQPQQQQQQQQVVLQQQQVQVQELQEAGDGVEHSSHAMQQVNRSSNMSASSSSSLATSMSKEPLQWQNRPRRRRRDEEGGINYSPGGRVGLYGSSPSNPHPQQHLMSSSTGSNVQSAGGTDGGGASHRGGERQSHYNTIHDVPPPQHRGNYKGNNYNPHYHAQHSSMASGSHHHHHHNALSSQQQQHHLTTGTGQQGSGHHYHHHHHHNSIGSNVGNSGGLGVSSGGSGGGGSGGGSGSNSLSGGSNERGIHHSSLGYQGHQHQHQQQQQQQQQQQQQQPAAPVQPPQFDLEDAAFPPLPATSATAPHTPQATGGASLHNSTTSSSSSTGLGQKQTLHQQQQQAPQQHQVLSSSVESAGGDEQRSSNQQGIETSNIHLANSSTANNWVENRLSDVVRTGGGGGGGGKGKARKDNRHPQGQNQPHMAPNYQQHQPRNPPVSPTPALGAEYGIQIQEGNNTKNVTKQSSSNNNSIHVIKCQTPNINASSKEEAAGAQQQQQQQLDKSNKTEDEMHPKQPSQQRLVEGYVQQQQLPLLAAHNEYSAALAAGAGACSVVEGGLTTSLAECSLGQHKKPPSVAALHAKKDANLLEKGASKHKSVATSTSTENLSAAATASKLSYAQVAQHHKAAASSDSKETGSGGSTGTLSPTGSHKMDLVFGDPAVVVAAVEKSGLATVSTEKRVAGGASPAALIGKPAGGLPATNTTQGSSAVVVSAKEKDNRPNASVRPLSKEKQQQHYGSATEHNTNANIGLGASGNRKSRANNS

SEQ ID NO: 24130 - DNA, 2637 bp, DROSOPHILA
ttttttttcttgcttcttttggcaaacgaaaagtctgaaaagtcgattaagttgaatcatctacgttttgataccaaaattcgatttacatagcttatgcacgttcgactacattaagttcaccgtacgtacgagtacacccataaccgtgtccgtacccgaatctgtatctatctattaatctataaggagaaccctccgtttgttacgccccacgcgatctgaaatcgccagctgcaatgccatatacacatatacagagcatccgagtgctccgacctcacccccaatgtcacctcgtttttattatattcaataaatgtggaatttgtaaatccagacacatgtatgtatgtatgagtaccgagtaccgagtactgagtactgagtactgagtactgagtcctgagtactgagtcacacatagcagttcaaggaagtggaagtttaaatgtcgattatttaaaacatgtactactcaccgactaacagacatcgcgtatacagttcacagtttacagttcacagatcacaaaaacccagtgtgtgtatgagagggtcgtcatgtgagtacagagcccagaagttactcaacttattacactgaggacctagccaactaactaaactaactaaatagcatattgatactcgaaatagcagcagtaaggcctcgataagcgaggcgtcctaacagaagaataccgaaatacagaaatacaaaaaacccaaatcagaaatgagaataccgattaaacatccgaataccaactaataatcaatagtaggttcgcctgtttatcttgtgcactaagaatattttttcctattcgtatagatgtttccctacagcctcccctaaccgaagttcccaaaatcccttgccagttaattgaatgtatgcatactgaaccgtattatccaatgaaccattagctccaagccacataaagcttacaattacaattacattaacaactacaattacaattacaatacgcgatatttaaaaataaactaaactacaataacagcaacagtaacagtgcagtaactacatggctatacatacataagtaaaatagcaaatccgaggaagtaagagcaaatgacagcttacccccagcattcaatcgaatatgcatagaaatagaaaccgcaaccgaaacagaaaccgaaaccaaaaggtgttgagtgcaaaaaggatgcggaatggacgtggattctggtgttccaagatgttccattcggctcctttctacgctcaggatcaaggacaagccaaatcagttaaatatcttatctagttggaaacactcactcgtacacaaacgcttgcatacttatagctgtagaaatataacccataccaatatcagtaactacacccacacccacaaccacagccacagccacaccgatcgaagatcaagtcagaattcaaaagggaaaaccaacagcagtagtatgaatacaaaaagcaacagacagaagtttcctttggcgacaatttcgaattgtttttcccataagctcgaacttgaactcgaactcaaactacaataaaaactattaagttttccactctagcctagtaagaaatgtacatttttgtctcctgtacgttcacttgtacatattataagcaaggtgccagcactagaactaacccaagcggcaagccactcctacacacacatatatatgcaaagcaaagtaacgaaataacaaaaacaaaaaacaaaaaaataataataaagaaaacgaacaaattaaataattaataattttatgtatttgtgtaagtgtcaagcagacaagacaactctaaggaagcaaaaccaaaaccaaatcaaacaaatccgaaccgaaccgaactcattcatttcgttatacgtaaatcggagagagcaagatcattgaaatcagtcagtcaaatgaaaaccgcacacaaaaacacaatgcaacgcagacactcacacactcagacagacagacaaaaggaaaacgaagtattttcataattaaaacagaaatgatatcgtgttattatttaaataaatagaatgtatataagtgaacctttgtatgtgccgaggatttctttcttaaccccccggttgtcctgctacgggaaccaggaaccaggaactgggaacgggaaacttggggctctcgattctatgattcagtgtccactttgcaatctccccccagcccattctcccccttttctccacggccccgacttgatcccgcccgactaccaaacctgtgacgccgttgagtccatgagtcgatctgtgcgagtgtctggtggtgggaccactcattctgtccactccgctccacttcatccaaaacaacaacgcacccaccccattgagcgcagaatgccgcctaaccctggcatggtcgctctcagtctcgcccctgtctcgccaaaccccccggcctaacaccagatcgctatattaatccaatgtcacccaaccttccaaccttccaccacccactacccactaaactgataacgctagttgtaaccgtaactgttaactgtcagtcgataacacgggccactcatcaccgccggtggtggagcaccactccactcagatccaatccagtccagtc

SEQ ID NO: 24131 - DNA, 637 bp, DROSOPHILA
cgatatttaaaaataaactaaactacaataacagcaacagtaacagtgcagtaactacatggctatacatacataagtaaaatagcaaatccgaggaagtaagagcaaatgacagcttacccccagcattcaatcgaatatgcatagaaatagaaaccgcaaccgaaacagaaaccgaaaccaaaaggtgttgagtgcaaaaaggatgcggaatggacgtggattctggtgttccaagatgttccattcggctcctttctacgctcaggatcaaggacaagccaaatcagttaaatatcttatctagttggaaacactcactcgtacacaaacgcttgcatacttatagctgtagaaatataacccataccaatatcagtaactacacccacacccacaaccacagccacagccacaccgatcgaagatcaagtcagaattcaaaagggaaaaccaacagcagtagtatgaatacaaaaagcaacagacagaagtttcctttggcgacaatttcgaattgtttttcccataagctcgaacttgaactcgaactcaaactacaataaaaactattaagttttccactctagcctagtaagaaatgtacatttttgtctcctgtacgttcacttgtaca

SEQ ID NO: 24132 - protein, 55 aa, DROSOPHILA
MHRNRNRNRNRNRNQKVLSAKRMRNGRGFWCSKMFHSAPFYAQDQGQAKSVKYLI

SEQ ID NO: 24133 - DNA, 6910 bp, DROSOPHILA
tcggagcgagtgagaaaactgcaggcgaagagctccacaaaactggcggtggtgggacgtattagctcgaagttcaggaagcacaggatcttcctttccacagccttgtactcgaatgccgtataggcgttcttgaccaatcggttcatttcgctgtagcgcggaataaacgcatccgtgttttcgatctgcgcagctatatgaagacaagtgatggccaccaggagcaatttgtccggacggattttgtagtaatcaacaaagcgatccatatagtagacggctggagtgaaacgagttacaatgagttgtgcacatgggttttgtgcctgcagcgaggctcctctgtacagtgctcacccaggtgcaaagcacagcgactaagcttgtgggcgctggtcgccagtttgagcaactgcagcattcttcggcgctcgttcagctgcggcgaaaggtaaaacaaaggccgacggctgagttcttgctccctcatggtcaaaaatatatcccgggcatagtcggtgagccagtgcgtcttagccaggcgctacaaattggtatttaacgaaataaagtcgggttcgcaaaagttaagcacatgtccgttcacctcgacatctgcttgcgggcaagttttcttcaatttgcggtcgacgacgaagatgttctgctcggcagccactttctgctccattgtatcgaaattgaatgcaatgccttaaatcaccgattttaaggcaagaacttaacggcggaaaaaagcaaaacaaatgaaggagaaaacaaaaggagcgcaaacatggcgctacaacggttccggccagtgctaccacactgcgaagccaaacgagcagcgttcccagactgcgcttgggagtgttaccattcgctaaaattagcacatatgtacaaatatttaaaacaagtttaatgattaattgtgttactttaattcatcaataacaagtgttttaatttaataataaactgtcatatgtgcttagttcaaatcatctgtagtattcagtgaaggcacgaatgtttccaagcaaacggggacctcatctttctgatttatcaccatttgaggcagatcacagccaaaataggcgttatttttgacacagaacaggattagctggcgccagcattcgtcgacggccagaagatggggattcccgaagatgatcatcatggcacgtgctcgggaaacggccacgttaagtcgcttgctgcaacgcacgaatcccaaggagaagcgggcatccatgcgcaggatctcttctgatgaacgcaccgtggatattagtataatgtctcgttcctggaaataacaaacgttaagtgtgcacgtaatatcgattttagttccgaccccacctgtccctgaaactcctcgacggatccaatcttcggcatgaccacgtcggtgccaatgaacatactccgaagcatcttcacctgcttctgatagggcgtgattataccgatctgatcggcagtcacattggcacggtacagggcgatggtcattaggaacacctccctgacctcttggggattgaaccaggaaggggaatcgttattttgcctgttttcgccaatgattccgtaaaagaacgtgccgtgcgcttgagggatatccttttctgactcaaatacacaccgcagtttacttagtaggcgagattcccttgaatccttttcggaaagaactgggatcagttcgtcatcgtagaatagcctgctataaatgctcataatcgacggtaatgctcggtaattgtacaacaatttggttagcactagtggattgtagccggagctttcgggaaatcgctgaagatcttttcgatacggcgaccgttccagcaatctctccagaaaggatatggaaaatcccattttcgaggcaattcgactggtgacaatagactgcagctggcgaggatcacctgagagaacaacttgagagcgtttcttcgttagcattacaatgggtaccattgtttctggttcggtgcattgaccagcttcatcgaacagcacgtgagtgaaatggcccgctggaaaccccaattgtaaaaagtttcccaaagtagtgcaggtggagatggtaatgcgatgagtacctataaacttagcttgacagcgaagcttcaatcccgattcggtgaccatcatctatagcaaatatcaacaaagccaagattaattggtgtccaatccaaatgataaaatttttctactcactttgtcctcgcaactgcccacagcaccgacatcacttgtggcgcagtagctcattatttccggaggaatcaagtctttctccacttgattgtacgaaacgaggcgaatgaaatctccctggagcaaagctttgctatcgatgagcctctttgtcaccaaatccgctgagctgttcgacggcgttcccaccaagattcgggcaccaggcagattcctaaccaactggagtagtgtctcaataagtgtcattgtttttccactgcccggaggcccaaacagcacataaggaatgttctccgcttcaccgcgcagtatattgaaaacagcacgtttttggatggaattaagcgactgattataccactctaatttcgaatcgtacaagtacatgtcgtcatccttcatataaacatccagctggggattctcgcgcttggttactttgctgggaaacaagaaatcctcgcccattactcctacaattttggagatggcatggtgttgcttgcgaaaactgtagcgtgagaaatagaactctagtcgatagtcctcgccattatatttctcctggaaactggaatggaatttgagtaaaatgcgatcgaagagcaccttatggataatgccctcgtatgacttggtggtctgggaatcgggatccgaccagggattaatgactcgcagtgtatcgccaatgaccagcgacggtcgacgctcggctagattctcgatctgcagcgtgaggaactctccgtcacgcagaaagtgtgctcggtctctgtcgtagttgcgaaagttgacgaagcactcgatctcctcgaggtgtaggagcaatctgaaacggtgcatataggttttaatgcttaggggttccgtgaggaatgaatagtgctgctcgatggccttgatcatctcttgtcgccgttcactagtcaaacaaatttggcgcaattctttgggcaccttaaaagaacggtagtattaaaaataagcatattttttaatgagaggactccttacttcaaagcaacccaaacgcagagcaacaaatctgcgcttggtaacaatttgttgtcccgggattacatccaccttgttgcaccaaacttggttggcatagaaccgggacctctcctggctgttacgaccgggtgccatcaaagcttcagctgctatcatacgtttctcagcttcagcgacttcctccttggttttgcacacgatcaccgtgaagacgcgcctcaccttgagtagatcgaaattcagcacgtacttttcgattgcttcccccaggaactgcgtatggatctcaaaggtcaccgttatttcggagccgctggatatttcctttgattcgagagggctgaccacgctcaactgagactcactgtcattgcagacggtgatgctctccaggcgcaaagtgcggtttagattgttggtcagctttaaagatacgctctccttttgccagagctctgcggtgatgaaacgatttacaccagtcaccgtcactgcttttccactgccggatgatcccatactgctctgctgagtcagcttggtagccccaaaatttttctccagcggagtaatcttaatggcgcgtctcgtaaatttggactggggaattaaaacacacgtataaagaagaaaatcgcaagattttatgttccttctttaacttacatactggcactcgatgagatcggcgagcacaatgtcgcccagatgaagatccgtgcctgtaggcaagtctgtctttaaaatgtaggtttccggacccagcacaaccatgtgcacgtacacgcgctccacaatgcacttttcaccttcctgaatgcgggtgggaaacaactttgtcacctctaggatttctccctgtttgtccacgaaaccgtcatccagctgaatgttgcactctaggcgcactcgatctccattcgttgggatgaagttcatctcgatattgtctagctcgacggtcagctgtccgtattccgtttcgacgtctatggaagatgccagacgctggctaatcagacccaaaacgctccttgtttcggtgttaaagaatgtcggcttttcgttcttcaggttgtctacagctttttcaatctaatagaagttaggattacagatattaagcattggctttaacaaatggctaataaatctaataccgatgagcttacctccttttggcttgtgtcctcccaggaatgctcaaggatactcttcaccttgaccacccgcatggcttcccccgttgtaaaagtcaaatattccactacacatccgacgtgtagatccaagatgatatcctctgccaccttcgtttcgaataaaacgtctttgtcgatgactccccgatcgccgtctagactggtgatcactccctttctggcggtgcaggaactttctttactcacgtccatttccgaaagtccatgcgtaagctcagcgatcttgttacttaaaaccccattaatttcgtttggattcgccttaagctgttgatccatcttctcctccattagtttttggtctaaaaagctattctcccgatccaaactttccagaatatcctcccggttacgatccgggttcgtgaaaaacttgctaacgtatgtgaacatttttgaaaatgtttcgccgataaatgctctgccgttcctactgcgctgctttcttgtcgagactctcgtacatccagtcggtttcgctgagatagctcaattccttgcgcagattctgcagacgcttcaagtggttctccgtcgtctccgccgccttcccgccctcggtggtttcgctctgcgattccgccttgtcagctccgatctcgggtttcttagcctggaaatgtggaccatctgtattgtaaacatttgagaacatacaatgttaccttctatgacaccgaaggcttaaatatcctacaattttcatttaacaacattttgttgttttacttctacggacaatttttgaaatatttagagaatatttatttataaatttaaatgtatttataagagcatatataaaataaaaaaattaacatttgtatacattttctgtatgttttgtaacggaaaattaaaaactttgtgttagggttcttgaattcaatagtgatttgttttttagtctaggctgttaaaataactgcaaaaaagcaacagtttgaatggagaaaaagcaaacgaaagtctcaagaaaagcgacagcaacagttactcctgcactgctttcgtctccttctaccacgccaaaacaaggatggcaacaacaacaaactcatacctctgtttcactggattcaacgggaatattggtggccgtaccgcttgtagatgcttcttctttgatggttatacttccggatgcttcgctggacattgtccaatcacgcggatttaccttggttatcaagctgtggaccaaatatgtgagttccttaccggctttttgcaaatgcacagccggatttgctatttgtactcgtacttacaaatattcttaacgctgttgaattagtagatgcactgcactttgagttttaagagttcaatgggaaatagtcatagtattcgaaaaaactctcgagcaaaattttgagcacaaagcgtcttggcgaacttttaagtgtgaccggacttagcggcgtagaaaatatccttggctgtggtattttcttaaagtgtgtcaaattaaagcggtggaatatgaaacgtgaggaagttgcttatgtatttatattttccttatttaaaaaaagttctcaaaaataaaatgaaacaaaaatgtaaagtaaagaactcaagaaagtatataaaatatcggcagtccacatttaagtttttgtttttggaatttacctcctcacaaaaataatacacacgaagaacttgttcttattcttttatctttttttcaagagtacctgttagttatctgtcacttacatttaagaaataagcaatcaaattccaaaatatgccaaatatctttccgcaatccggaaagtttttcgagtatatgtgtaaaaaagtccatagatggtttctttctccataaataccctagtgatcgatattatttaagagtatgttcaatacttttcgcagttgaaataatttaccaattaggaaaaccaataaaaccaactgccctatgtctgatgagtaagaaactgagcaccagaggcgataaatggttcccgtaaacagcgcacgccagcgccgaggccgcgattctattgaaaaaggtgtatatatatttaatatatctttatgtacaactatagactcaaaacaaaaataccccgctcaactggatattacagggtataatcgataaccttagctcagccattgtgattttcagcaatccactcgcacggtcacactgcctgtccaaccctcccgcaccgtactactcgacaacgtgcttgtgtgcagaatttcctcggctaaataaaaccaaaaattggcaaagcgccgtgtcagatctagccgtcgattgcacaattccggagcaggacgtcgtcgctggagccaccgaagcggagtcaccatcagaagatcaccagcaccaggagaacccagtggacagtcctcctctttttcttggctgccgaggcgtcgcgtgt

SEQ ID NO: 24134 - DNA, 3999 bp, DROSOPHILA
tcacacttaaaagttcgccaagacgctttgtgctcaaaattttgctcgagagttttttcgaatactatgactatttcccattgaactcttaaaactcaaagtgcagtgcatctactaattcaacagcgttaagaatatttcttgataaccaaggtaaatccgcgtgattggacaatgtccagcgaagcatccggaagtataaccatcaaagaagaagcatctacaagcggtacggccaccaatattcccgttgaatccagtgaaacagaggctaagaaacccgagatcggagctgacaaggcggaatcgcagagcgaaaccaccgagggcgggaaggcggcggagacgacggagaaccacttgaagcgtctgcagaatctgcgcaaggaattgagctatctcagcgaaaccgactggatgtacgagagtctcgacaagaaagcagcgcacaagtttttcacgaacccggatcgtaaccgggaggatattctggaaagtttggatcgggagaatagctttttagaccaaaaactaatggaggagaagatggatcaacagcttaaggcgaatccaaacgaaattaatggggttttaagtaacaagatcgctgagcttacgcatggactttcggaaatggacgtgagtaaagaaagttcctgcaccgccagaaagggagtgatcaccagtctagacggcgatcggggagtcatcgacaaagacgttttattcgaaacgaaggtggcagaggatatcatcttggatctacacgtcggatgtgtagtggaatatttgacttttacaacgggggaagccatgcgggtggtcaaggtgaagagtatccttgagcattcctgggaggacacaagccaaaaggagattgaaaaagctgtagacaacctgaagaacgaaaagccgacattctttaacaccgaaacaaggagcgttttgggtctgattagccagcgtctggcatcttccatagacgtcgaaacggaatacggacagctgaccgtcgagctagacaatatcgagatgaacttcatcccaacgaatggagatcgagtgcgcctagagtgcaacattcagctggatgacggtttcgtggacaaacagggagaaatcctagaggtgacaaagttgtttcccacccgcattcaggaaggtgaaaagtgcattgtggagcgcgtgtacgtgcacatggttgtgctgggtccggaaacctacattttaaagacagacttgcctacaggcacggatcttcatctgggcgacattgtgctcgccgatctcatcgagtgccagtattccaaatttacgagacgcgccattaagattactccgctggagaaaaattttggggctaccaagctgactcagcagagcagtatgggatcatccggcagtggaaaagcagtgacggtgactggtgtaaatcgtttcatcaccgcagagctctggcaaaaggagagcgtatctttaaagctgaccaacaatctaaaccgcactttgcgcctggagagcatcaccgtctgcaatgacagtgagtctcagttgagcgtggtcagccctctcgaatcaaaggaaatatccagcggctccgaaataacggtgacctttgagatccatacgcagttcctgggggaagcaatcgaaaagtacgtgctgaatttcgatctactcaaggtgaggcgcgtcttcacggtgatcgtgtgcaaaaccaaggaggaagtcgctgaagctgagaaacgtatgatagcagctgaagctttgatggcacccggtcgtaacagccaggagaggtcccggttctatgccaaccaagtttggtgcaacaaggtggatgtaatcccgggacaacaaattgttaccaagcgcagatttgttgctctgcgtttgggttgctttgaagtgcccaaagaattgcgccaaatttgtttgactagtgaacggcgacaagagatgatcaaggccatcgagcagcactattcattcctcacggaacccctaagcattaaaacctatatgcaccgtttcagattgctcctacacctcgaggagatcgagtgcttcgtcaactttcgcaactacgacagagaccgagcacactttctgcgtgacggagagttcctcacgctgcagatcgagaatctagccgagcgtcgaccgtcgctggtcattggcgatacactgcgagtcattaatccctggtcggatcccgattcccagaccaccaagtcatacgagggcattatccataaggtgctcttcgatcgcattttactcaaattccattccagtttccaggagaaatataatggcgaggactatcgactagagttctatttctcacgctacagttttcgcaagcaacaccatgccatctccaaaattgtaggagtaatgggcgaggatttcttgtttcccagcaaagtaaccaagcgcgagaatccccagctggatgtttatatgaaggatgacgacatgtacttgtacgattcgaaattagagtggtataatcagtcgcttaattccatccaaaaacgtgctgttttcaatatactgcgcggtgaagcggagaacattccttatgtgctgtttgggcctccgggcagtggaaaaacaatgacacttattgagacactactccagttggttaggaatctgcctggtgcccgaatcttggtgggaacgccgtcgaacagctcagcggatttggtgacaaagaggctcatcgatagcaaagctttgctccagggagatttcattcgcctcgtttcgtacaatcaagtggagaaagacttgattcctccggaaataatgagctactgcgccacaagtgatgtcggtgctgtgggcagttgcgaggacaaaatgatggtcaccgaatcgggattgaagcttcgctgtcaagctaagtttataggtactcatcgcattaccatctccacctgcactactttgggaaactttttacaattggggtttccagcgggccatttcactcacgtgctgttcgatgaagctggtcaatgcaccgaaccagaaacaatggtacccattgtaatgctaacgaagaaacgctctcaagttgttctctcaggtgatcctcgccagctgcagtctattgtcaccagtcgaattgcctcgaaaatgggattttccatatcctttctggagagattgctggaacggtcgccgtatcgaaaagatcttcagcgatttcccgaaagctccggctacaatccactagtgctaaccaaattgttgtacaattaccgagcattaccgtcgattatgagcatttatagcaggctattctacgatgacgaactgatcccagttctttccgaaaaggattcaagggaatctcgcctactaagtaaactgcggtgtgtatttgagtcagaaaaggatatccctcaagcgcacggcacgttcttttacggaatcattggcgaaaacaggcaaaataacgattccccttcctggttcaatccccaagaggtcagggaggtgttcctaatgaccatcgccctgtaccgtgccaatgtgactgccgatcagatcggtataatcacgccctatcagaagcaggtgaagatgcttcggagtatgttcattggcaccgacgtggtcatgccgaagattggatccgtcgaggagtttcagggacaggaacgagacattatactaatatccacggtgcgttcatcagaagagatcctgcgcatggatgcccgcttctccttgggattcgtgcgttgcagcaagcgacttaacgtggccgtttcccgagcacgtgccatgatgatcatcttcgggaatccccatcttctggccgtcgacgaatgctggcgccagctaatcctgttctgtgtcaaaaataacgcctattttggctgtgatctgcctcaaatggtgataaatcagaaagatgaggtccccgtttgcttggaaacattcgtgccttcactgaatactacagatgatttgaactaa

SEQ ID NO: 24135 - protein, 1274 aa, DROSOPHILA
MSSEASGSITIKEEASTSGTATNIPVESSETEAKKPEIGADKAESQSETTEGGKAAETTENHLKRLQNLRKELSYLSETDWMYESLDKKAAHKFFTNPDRNREDILESLDRENSFLDQKLMEEKMDQQLKANPNEINGVLSNKIAELTHGLSEMDVSKESSCTARKGVITSLDGDRGVIDKDVLFETKVAEDIILDLHVGCVVEYLTFTTGEAMRVVKVKSILEHSWEDTSQKEIEKAVDNLKNEKPTFFNTETRSVLGLISQRLASSIDVETEYGQLTVELDNIEMNFIPTNGDRVRLECNIQLDDGFVDKQGEILEVTKLFPTRIQEGEKCIVERVYVHMVVLGPETYILKTDLPTGTDLHLGDIVLADLIECQYSKFTRRAIKITPLEKNFGATKLTQQSSMGSSGSGKAVTVTGVNRFITAELWQKESVSLKLTNNLNRTLRLESITVCNDSESQLSVVSPLESKEISSGSEITVTFEIHTQFLGEAIEKYVLNFDLLKVRRVFTVIVCKTKEEVAEAEKRMIAAEALMAPGRNSQERSRFYANQVWCNKVDVIPGQQIVTKRRFVALRLGCFEVPKELRQICLTSERRQEMIKAIEQHYSFLTEPLSIKTYMHRFRLLLHLEEIECFVNFRNYDRDRAHFLRDGEFLTLQIENLAERRPSLVIGDTLRVINPWSDPDSQTTKSYEGIIHKVLFDRILLKFHSSFQEKYNGEDYRLEFYFSRYSFRKQHHAISKIVGVMGEDFLFPSKVTKRENPQLDVYMKDDDMYLYDSKLEWYNQSLNSIQKRAVFNILRGEAENIPYVLFGPPGSGKTMTLIETLLQLVRNLPGARILVGTPSNSSADLVTKRLIDSKALLQGDFIRLVSYNQVEKDLIPPEIMSYCATSDVGAVGSCEDKMMVTESGLKLRCQAKFIGTHRITISTCTTLGNFLQLGFPAGHFTHVLFDEAGQCTEPETMVPIVMLTKKRSQVVLSGDPRQLQSIVTSRIASKMGFSISFLERLLERSPYRKDLQRFPESSGYNPLVLTKLLYNYRALPSIMSIYSRLFYDDELIPVLSEKDSRESRLLSKLRCVFESEKDIPQAHGTFFYGIIGENRQNNDSPSWFNPQEVREVFLMTIALYRANVTADQIGIITPYQKQVKMLRSMFIGTDVVMPKIGSVEEFQGQERDIILISTVRSSEEILRMDARFSLGFVRCSKRLNVAVSRARAMMIIFGNPHLLAVDECWRQLILFCVKNNAYFGCDLPQMVINQKDEVPVCLETFVPSLNTTDDLN

SEQ ID NO: 24136 - DNA, 2678 bp, DROSOPHILA
cgttctgatggtgggcaaggccctgggtctagaatttaataagaagataatcaatacgctgaaaggggagcaaatgaatcccgatttcatcaagatcaacccgcagcactcgattcccacgctggtagacaatggtttcaccatttgggagtcgcgtgccattctcgtttacctggtggaaaagtacggaaaggatgacgcgctgtaccccaaggatattcagaagcaggcggtgatcaatcaacgcctttacttcgacatggcgttgatgtatcccaccctggccaactactactacaaagcatttaccaccggtcagtttggcagcgaggaggactacaaaaaggtccaggagactttcgatttcctaaacacattcctggagggtcaggactacgtggctggggaccagtataccgtcgccgacattgccattctcgccaatgtctccaatttcgatgttgtgggattcgacattagcaaatatccgaatgtggcccgatggtacgaccatgtcaagaagattacccctggatgggaagaaaactgggcaggagctctggatgtaaagaagaggatcgaggagaaacagaatgctgctaaataattcatttataacgattttattatcattttattatttatttattttattagttgccacagatattgaataaagtgagaagactttacttagaatctgtttttaaagagaatttgttgctaagtgccaaagcattcaagctaatggcaataattgcattatcagagcaatgattagaggttattaaacttttgccgagtatttatagaacaccagtttttttttttttttttgatttgacgctcaacaattctgcatacgattaacaaattacgatgacgagttgtttcccaattattgtatatcgatcaaatcaggaagatagtacatttcgaaatatcgctatataagtgagaaccattgctggtcgcaatcagttttgctcttccgcttcagcgaataggcaaccgtaatcgccccagcaacatggatttctactactcccctcgaagcagtggatcccgcaccattatcatggttgccaaagctcttggactggaactgaacaaaaagcaactgcgtatcacagaaggggaacacctcaagccagaattccttaagctcaatccccagcacaccattcccacgctggtggacaatggattcgccatttgggagtcccgtgccatagccgtctatctggtggaaaagtacggcaaggacgactccctttttcccaatgatccccagaaacgcgcattgatcaatcagcgattgtacttcgatatgggaaccctgcatgactcctttatgaagtactattacccattcatccgtactggtcagcttgggaatgccgagaattataagaaggtcgaagctgcctttgaattcctggacattttcttggagggccaggactacgtggctggtagccagctaactgtggccgacatcgccatcctctccagcgtttccactttcgaagtggttgagtttgacatcagcaagtatccaaatgtggcacgttggtacgccaatgccaaaaagatcacacccggatgggatgaaaactggaagggtctgctacaaatgaaaacaatgtacgaagcccaaaaggcctcattaaagtaactacagtttttataaacttatatgaaaaaaaaacgttttgtttgtttatgtttaatacttatgtaaaactataatcagattaatattcataaacaaatgataagtttggcaacagagttctttgtgccaatcttattcagttgttgttcttcctcctagagaattatacatacgttaatgccaaggactatccggctgtctataaaaatcgtttttaataagaagcattgggtacttaaaaaagagcaccttaaggtggagtttctttacccaagccctaaaaatccttattaagaatgtattttgaaatgtgaatctcgtgctattcctgtctatttagcggagaaatattagaaaatatatggaacccgttatcactaggatccaaaaatgaaatatataaaaagaaattacgtacgggatagtcatcacctcacagtcacctcgatacactcgatggtctcgaattcgacaaatgtggccaagtcgtacaataatgcatatatctggtaaaggaatcaactgtaatagtgcattgaagctgaataaagtttataagaccgtagccaaataactcccttaaaatagataatataaaaaattgttaaataaatatgttattgtaaagcagctgtgtagttctgtgacgatcggtcacactgaagataagcgtagagggacaataacccttaaaatagataatataaaatattgttaaataaatatgtatgtattgtaaagcagctgtgtagttctgtaacaatcggtcccactaaagataagcgtagagggacagactatttcaccacgacatttaatcacataccaacgaaacgtcgagcaaacaattatattcatatacgtgagttatctttcagttgtattgatataaaaaggaaggcgatctattatcccaatcagttctggtcttgccatccatcgaacaacactcaaataaccgaaatggatttctattactcgccccgtggaagtggatgtc

SEQ ID NO: 24137 - DNA, 678 bp, DROSOPHILA
cgaataggcaaccgtaatcgccccagcaacatggatttctactactcccctcgaagcagtggatcccgcaccattatcatggttgccaaagctcttggactggaactgaacaaaaagcaactgcgtatcacagaaggggaacacctcaagccagaattccttaagctcaatccccagcacaccattcccacgctggtggacaatggattcgccatttgggagtcccgtgccatagccgtctatctggtggaaaagtacggcaaggacgactccctttttcccaatgatccccagaaacgcgcattgatcaatcagcgattgtacttcgatatgggaaccctgcatgactcctttatgaagtactattacccattcatccgtactggtcagcttgggaatgccgagaattataagaaggtcgaagctgcctttgaattcctggacattttcttggagggccaggactacgtggctggtagccagctaactgtggccgacatcgccatcctctccagcgtttccactttcgaagtggttgagtttgacatcagcaagtatccaaatgtggcacgttggtacgccaatgccaaaaagatcacacccggatgggatgaaaactggaagggtctgctacaaatgaaaacaatgtacgaagcccaaaaggcctcattaaagtaa

SEQ ID NO: 24138 - protein, 215 aa, DROSOPHILA
MDFYYSPRSSGSRTIIMVAKALGLELNKKQLRITEGEHLKPEFLKLNPQHTIPTLVDNGFAIWESRAIAVYLVEKYGKDDSLFPNDPQKRALINQRLYFDMGTLHDSFMKYYYPFIRTGQLGNAENYKKVEAAFEFLDIFLEGQDYVAGSQLTVADIAILSSVSTFEVVEFDISKYPNVARWYANAKKITPGWDENWKGLLQMKTMYEAQKASLK

SEQ ID NO: 24139 - DNA, 4779 bp, DROSOPHILA
gattgcatgtgcataatgtttggtttgtagtgtaactcgttcgtatctcgtatgtatatatgtacaatcggttgttatatagactaatgcccctatttacacctacgaagtagtaacaagcgtatagtgtacagatcagtttgaaatactcaaaatcacgcgttctcagaccgtcaggggtttggttggtaactggctcatgcatgcattcgccgccaccagaaactcgacgggtcctaaaaaggtatcttagcaggagaacagttagtaaaattaagtagaattccttctctgccataactccacacatatgcacataacatataagcttagacatgctaaagaaaaccgtcaaaatctaggctcaaacgtatcaagccatcgacaaaattaaccgcttccgttttcaatccgacccgtttccggttcgttctcttcagaaagcataaaataaaacacgaagagcacaacgaaccggaaaccacgatcggaatagccaacgtagtggcaaaacctaaatctgaacttgaaacggcacacgcatttatctttacctttataattacacacatatgtattcgagtattcaactatataacgctttacctctactctctgctagcaattaattaaaatttatccaattcaggaagttcctagtgctaaattagagcattcaagcattactatctaccgtgttttattttaaaaatctccctctatcctgtcctcctgaagtccgctctccctgttccctctgccactgaacttgtcgccccgcaagggagtcgattcaagtgacaatctaccatgtatcttcaccccttaacttgcacttttattttcatacttcctgaacaaaccacaaaagcaatataaatataaatatcaatatcaataccaataccaataccaataccaaaaccaataaataagccttaaccagttcaaattgataagaccccacagccctatcaaccacgccagtccgaccgctctaatgcccttcttttttatctcctgtgcaggaccgcacagcatcacccgctccgcagctacctcgcccaccagttctacctcatcgccaccctcgccgcccacagccctgatctcgccgaccagttcgctgaaggggagtctggccgccgccgtctacagcctacacagtcacgcccacggccatgtccttgggcacgccacctcgccgccgcgtcctggcagcgtgggcagcagtgtgggcagcaatctctgcacctccacctccatgggttgtggtgtcaactctggcaacaacagtggcaacaacaacggtaacaacgcgaacaacaacagcaacaacggcaacgccactaacaacaacaacaacagcagcagcagcagcacgagtcctggcagccaggcgacggcagcaggaggaaccgtgacccaagcgggcacgcctccgctaccgctccgcatgccaccgcccaccagcggcggcataaacgagccgcaggagtgcccctactgccggaggaccttctcgtgctactactcgctgaagcggcacttccaggacaagcacgagcagtcggacacgctgtatgtgtgcgagttttgccaccggcggtatcgcaccaagaactcgctgaccacgcacaagagcctgcagcatcgcggctctagcggcatgctgaagcggctgcttaagacgaccgccatcaagcacggactggtgggccacggacatgggcacggacatgtccatcacccgcatgcgcaccaccacgccctgtcccatccgcgcactagtctgtatgacttcaccagcgagctgggacagccgccaccgggcatccaataggagctaagttggaacgccatcttttagagaacgaaggagagctggtcagtcagccagtcagtccatccatcggttggatgaccagtgagaagcagcagccaagaccagctacaaatactttgcccattgttttcgcactggaccgacgatcccccatcgctcatcgctcaacgcccatccgccaggaggggggatctagatctccagcgtgaactaggtcttagctaattaatgattaagcatattaggcatattttggcgtcaactgttttattactcttatccctatgttaggtaattattacgattatttttttgtgtatccttaactctattcgtactattaattatttgtgctgctctcacctacttagtagttgaagcaccttcgctgcttcatgtgcaatacctcaagaatcgtgtaaataatttcgataaatcttaaatacctctggaagctgctgcacgagcaggccaataccacacacatacttacatgcatgcatacatataaaacacacaatacaaacagcgtgaagttgcgtttaaagaatacttattagatttagacttatgttaccattaatgacaacaacaaatgggaagagaacgaaggactagaacacactcacacacacacaaacactcacacaaccataaccacaaccaaaagcacacacacacacgcgcgcacatgctgggggtcgtgacacgagggcgggagcggttggagcaataacggtacatatcatgcaactgcaattgcaaatgaatctgaatctgcagccaaaacttaatttaaaactaaagagaaactaaagctgcatccgaaatagcaaccgaatcttaagtagaatctaagccacctgtcgggcgctaccggtactcagccgccgcccccgcacttccagcataaatatatgttgttgtcgttgttttcgttacaaacaaacacacacacacacacataggccagaaacaacaaacaatcatacaatgtacactcaacggtttttttttttaatagttttatgcgcattaaacttattttatttgccaactgctgcgcctaacgtgcgttctctaaagagtcggattccagtaagaaaagataaaggtcctacggatcggcggcagattagattgtataagatgtgtgtattttttttttttttcgagggagccgtaattgtaaatgtagctcatatatataagactagagtaagcttaattcaaatctaatgtttaaagtcggcggggcacggagaagacaaacgtgcagaagcgaaacacaagagacaaacaaaatcaaccaacaaacaaaagaaaaacgttatcagggataaaatatcaagtatgcagtaggaaagtaattttttctacttattcacgaatacgacgaataaagtaacagaaattaaaatcacttttttatatacacatacatatacacacgcgagcgtataaacgataaatgtgcatatgcgtatgcgcaagctaagcgaaacaactaaactaatgtctatgtatacatgtatatactttacaccatttaccatatacaatttataagccgatatgccgatgatatacacatatacaatgttagtttggtgtatagaagacagatgagctgtaaacgtttttgcaaatcaagaaaataacgtatttaacaaaaccgcaaagtaactcagtgatttttaccagcgaagtacaaatgttctgaaattaaattaactaacaagtaataagcgccgacgagcagatcagcaaatcgaagtagctagcgacgggagtattcagagcagaatcataaagggaatagggccgcagttagcactgccccaaaatagtgtctgatcatgttgcatgcaaccaggaggggcaggcaaacatgcaacaaccaccaagcccagactggaagtgaaaaaaaaaaaaacaaaaagaaaaagaaaaacacccactaggatctgtgttaagaaaatgtttaagtcaaaagtacgaagaatgtgtatcaattcaatgtctcaggaatttcttaaaatttaaccaatttacaccttatactatagaacacattgcaggaacgtctggaaagacagacagctaacaacaaactcttccaaaccaacacacctccaatggtgctgcatatcatcatctcatcatcaagtgcgagttttccgaattcttgtcaaaaaaaaaaaaataaaataaataaataaacaagtaataataaaaaatagttataggggcactaacacgtaccgattgcagtaaagcagtaggaatagtaactgtcgtaggagagtaattagtattctttgtgccatgctaccctgaatcaatagccccacgaacggggattggaagcctagcaggcagtctaataacgaactaggcattggtgaccagcgatcactggtcagcatgaggtttccttatcagcgtacaagcaaagatccatccagattaagctacataatgcactcatacatatgcaaatggcacatatgcaacatgtgtcacatatggggcatattggtaggcacgttctcagcttatcggagcatgagttcaagggcagtccgctccgtagatccgacataggcttaattaatttattcaacctcacagctacagataacagataccagatacataaggttggggaggttagaagggaggtgaggataggtggagtcgaagggaacggataagctgtgtggcacttttgctttcccaagttgaggattctaggagtcccatttgcattatagcttagaattaattacgttccgcttacacttactttacactatttatgatattttttttttttctaattttagaacctaattttagatgttttttatactttattacgctgaacttggacggaattacagtttatgctagtatttagttggttacac

SEQ ID NO: 24140 - DNA, 1180 bp, DROSOPHILA
atgcccttcttttttatctcctgtgcaggaccgcacagcatcacccgctccgcagctacctcgcccaccagttctacctcatcgccaccctcgccgcccacagccctgatctcgccgaccagttcgctgaaggggagtctggccgccgccgtctacagcctacacagtcacgcccacggccatgtccttgggcacgccacctcgccgccgcgtcctggcagcgtgggcagcagtgtgggcagcaatctctgcacctccacctccatgggttgtggtgtcaactctggcaacaacagtggcaacaacaacggtaacaacgcgaacaacaacagcaacaacggcaacgccactaacaacaacaacaacagcagcagcagcagcacgagtcctggcagccaggcgacggcagcaggaggaaccgtgacccaagcgggcacgcctccgctaccgctccgcatgccaccgcccaccagcggcggcataaacgagccgcaggagtgcccctactgccggaggaccttctcgtgctactactcgctgaagcggcacttccaggacaagcacgagcagtcggacacgctgtatgtgtgcgagttttgccaccggcggtatcgcaccaagaactcgctgaccacgcacaagagcctgcagcatcgcggctctagcggcatgctgaagcggctgcttaagacgaccgccatcaagcacggactggtgggccacggacatgggcacggacatgtccatcacccgcatgcgcaccaccacgccctgtcccatccgcgcactagtctgtatgacttcaccagcgagctgggacagccgccaccgggcatccaataggagctaagttggaacgccatcttttagagaacgaaggagagctggtcagtcagccagtcagtccatccatcggttggatgaccagtgagaagcagcagccaagaccagctacaaatactttgcccattgttttcgcactggaccgacgatcccccatcgctcatcgctcaacgcccatccgccaggaggggggatctagatctccagcgtgaactaggtcttagctaattaatgattaagcatattaggcatattttggcgtcaactgttttattactcttatccctatgttaggtaattattacgattatttttttgtgtatcctgaaaaaaaaaa

SEQ ID NO: 24141 - protein, 280 aa, DROSOPHILA
MPFFFISCAGPHSITRSAATSPTSSTSSPPSPPTALISPTSSLKGSLAAAVYSLHSHAHGHVLGHATSPPRPGSVGSSVGSNLCTSTSMGCGVNSGNNSGNNNGNNANNNSNNGNATNNNNNSSSSSTSPGSQATAAGGTVTQAGTPPLPLRMPPPTSGGINEPQECPYCRRTFSCYYSLKRHFQDKHEQSDTLYVCEFCHRRYRTKNSLTTHKSLQHRGSSGMLKRLLKTTAIKHGLVGHGHGHGHVHHPHAHHHALSHPRTSLYDFTSELGQPPPGIQ

SEQ ID NO: 24142 - DNA, 10031 bp, DROSOPHILA
gttttcctatcttaaagactttatctgtaaactaatgttccagtctattctatgcacttatgcttattaatcaagggatcaaagtttaaatcattaaaaaacacggtctgaagtaaatatatttagtttgaattgtcattttctattttttaattttgcgccaatttctattattttaaatattgatttgtttaggtttgtaaaaatgtcgtataaaatatgcaattaatcgaagtttttagttaatgaagaaaggacttgcaatagataagcataagaacaaaagagatatatcttatttcattacatattgcacctggtataagacacataggttaataagttatgaaatttaagtgcctagcctaagtccgatccgagttcaaaagtttaagtactccaataatatcctaaactcaaaatgattcctacaaaaaaaaaacagatatatcaagcaaacagtttgcattattagccacacagataactcaattctatacctatttatatatatgtgaactttaagggcttgaaaatgatttttattgcaaagatttataccaaaacatttagttttagtgaaaaatgcaatatatttactttctgctccaaaattgtgctttttggattaaatccgaatcaaaaatgtaaatgcgttcgatatagtaagagcttatcagagcactatataagtgacttcgttaaatttttaaaaatagtctatagaatcgcacctacttgaaaattatagtacttaagctactttaaactttatagaccagatgcccttagcctcctttttaattggtaaataacacaaaaaccactctatctttttatcagtgtaatatctgctatattgtgttaagtttttgttgatagtttcttggaaaacgtagagaaaaatattttgtaaatttttaagtttaactgataccaaagatttattttgaaacttgaatgttactctccatagactacatactagtatttaagtacgttcactattttcgctgcacagtaaatgtcatttatttgtgtcttaaactaagaggattaaagaaagatttgtagaaaatattaagatttgtattagttgagagtttcctctcgggtagtaactttttagttctgactaacaacagtccgttgatgaatggcagttaattggtttgacctctagccgagcttctcctttagcttttcccagaacgacggctctgaagtggcttccacctccacctgttggaagagtaccatcattgagtttccaatgtcaaatcccctcgtgaatgcttaccttcgttgcttgctgcagaggttgactcctgctgttgctgctgctgctgtgaccctgcgtctggtcgaagtggaggtcatcctcgacctgaacctgctgctgctggccgagatcctctgcctgctggttccagtccgtgtcctcgacttgcgtctgctgtccaaggtcctctagcttttcgttccatcccagctcctcaatttgctgctgctggccgagatccacttcctgttgcaatggctcgtccccagaagcccggttccactttcctaagcttgcgcttgcactggctgaggagccggtgggtccaccgctagccgaggcggaggctgagccaactggcacgttgaaggtgtagtcctggcgccggtactcgaaaccaccagacggtccaccacgggaatagggaagcggaggctttggcgtagacacaatgggtgcgggattcgggggtctgggacgagcggtctcgccctccagtcccggctcgtcaccctcgacaaaggattcatcgtaagtgtggggcggctggtcaccgcgatccttggagaatattggtttgtagacagcagtggcattggtgcttcctgcatccaccacataaccgccattggagccgctgtccgcgggcaggtcaatgagtccctggctcagcaggtagagtgtgcggcgccaggcgaccagctcttggccgaacttgccatagcgactctggaggcgactcagagtccactgatgacgcttctcccacttctgggcctcagcggcggacagtagctggcggtgattgatgtacgccagctggcgaagctcaccctcacggaattgctgcagatcgctctgcgacatgccgtagtacctggccaactggttgatacgggcgagctcctttttctgccaatccgaaagctgctgcaccgagatctcgtatctcttcgcgaattccgccagcaatttggagtcctggatctgccaggtcttcagctccgtctgcgtcatgttctgattgccgatgaactcgtacaggcggtcacgttcacgctgctgccaggtggtcaggtggtttaggcgacgctgctccaacaactgttcacgcgccaagttaccgatgaatatgcgttggacgggcgccaactgctcgaggccaacctgataggactgggccagttgcgtctggaagctcgtgtcctgcgagatgaaatcgagtagctcctgctcggtgattaccacacccttgaccacttcgcgcagacgctttcgctcctggtcgtgccagttgttcgcctgtcgtccattgtctacgatcaaacccatgtccgaaaatcgtcgcagctggctgagaatgaactgccgcagctcctcgacggtgatttggtactgtgaggctcggacgtggacgtcacggaatagtcggttctccagagcctgcctactgatacccggattgttcacgatcgccaggtagatgcgttgcgattcaatgttctgccaggagatgcctgaaccacgatcgattctgcgctgctccagcagtcggttgagctcgtccttgtaccacaccttcaactcttccacggtgacatggtactgggcgactgcatcctgcaagtgcttctggtcattgttcagccggagctccagctcctcgatggtccatctctgctgcttgcgcagctgctggttgatcaggttgtcgatgtgcaatcgctccttggcttgccactcagtggtgaccaggccctcgttcttggcgctctggtccagccacaggtggatgtcctcgatggtcacatggtactggcgtgcgatctgctcaaagatcggcttgttgcggatcaggtagctctcgaactcctgccgggtgaagggtcgctgacgggtcacgctgcgcagacgcgtcaccaactcgttcttccaggaatcagtctggtcaccgacccatatgttgctaatatcctcgtacttcaagttgttctctggtcgttcaatcactccgatgagcgaaagtcgggcggcttccttttgaacctgaaatgttaaagataataatgtaatctttagatttctaccaatgccaatttagaaagtgatctagccttacccatttctcgacctgctccacagtgacatggtagtcggtggcgatgccatccatgcgctgcttatcgcgcttgaggaagtccacgaagtcctggtagctggctccattgcgctgttgctccagccagttgttgaatccgttgctgatcttctgctgccactgggtctgctgctcgatctggacgaggcctgagctctgcaaacgacgcaactcctcccgcagccagtggtccacatggtcgatgtccacgtgatgcgtttgggaaaggctctggaggcgtgcgtgatcctgggtgagctctcgctccacctgctcgtagggcatctcttgctgcttcttcaagagcatctctatcaggcgctgctgctcctccacctgccatttgctcagattctcaaccttagcctgacctgtggtgcgcaggttgatcagttgctggcgaagccactcctcaatctccacaacgttaacggaatactggttggccagcttttgcaggcggtcgcgttcctggttcagttccatctcgaactccacgaaggtcaaatggttctgctgcttgaccaagttctgcaggcgctccaactcggacacctgccaggcgctgaggctcttcaaggtttcctccgtgctgccgcgcaaacgcttcagttcggcaatcatccactcctcgatctgctccacatttatgcgatactgatcggcaagatgcttcagatgagcacgatccgccagcagtttctcctcgtactccgccgtagatagactgttcttgtactccgaaatcaggctcttgatgtagtcgcgctccaccctctgccacgtttgcagttgctcgatctcaaactgtccgttcttgcgcagatcctcgatcacctgctttacgtagttgtccacttcctcgatgtgaacgtggtgctgttcggcaaggttcatcaggaatcgtcgatcgttgtggacctgcaattgaaaaaattgaaaatgaaaattttcgaaaaatataaataatatatacgatttttactaaccttggcttggaactgctccaaggtgatgttagagtgctgctggagcagcgacaagatgcgctgctgctcggttcgctgccaggcggtgagctgctcgatgttgagcttgccctgctgctttagtcgctcgatttcgctctggagccacttctcgatctcctccaccgaggtgtggtactggaaggccatggtctgcatgtgctcgcgatccttctccagctcggccctaagttcctcggcgctccactgtttgttctgcttgatcagagcctccaggcgttcgcgctcggccagctgccaagaggtcagattgtcgatctgaagttgaccctcgtcacgcatacgcgccagctcctgcttcatccagctctcgatctcctctacctggacgctgtactggcgggccagacgctcgaggagctcccgatcttgcctgagacgagcctccagttgctccgtggacttgtactgctgttgggccaggttcttcaaatgcagtcgctccacctcctgccaattggtcagcttctcgctaggcttgagcagacccattccgatgaagcgctgctcctccttcttgacgaactgttcaatctcctcgatctgcacgttgtgctgcatggccaggctctgcagctgttcgcgatccttgagcagccacttgtggaactcctcgacggtgaagtcgcgatcctgcaccatgttcgttagattgccacgccactccagctgccagttctttagcttctgcatctcaatcaggccctggtcctgtagcttctgaatctgctgccttatccactgctcgatctcctcgacgcgcacctggtgctgttgggccaagctgtagagatgggtctgatccttgctgatcttcgactcgatctcctcgatggacaggttgttcttgttgatcaaatcgagcaggcgctgtcgctcgatcttctgccagttgttgagctgggactccattcgcaactgtccctcgtgctggagacgatcgccctcggactttatccactgctctatctcggatacctttacgttgtaggtattggagagctcctggagacgtgcccggtcggccagcatcttgcgctcgaactcgtccagcgagtacttgttctgctgcaccagcaacgaaatctgggcgcgctcctgctgttgccactccttaagggtttccgccttgaccagaccctcgctttggaggcgcagcagctccttcttcagccagtcctgaatgtcctcgacattgatcttgtacttgtcggccagcttgaagaagtggtcctgatcgttcttgatcctcacctccagctgctccaccgtcaacgagttctgttgcacaatggcctggagacgttcccgttccttctgctgccactggatcaactcctgctccacacccttgagcagaccctccgactggaactttttcaattcgctcttgatccactgctcgatctcctccacctttaccttatacaaacgcgccatctcctccaggtggctgcggtcgttgataatgtagttctggaactcgtcaatggtcagcttgttctgagtggcgatgtcgcgcagattgctgctcacgctgatctgccagtccttgatgtgttcttccagctgctgctgtccgcgcacctgaaggcgctccagttcctccttctgccacttctccaactcctcaacgctgacctggtacttagtagccaggttctgcaggtagttacggtccatgtttatacgctgctgcacttcctccacggagccgcggtgctgcagcagaatgttctcgaggcgagagcgctccgagctctgccacgcggtgatcttggaaacctgctcgttctgctccttaatcaggtcaccgatgcgggccacctcgccgcgaagccactgtgtttggctttgcatgtcaccctggtacttgatcgaaaggttcttaagtcgctgttggtccgtcttaatggagttctggagtgcggcaatggtggcgttgtgctgacgaatcagctcctccagacgctgttgctccttggtgttgtcctcggtcagggagctcgacgattgatagttgtaggtggtttggggcaccgacggcacctgcggagccagagactcgttcacctggttgaagtggacgtacagacgttgcaactcctcgcgctggaactgctgcaattggttctggctaatcccatgctgccgtgccgcctcggccagcttacgtgcgttctcgttctgccaccgctcgatgtcctggacggtgaagccgttctggtgaatcaaccagtccagtcgaccgcgctcctgcctctgccagctactcgtgtcctgaacacgcgactgatactgacccaaaagtgcttcatagcgggccagttcgcggcggtggaactccttgagtacgggtaggctcacctggtagcgctgcaccacgcccagcaggcgctcctcctgctgctgctgccagtcgtccagtcgttgcggcgtagtcaaataccagaagagcctctcgcgctcctcgcgcttccactgctcgtcccgcgggattgtggactgaccaaagggctgctggtgatcatacaccaactttccgtcctgccagcgctgctgccactcagatccacccacggagctggttccgtccggattcgtggtgatcgttttgttgaatcggtgaatgaccacattggatcccggtgacaagggaaccatctgattgagggcactgttcctcagctggccatccaatttgaccaccgagttgtagccaacgacacttggttccatgttctccctcacccagtcatggatggtcttctttcgcgtgatggtggtcgtggtgctgctaagtggtagcgacgtctgctggtggccaaggaatccggagttcagctggccagaacttccgtagtccgacagcttcgtggcttcggtgcagttgcggtgcacaacgtaggtcttgccatcgatgaccttcacctcagcaggataggcatagttcttcacctcgtcaaatccgctcaagtccacgggttgatagggacccagacccactgtctgctgcagactagcactctccgctccggagtatcgctcgagcagctcggcggcctttgcctcgaagaagttgggctgcgcaatggtgtggtagttggttatgccttcgcgcatatcctgcaccagctgccggctgatctcagaactcaattggtccagctggagggtgctctttccgctaagatctaaaatagaagctgaaaaaacagaataggttagaggattttttgaagataaggaaatcagagaaaccaaatgttcattctacttttggaaaatttgaagatacttagatgatcgtttttgatattaatatacaagtagattgtattagttcatattcctatgactacgtaggcttcactgactaagaatgatgtcattgctcatactgtgcctccaaacccaaaatcagattacctttaatctttcatagctttttcccatacaccttatataattatttttatagtcttatatcctcttgaatttaatttgaactcaccactccagggggacgtgtaggcaaagttggtggatccttgcgagaggacgttgaatttctgcttcagttggttggccagctcccgcacctcattgaagtgggcggaggcgaatgaattgagttgtggcactgtttgtccacctccgtaggatgacgacgaactggatctgaaactggagcgctgataggtctcgtagccctgacagatggccaccgccagaagcagggtgatcccgcccagagccctcatcctgtgatgcgctgcaaatgagcagaacaaaaaaaaaacaaccatttcattcacaaatatcatagaacatagggctttctaagggtttttgggatcactttttaagcccaagtagtcgtgtattttcggcgttgataaggggaggatgtcgaatctagttcagaacgtaactcaagattatcgcatcggctccggacttgtgggtcgaaaaggttaatcgggcgataatgagcgcactgcccggtatcagcccatgaaaaaatcactcttatttgaagctcactgcccacttgtattttttgtatatttttttttttgacaacaattagactaatgtatgtggccccgaattcccttttcatccggtttaggttgataagtcccatggacttgacgacatgtaactttcgatttcagggccccacagaagacgtctcccccaaatgggtcacacatgcattttcccaaaatatagtattgcttatttctggaacacatttcttgggcccctgcaggctgtcgctatttatttttaaatattttcccaagttctttctattccgaactaacgaacgtatcgctagtaaacagacaaattatgctgctgtaatgacttacagttcttatcacttttcagcggaaactcaattaacactttgagtacttaacacaattatcaattgattggatgggattcaggacactatgtgggttgaaccccaatcactggcactaccgaaatctttccgagtcgagatgaaaccgctgcgccctgtggcgctgtcgaacagcaactgacagctgaattcccagcacgaagcttttatggaaagatcgcttggcgcgagaggctgcgttatgcggagcagcattatcagcagtcgagaacatatgagtcgggttatcatcacgggtacgacataatctacgggtatggacccaccggttccacattaatggttaatatcagaagaagaatcgattactacgtcatcgctcaagtcgagtggaattaatgaatgaatctcgccatgacctcatacatacacatgattcacgagccggtcggtcggtcatttgctctccgagcacttttatttcgcctgcatccgatcgcattagatcgaaatagccagcaaatgcgtgatctcatgaggtgctctttacacgactcgaggggagaacacggatttgggtactccaagtgattcaaggcagttaggtagaaatatgcaaatctggtgaccttaggctctatttcagtccaaatcggcaagactcgggtatctgccatatatccgttctgtctgctgattagaatgttactgtttattgaattgtttggaaattcgaccgcaatgacttgacggatttggtgggcttccccagccgaagaacaagaatggtttctacgaatgagaggtagaagtacaactgtgctttgcagaacttcatatcatagttgaaaaaaaaaaacaagagggcattttttaataagctcttttcatgtcgattttgcattattcacccatttcaaatatatttcgttttaatttgtgagcgaagttaaatgagtattaaatacatattgtattattgcgaacaagctaataataatctgtcttagaaagtgaaacaaaataatatatctttttgcgagtcttaaacactaaacatatttctataatttgatagattgcagacaatttcgagacttattggtttttgttttaaaatttgaattcaaaataacatccactatgttcccaagtccaccg

SEQ ID NO: 24143 - DNA, 6917 bp, DROSOPHILA
ccacagggcgcagcggtttcatctcgactcggaaagatttcggtagtgccagtgattggggttcaacccacatagtgtcctgaatcccatccaatcaattgataattgtgttaagtactcaaagtgttaattgagtttccgctgaaaagtgataagaactcgcatcacaggatgagggctctgggcgggatcaccctgcttctggcggtggccatctgtcagggctacgagacctatcagcgctccagtttcagatccagttcgtcgtcatcctacggaggtggacaaacagtgccacaactcaattcattcgcctccgcccacttcaatgaggtgcgggagctggccaaccaactgaagcagaaattcaacgtcctctcgcaaggatccaccaactttgcctacacgtccccctggagtgcttctattttagatcttagcggaaagagcaccctccagctggaccaattgagttctgagatcagccggcagctggtgcaggatatgcgcgaaggcataaccaactaccacaccattgcgcagcccaacttcttcgaggcaaaggccgccgagctgctcgagcgatactccggagcggagagtgctagtctgcagcagacagtgggtctgggtccctatcaacccgtggacttgagcggatttgacgaggtgaagaactatgcctatcctgctgaggtgaaggtcatcgatggcaagacctacgttgtgcaccgcaactgcaccgaagccacgaagctgtcggactacggaagttctggccagctgaactccggattccttggccaccagcagacgtcgctaccacttagcagcaccacgaccaccatcacgcgaaagaagaccatccatgactgggtgagggagaacatggaaccaagtgtcgttggctacaactcggtggtcaaattggatggccagctgaggaacagtgccctcaatcagatggttcccttgtcaccgggatccaatgtggtcattcaccgattcaacaaaacgatcaccacgaatccggacggaaccagctccgtgggtggatctgagtggcagcagcgctggcaggacggaaagttggtgtatgatcaccagcagccctttggtcagtccacaatcccgcgggacgagcagtggaagcgcgaggagcgcgagaggctcttctggtatttgactacgccgcaacgactggacgactggcagcagcagcaggaggagcgcctgctgggcgtggtgcagcgctaccaggtgagcctacccgtactcaaggagttccaccgccgcgaactggcccgctatgaagcacttttgggtcagtatcagtcgcgtgttcaggacacgagtagctggcagaggcaggagcgcggtcgactggactggttgattcaccagaacggcttcaccgtccaggacatcgagcggtggcagaacgagaacgcacgtaagctggccgaggcggcacggcagcatgggattagccagaaccaattgcagcagttccagcgcgaggagttgcaacgtctgtacgtccacttcaaccaggtgaacgagtctctggctccgcaggtgccgtcggtgccccaaaccacctacaactatcaatcgtcgagctccctgaccgaggacaacaccaaggagcaacagcgtctggaggagctgattcgtcagcacaacgccaccattgccgcactccagaactccattaagacggaccaacagcgacttaagaacctttcgatcaagtaccagggtgacatgcaaagccaaacacagtggcttcgcggcgaggtggcccgcatcggtgacctgattaaggagcagaacgagcaggtttccaagatcaccgcgtggcagagctcggagcgctctcgcctcgagaacattctgctgcagcaccgcggctccgtggaggaagtgcagcagcgtataaacatggaccgtaactacctgcagaacctggctactaagtaccaggtcagcgttgaggagttggagaagtggcagaaggaggaactggagcgccttcaggtgcgcggacagcagcagctggaagaacacatcaaggactggcagatcagcgtgagcagcaatctgcgcgacatcgccactcagaacaagctgaccattgacgagttccagaactacattatcaacgaccgcagccacctggaggagatggcgcgtttgtataaggtaaaggtggaggagatcgagcagtggatcaagagcgaattgaaaaagttccagtcggagggtctgctcaagggtgtggagcaggagttgatccagtggcagcagaaggaacgggaacgtctccaggccattgtgcaacagaactcgttgacggtggagcagctggaggtgaggatcaagaacgatcaggaccacttcttcaagctggccgacaagtacaagatcaatgtcgaggacattcaggactggctgaagaaggagctgctgcgcctccaaagcgagggtctggtcaaggcggaaacccttaaggagtggcaacagcaggagcgcgcccagatttcgttgctggtgcagcagaacaagtactcgctggacgagttcgagcgcaagatgctggccgaccgggcacgtctccaggagctctccaatacctacaacgtaaaggtatccgagatagagcagtggataaagtccgagggcgatcgtctccagcacgagggacagttgcgaatggagtcccagctcaacaactggcagaagatcgagcgacagcgcctgctcgatttgatcaacaagaacaacctgtccatcgaggagatcgagtcgaagatcagcaaggatcagacccatctctacagcttggcccaacagcaccaggtgcgcgtcgaggagatcgagcagtggataaggcagcagattcagaagctacaggaccagggcctgattgagatgcagaagctaaagaactggcagctggagtggcgtggcaatctaacgaacatggtgcaggatcgcgacttcaccgtcgaggagttccacaagtggctgctcaaggatcgcgaacagctgcagagcctggccatgcagcacaacgtgcagatcgaggagattgaacagttcgtcaagaaggaggagcagcgcttcatcggaatgggtctgctcaagcctagcgagaagctgaccaattggcaggaggtggagcgactgcatttgaagaacctggcccaacagcagtacaagtccacggagcaactggaggctcgtctcaggcaagatcgggagctcctcgagcgtctggcccgccagtacagcgtccaggtagaggagatcgagagctggatgaagcaggagctggcgcgtatgcgtgacgagggtcaacttcagatcgacaatctgacctcttggcagctggccgagcgcgaacgcctggaggctctgatcaagcagaacaaacagtggagcgccgaggaacttagggccgagctggagaaggatcgcgagcacatgcagaccatggccttccagtaccacacctcggtggaggagatcgagaagtggctccagagcgaaatcgagcgactaaagcagcagggcaagctcaacatcgagcagctcaccgcctggcagcgaaccgagcagcagcgcatcttgtcgctgctccagcagcactctaacatcaccttggagcagttccaagccaaggtccacaacgatcgacgattcctgatgaaccttgccgaacagcaccacgttcacatcgaggaagtggacaactacgtaaagcaggtgatcgaggatctgcgcaagaacggacagtttgagatcgagcaactgcaaacgtggcagagggtggagcgcgactacatcaagagcctgatttcggagtacaagaacagtctatctacggcggagtacgaggagaaactgctggcggatcgtgctcatctgaagcatcttgccgatcagtatcgcataaatgtggagcagatcgaggagtggatgattgccgaactgaagcgtttgcgcggcagcacggaggaaaccttgaagagcctcagcgcctggcaggtgtccgagttggagcgcctgcagaacttggtcaagcagcagaaccatttgaccttcgtggagttcgagatggaactgaaccaggaacgcgaccgcctgcaaaagctggccaaccagtattccgttaacgttgtggagattgaggagtggcttcgccagcaactgatcaacctgcgcaccacaggtcaggctaaggttgagaatctgagcaaatggcaggtggaggagcagcagcgcctgatagagatgctcttgaagaagcagcaagagatgccctacgagcaggtggagcgagagctcacccaggatcacgcacgcctccagagcctttcccaaacgcatcacgtggacatcgaccatgtggaccactggctgcgggaggagttgcgtcgtttgcagagctcaggcctcgtccagatcgagcagcagacccagtggcagcagaagatcagcaacggattcaacaactggctggagcaacagcgcaatggagccagctaccaggacttcgtggacttcctcaagcgcgataagcagcgcatggatggcatcgccaccgactaccatgtcactgtggagcaggtcgagaaatgggttcaaaaggaagccgcccgactttcgctcatcggagtgattgaacgaccagagaacaacttgaagtacgaggatattagcaacatatgggtcggtgaccagactgattcctggaagaacgagttggtgacgcgtctgcgcagcgtgacccgtcagcgacccttcacccggcaggagttcgagagctacctgatccgcaacaagccgatctttgagcagatcgcacgccagtaccatgtgaccatcgaggacatccacctgtggctggaccagagcgccaagaacgagggcctggtcaccactgagtggcaagccaaggagcgattgcacatcgacaacctgatcaaccagcagctgcgcaagcagcagagatggaccatcgaggagctggagctccggctgaacaatgaccagaagcacttgcaggatgcagtcgcccagtaccatgtcaccgtggaagagttgaaggtgtggtacaaggacgagctcaaccgactgctggagcagcgcagaatcgatcgtggttcaggcatctcctggcagaacattgaatcgcaacgcatctacctggcgatcgtgaacaatccgggtatcagtaggcaggctctggagaaccgactattccgtgacgtccacgtccgagcctcacagtaccaaatcaccgtcgaggagctgcggcagttcattctcagccagctgcgacgattttcggacatgggtttgatcgtagacaatggacgacaggcgaacaactggcacgaccaggagcgaaagcgtctgcgcgaagtggtcaagggtgtggtaatcaccgagcaggagctactcgatttcatctcgcaggacacgagcttccagacgcaactggcccagtcctatcaggttggcctcgagcagttggcgcccgtccaacgcatattcatcggtaacttggcgcgtgaacagttgttggagcagcgtcgcctaaaccacctgaccacctggcagcagcgtgaacgtgaccgcctgtacgagttcatcggcaatcagaacatgacgcagacggagctgaagacctggcagatccaggactccaaattgctggcggaattcgcgaagagatacgagatctcggtgcagcagctttcggattggcagaaaaaggagctcgcccgtatcaaccagttggccaggtactacggcatgtcgcagagcgatctgcagcaattccgtgagggtgagcttcgccagctggcgtacatcaatcaccgccagctactgtccgccgctgaggcccagaagtgggagaagcgtcatcagtggactctgagtcgcctccagagtcgctatggcaagttcggccaagagctggtcgcctggcgccgcacactctacctgctgagccagggactcattgacctgcccgcggacagcggctccaatggcggttatgtggtggatgcaggaagcaccaatgccactgctgtctacaaaccaatattctccaaggatcgcggtgaccagccgccccacacttacgatgaatcctttgtcgagggtgacgagccgggactggagggcgagaccgctcgtcccagacccccgaatcccgcacccattgtgtctacgccaaagcctccgcttccctattcccgtggtggaccgtctggtggtttcgagtaccggcgccaggactacaccttcaacgtgccagttggctcagcctccgcctcggctagcggtggacccaccggctcctcagccagtgcaagcgcaagcttaggaaagtggaaccgggcttctggggacgagccattgcaacaggaagtggatctcggccagcagcagcaaattgaggagctgggatggaacgaaaagctagaggaccttggacagcagacgcaagtcgaggacacggactggaaccagcaggcagaggatctcggccagcagcagcaggttcaggtcgaggatgacctccacttcgaccagacgcagggtcacagcagcagcagcaacagcaggagtcaacctctgcagcaagcaacgaaggtggaggtggaagccacttcagagccgtcgttctgggaaaagctaaaggagaagctcggctagaggtcaaaccaattaactgccattcatcaacggactgttgttagtcagaactaaaaagttactacccgagaggaaactctcaactaatacaaatcttaatattttctacaaatctttctttaatcctcttagtttaagacacaaataaatgacatttactgtgcagcgaaaatagtgaa

SEQ ID NO: 24144 - protein, 2188 aa, DROSOPHILA
MRALGGITLLLAVAICQGYETYQRSSFRSSSSSSYGGGQTVPQLNSFASAHFNEVRELANQLKQKFNVLSQGSTNFAYTSPWSASILDLSGKSTLQLDQLSSEISRQLVQDMREGITNYHTIAQPNFFEAKAAELLERYSGAESASLQQTVGLGPYQPVDLSGFDEVKNYAYPAEVKVIDGKTYVVHRNCTEATKLSDYGSSGQLNSGFLGHQQTSLPLSSTTTTITRKKTIHDWVRENMEPSVVGYNSVVKLDGQLRNSALNQMVPLSPGSNVVIHRFNKTITTNPDGTSSVGGSEWQQRWQDGKLVYDHQQPFGQSTIPRDEQWKREERERLFWYLTTPQRLDDWQQQQEERLLGVVQRYQVSLPVLKEFHRRELARYEALLGQYQSRVQDTSSWQRQERGRLDWLIHQNGFTVQDIERWQNENARKLAEAARQHGISQNQLQQFQREELQRLYVHFNQVNESLAPQVPSVPQTTYNYQSSSSLTEDNTKEQQRLEELIRQHNATIAALQNSIKTDQQRLKNLSIKYQGDMQSQTQWLRGEVARIGDLIKEQNEQVSKITAWQSSERSRLENILLQHRGSVEEVQQRINMDRNYLQNLATKYQVSVEELEKWQKEELERLQVRGQQQLEEHIKDWQISVSSNLRDIATQNKLTIDEFQNYIINDRSHLEEMARLYKVKVEEIEQWIKSELKKFQSEGLLKGVEQELIQWQQKERERLQAIVQQNSLTVEQLEVRIKNDQDHFFKLADKYKINVEDIQDWLKKELLRLQSEGLVKAETLKEWQQQERAQISLLVQQNKYSLDEFERKMLADRARLQELSNTYNVKVSEIEQWIKSEGDRLQHEGQLRMESQLNNWQKIERQRLLDLINKNNLSIEEIESKISKDQTHLYSLAQQHQVRVEEIEQWIRQQIQKLQDQGLIEMQKLKNWQLEWRGNLTNMVQDRDFTVEEFHKWLLKDREQLQSLAMQHNVQIEEIEQFVKKEEQRFIGMGLLKPSEKLTNWQEVERLHLKNLAQQQYKSTEQLEARLRQDRELLERLARQYSVQVEEIESWMKQELARMRDEGQLQIDNLTSWQLAERERLEALIKQNKQWSAEELRAELEKDREHMQTMAFQYHTSVEEIEKWLQSEIERLKQQGKLNIEQLTAWQRTEQQRILSLLQQHSNITLEQFQAKVHNDRRFLMNLAEQHHVHIEEVDNYVKQVIEDLRKNGQFEIEQLQTWQRVERDYIKSLISEYKNSLSTAEYEEKLLADRAHLKHLADQYRINVEQIEEWMIAELKRLRGSTEETLKSLSAWQVSELERLQNLVKQQNHLTFVEFEMELNQERDRLQKLANQYSVNVVEIEEWLRQQLINLRTTGQAKVENLSKWQVEEQQRLIEMLLKKQQEMPYEQVERELTQDHARLQSLSQTHHVDIDHVDHWLREELRRLQSSGLVQIEQQTQWQQKISNGFNNWLEQQRNGASYQDFVDFLKRDKQRMDGIATDYHVTVEQVEKWVQKEAARLSLIGVIERPENNLKYEDISNIWVGDQTDSWKNELVTRLRSVTRQRPFTRQEFESYLIRNKPIFEQIARQYHVTIEDIHLWLDQSAKNEGLVTTEWQAKERLHIDNLINQQLRKQQRWTIEELELRLNNDQKHLQDAVAQYHVTVEELKVWYKDELNRLLEQRRIDRGSGISWQNIESQRIYLAIVNNPGISRQALENRLFRDVHVRASQYQITVEELRQFILSQLRRFSDMGLIVDNGRQANNWHDQERKRLREVVKGVVITEQELLDFISQDTSFQTQLAQSYQVGLEQLAPVQRIFIGNLAREQLLEQRRLNHLTTWQQRERDRLYEFIGNQNMTQTELKTWQIQDSKLLAEFAKRYEISVQQLSDWQKKELARINQLARYYGMSQSDLQQFREGELRQLAYINHRQLLSAAEAQKWEKRHQWTLSRLQSRYGKFGQELVAWRRTLYLLSQGLIDLPADSGSNGGYVVDAGSTNATAVYKPIFSKDRGDQPPHTYDESFVEGDEPGLEGETARPRPPNPAPIVSTPKPPLPYSRGGPSGGFEYRRQDYTFNVPVGSASASASGGPTGSSASASASLGKWNRASGDEPLQQEVDLGQQQQIEELGWNEKLEDLGQQTQVEDTDWNQQAEDLGQQQQVQVEDDLHFDQTQGHSSSSNSRSQPLQQATKVEVEATSEPSFWEKLKEKLG

SEQ ID NO: 24145 - DNA, 2784 bp, DROSOPHILA
cgcctacttgaacgagatgaaggaggaaaccaggagggcgagaagccggcgaatcccctggtgcttctgtttgttgatacgggtgctcccttttcgcacacccaagttcttctatgaaatatattctttctggagaggagtgtcgggtgagttgctgttggcattactaacgaaactcacattcttaccctctgcacactaaacaatatcacaatttaacaaatacttttataaaatcatatatttttgtattgtatttcggctggagacatcatccatcaatagttctgcatgcattcagttacctgcacaccaaattgttgtccaattgcaatagaagcaattatttggtgtaatttataaacaaaacaatagcaatcatttagatgtccaaaaatatcgggcctttgacacttcgacttttcttagtgaggaatcgctatgaaagcgtggaacatctggcaacgctaagaggttggcgcgaattttcaaattaacttttacagtaattgccagttttctcaccgaaattgtaattgtaaaatcaattgtcattgatttattttaattccctaaccaaattcctcttttccccattatgaagatcagctgctgtaagtatcatatcaaaaatagatcacgaagtttactttaaaattgcacgtttcatttaggcaactgctgatcaaactctgagcattgtttatcatttatttgcgaaaaatctgtaaacaacccttcacaatgagtatatttcaatgaaaggaagttaagtgtgttacataaatagatgcaaaaaaagcggggcagtagtaatgctaaaatacatcgttttggatatgaatgacccaaaacaaccccaacttggggtttttccattatcaatcgagttccgtatgatcagtaaaatatataaaaatttttatccatagataagaaagggttgtctatttattactccatgcacatgaatagactcttcttacatgtacatctttttttagcatccttcgcaccagcattttagactggggctgcagtgtccactggttcgcccttccctctggcagatatctacgcacttcttcctgtgccacacagcacaggaacccctatatcttccggaaaggcagtcggcatgtgattcttccgctcccaggaaaattatcatcaagacagcggacaggacaattaggaacttgatttccatagtttcggtaggaggtctggtaacttagtaattgttgaaatgcaatcctcaagaaattgatcgctctcagctcagaataagcgcttaaatacgttccgatctgtaagttttacactcagtacgacgacgctgtggtgaaatttatctcgtggagataaaaatatttacccagacttttcggctgcctttacaatttcaccacgtgccgaatataacaatgcattgatctgaacaataaatattggttcttgacttgattttattttaaataattgtgaatgtttagggaattgaattttatgattgatacataatcattctgggtctatagaagttgtccaatttcggtagaaattcagcatccttcgcaccagcattgcagcctggcactgcagtgaccactcactcgtcctcgtccctcctctcggcaaacccgcctgcatgtctcgttgtcccagacggcacagggacctctgtaccttccggaaaggcagtcggcatcggcttccttggcgcccaggatgaccatcatcagcagagcgaggaaggtgaacaggaacttgatttgcatcattttcagtagttttcgtggtgattgttttctttgatgtactaatcaattcagattcggatcgaatttgttttcaagtgctttcgacgagcttatatagggctggactagtcgatgtcgctgccagcgtcgttcgattttatttattgatactaccttttgtctggataaatatacaatacacacaatataattgtaagaacgtctctcaatctaggtcccatgaatggttcaaggaaaagcaaacaataaatggcgtaatgcacttaattatcacaaccaaaacaacaggatagtgatatttgctactttgtgcttattgcctaaagcacatatattttcgaatgcaattctataaagtttaaattccaacggagagcgcaaaattcgatataagcatcgataactgcacctagaagtgtgaccatgtttcgcgaacctcaaataccatgacttaattttcaaattccactgagaaccggatcggctattttgaatagccagtttttctctgatcggcgatttgacaagacgtgcgcgcggactgaaaattggatcccaaaaccgctaactgaaaaataaataaagccgtgcaaaagaaataaaaagtaaagaaacaacaagcgggccaataagtaaaacgtaatcagcgtttcaattctctcttttatttgcgctctcgctctcttaagccgctcacattgcacattgttgttgttatgctcgttgtagtttttgtgctaattagaaaataccattgttgttgcttttgcgccggtgtttaaaacgcggctatttctaattactgccccaaaacagaaatgaaaacaaaaaaagaacaatagaaaaaacccactaatctggtttttgcgtgtgaaagcaactggtgtgcattggaatttgttattaaggtcgaagagcagcaacaagtgacaaaaattctttggcataaattaaaacagaatccccaaaaagcgctgaaaaacgttaagatttcttcggt

SEQ ID NO: 24146 - DNA, 228 bp, DROSOPHILA
atgatgcaaatcaagttcctgttcaccttcctcgctctgctgatgatggtcatcctgggcgccaaggaagccgatgccgactgcctttccggaaggtacagaggtccctgtgccgtctgggacaacgagacatgcaggcgggtttgccgagaggagggacgaggacgagtgaggcgaaccagtggacactgcagccccagtctaaaatgctggtgcgaaggatgctaa

SEQ ID NO: 24147 - protein, 75 aa, DROSOPHILA
MMQIKFLFTFLALLMMVILGAKEADADCLSGRYRGPCAVWDNETCRRVCREEGRGRVRRTSGHCSPSLKCWCEGC

SEQ ID NO: 24148 - DNA, 8136 bp, DROSOPHILA
gttgtacatatattattatatgtttgtatgtattaattattagaacgcagtccattacaagtttaatttctttttagtaacaatttaattcctgacctctgaatagaattattgctgtttaagaaaattttctgagttatgtaccttaaaagtttagttaatatttgagtgacccaggtgtcaaggctgtgaggtaatcttttaaagcttcgttgtgcattttctttgtcgcaagcaattcgtctgggtatttcgtagtcgattgcgtttgacataaatatgcaattagatagaagttttggatacaattcgcgtgtcacttgagctcatcttctggaattaaaaaaaaaaaaaacaaaagagctatgcaaaatagccttgttttcgtctgacttcagtggaatatacatatgtaaaatcatgggtctaggaggctgatctggccaactggttttggaccggccaaagtgcgagaaccgcgaactgaactaaaaacagattatgagaggccaggtgtattcacggctaaaccattatctcagccgaacggagaacatcgattagattgcccaaaaagtgttcccgacctgcagctggttccaaagtgcgaaggctaaccccaacagctgcgttggctatccccattattaactttcggtaattgtattgttgacatgccctcatggtaattgactccaaaacttcagcgcctatttcggtttcaattacgcacttcaggtatacatatttaggtactagttcgaggtatatagaaagtatttgtcatttcgccgatgtttacgatttcatgaagattagggcgcccgctggggctacgtgcatgccggtaatctggggaactcgggagaagtagccagcaaatgcacacgacggcggagaaaagctctgacgttgtcccgccgatttgcttaatcgatttgttttcgttttggcaaccgtgcgaacgtttggtcagttccaatcgagttcatctggtgtgcggacgtgtgctttcgccactcctacactcaaaaatatattgcaatcacattgaaagaccgatcgcagagtcctcagtactcggactacccaaccgactgtggaaaagtgataaagtgcgagtttttgggaagctgaagtaaaacaggttcgttttccacctggccacttgttgagtcattgcaataggatttgtatattgtacacatatatacatagttcccagtgtttacgtaaaaccccaaatagaaaatcgagaaaagccagctagagatttggttcgtttagctttgaatctttcaatccgacttccatcaacttttgtgattttcatttcgagggcctctgggcaaacgatcttggttcaagtttttatgtagcgctcactcttcgcttttcaaggttttagttggaaggttagatttggttatatttcaagttgtttcgttgctcaaaaacgcatagaaacaaacatacactactatctagctatccttcaaagaacttattgaattcgattaaggtgcggaaaatgtagggcattgtaccagaatatgcgatatattgatatgcccaactcatttggatgttcaagttttgtactttaatgcccaattaacatccaatcacatttgcaagggcaatcgaagttctgtacccgacgcattcactgcttccgtgctctatttgatttatcatatgaattaattacttctttcgtgcattttaactaagctgggcgttccctctttttttacggtgaataaactttgactgcaattatgcatggatacgcttaaattgcaaattaagtgcttcgaatttgcgagaaatcatttgtcactcttgttgagctacagtttgttcaagcggcgaactagtttggcagttaaagtctatttgtcaaattagataaagtgcaaatactcagttgtcagatacaacatcctaaacaaatcgggcgacacgaactgtactttaaaaaataattgccagaattggtggcatgcttaattgttaggaacatttctagcaatgcattgtgcaaaaaaatcatatatttcgtaagcggcatagttaatttccttgtattaccgtactaggtcgaagaaaatacaagtattaccgtttttatttcacttgcaaatttatgacataatattacttgattatctacaacgttaaaaacttattattattacaaaatgaagtttaaagacagaagaactcttttatttacattccgaattttgaatatagcagttctattagttttgtttaaattacagatcattcagttcatctgaactttaagaacgcgctccagttttctcagcgtgtaatatcttagtgaagcatcacgctcttgcaacgtgataacgggccacaacaataacaaaattaaaactactctcgttccatcttgctcttagcgcttactatcgctctcgttcgctcttgtgtaagctcccacgatgtccattcccttcgcgcaagaaattggcaaaagcagcggcaaatttcaagttcaatgcgtgcctctgataaatggtcaatgtttgctgactttgtattcgaatgtttgctgtcttttggtggcctctggtcggtttttaccggttttcgttctcgtggctcaacagcattcggctgttttgttgacatgctggcggcattagctttttctctctccctctctcactgtctctggccctttcttctttcgccatgttaaaagcttttgcgggtgatctgctgttcttgcattacacatacatgggtgcaattgcgaaattcttcttcttgccacctaatctgttaaaaatcagaggcatatgtaagactattttaaagaagggctcctgaggcacaaatactacatacaacaaatatgtataaaatgaaattagtattttttatgggttttccttaacgtaaactagtattcttaatatatatgtactaacgaaacaaaataaaaagtatttaaaaagtgatgttgatcaatgagttgtatggagtaccttataagaacccccgttgctgacgcctctggccgacattcttctaatcacctttctcgtgttcatttcgcgtaatcgtatgatttgtaagctcttgtttgaccgtaggttcacgtgttaaactggctaatggccccatcctggtttcgaagtgcacaactgtccagttttgtaataaccgctcgtctgataaaatcgcaattatcaggtgattcacatgcgattggataaagattcggtcagatacttaaaaacatatcaaacacatatcggcaagacacgtcgggttgttaagggcgactcttattagatatggccaaagtccccccgtatagagtctagacatatcaaatctaaccctgacctcagcaatgggcaaataaaaccgcccatttggccaacatctaccacatctaatctgctaatgagaatacacgcacataccacacatatgtatgtataggcgcgcgcacgcacacacctgcaaaagctttaactaatctaaagctcacgagcgagcttttcgtgaaatgctgcaggttcttcgtcgtcggcaatttttgcacatcagttttaaaacccaagttaaccgaaacggcttgttaatttctagctgcggcgtataaaacacctttttttttggtgtaatccaggtaaaacaataaacagtggtctcaaatgaaattccatcgaacttgcggctgttcacttttgctgaacagtttgcaattcttgttaatttaacactttctatggcgtgggagtgtgtgtgtgtgtgtataaaaaagcatgctaaagttgattgaagaaggaattttccacgaaacgtgtcacagcgttcctggcttcattcgtaaccttgagccaaggtttccatctgctccggttcccagtgacccacaaaacacatgttccacattaggaaatccacctggtgcttgttcccacaccggctttttacattatgcatgccatgcgaatcctgacacaaggacgcgcaagcagcgtttattgattttttcatccattagccattagccgattaaagcaacagaaatccgtattaggcaagaatatgcatatgtacacaatatcaaagggtactccactcaactcaactcagctcgactggacacctcggggtctggccataaagagccgctcggagtcacctagccaaagcgtgtcaagttcagtcattctgctcacctggctaattgcccaagtcaccaccaagttggcacacacactaattgctcttttgtttatgtcgttactaatttgttggttttatcttttttactcgcacaccagttgatgcaacatgccgcccaacgcccaagccggtgcccagtccatctcagactcactgatcgcagcagctagtgccgccgccgacgcgggtcagagccccaccaagctgcaggaggactccaccggagtgctcttcgagtgcgatgtggaaaccaccgacggtggtcttgtcaaggacatcaccgtgatgaagaaggccgagaagcgccgcctgaagctcgtctggcgcaacatcatcgccttcggttacctccatctggctgccctctacggagcctacctcatggtcacctctgccaagtggcagacgtgcatcttaggtgagtcaataattcattataatagaagtatataaggttaaatatatagtttggtgtccaaagatctgtaaactgctaccaaatagaatggtcataatgtcagatctgcttggtctatccaaaatgcactttggtttatgtaacgaaatatttctattacttaatggcaagaggtcaaggtcatgtcaattaagaaaattgctcaattgctagaatcacacacttcaaagtaaagttttaatgacaatgtctttcttgaaatatgcataaaacgcttttcgcactgatactgcgatactaagatgatatctcaataatcagcgttctgatgaaaatataagtaaaacgtaaaaaagcaaatattatggaaattttatacttttggtaaggcaccgacaaccatgacaacgtaaaacgtaaaaaagcaaatattatggaaattttatacttttggtaaggcaccgacaaccatgacaaccattgccatcttcctgtcgcgtgccgaactctcgaacatataggggttatctaaggcttgcgccctgataaccttcacaaagttgttattgtggaagtccagactaaacatggcacagacggctgatcgtactttccatatacgcgattaccttaatggtgcaggtgcttatttttgtcggaaatcaaattaccttatattaaaacgatcacctttgcgatcaaacttagtaagcattatcaaaatgtgtgtcaagtcaccaaggatctatgttaattaatttaaagtattaagtaaggctactagtaatggatactttaaacttaattaagctatactctttggacaacgtaagctaaccaactgatttcttattttcagcttattttctatacgtcatttctggcctaggcattaccgccggtgcccatcgtctgtgggcgcatcgctcctacaaggccaagtggcccctgcgagtgattctggtcatcttcaacacgattgccttccaggatgccgcctaccattgggctcgcgaccatcgcgtccaccacaaatactcggagactgacgccgatccccacaacgccacgcgtggtttcttcttctcgcacgtcggctggctgctgtgcaagaagcacccggaggtgaaagccaagggcaagggagtcgatctatccgatctgcgcgccgatccaatcctcatgttccagaagaagtatataaaatcatttcgtttcagtcgctgcaaattctaatatgtttattctattgtccagatactacatgattttgatgccgattgcttgcttcatcatcccgaccgtggtgcccatgtacgcctggggtgaatccttcatgaacgcctggtttgtggccaccatgttccgctggtgtttcattctgaacgtaacctggctggtgaacagtgctgcccacaagttcggtggccgtccctacgacaagtaagtgcttagagtttgaacaacttatggatgtgtacttacagaggtttgttctttttagatttatcaatccttcggagaacatctccgtggctatcttggcctttggagagggatggcataactaccatcacgtcttcccctgggactacaagacggccgagtttggcaaatactcgctaaacttcactaccgccttcatcgatttcttcgccaagatcggctgggcctacgacctcaagacggtgtccacggatatcataaagaagcgtgtgaagcgtaccggtgacggcactcacgccacgtggggatggggcgatgtggaccagcccaaggaggagattgaggatgctgtcattacacacaaaaaaagcgaataggcaggttgagcgtagggccaatcatgggagggtttagcagaaaatcaatcaaattcaagtaaagcaaagaaacataaatttccattttgcaaatgtccgcggaacatatttcctaacagagcagaagcccatttaattaattctaagataaagcgttgatgataactgtttgttgtatctcgaaaaactttataccgtctgtgttaaaccagctccggaaatgtttttatttcgctctctttttatggggagacgcaaaactaactttgtatttatacacgcatataattgcttaatacctggatatttatgtacaatagatggcaattggagattttcattcactgttatctcgaaatcacttttgtaatttgagagaaattttcagttaaaaatctaaaagaaaaaatgatacaaatggaggaaaactttccgcttcaaagaaaaagaaatacctgcaaatgaaagattttagtatttagcgtaagccaaaaacaacaagaattatcaaggaactaatatatataaactatataataaacgatcgatgttagaacactaaaagacactttcacctatacatatgatatttctttaaatgttattaaataaaatgggaaaacgcctctgggaaacaaaacatcccagtagacttttccataaactgaaaatgtcaatgctcgccccaacactttcctttcagttgattcccaaaccccaaaagtgaaacacgcacacactcggagaacttttgaaacacacataccaaaacaaaattatcgtattggtcttccaatggacgaatttagagtacccaaaaaggttaaccgtaacgttttcaaggccattagcattcttcaatcttcccgaaccgattttgtctgcgctaatgcaatcgtcgaccaggtaaagttccaaatgcggaaccgcattccggtcgagcatatagatgaggccataaaacagtcgctggccaacttgaccatgctgggcatagtgcggcgtctgggatcgtctaagtattcgcttagcaccatagtgtatggccggttgggaatgcccaatcccattgcacatccgccgggcaatcctggtagaccacatcggcgagctgcgcagaatgcggtatgaatgcaatccaaagggatgttcttaataaataaaaagctaaccataatgttcaacttgcagcgtcaaaagcgacctgtcgggcgcttggatccttggaaatcggtcagcaagatcttgagtgaggactctctgtctggaactgagatgaccaagatgcgcaagcggatgcgcaccaacacaaagcgcgttgtcaagaagaaacgaatccccaaccgtcgactatctcgagccaggaagtataaagaaacagaaatggccaccaccagtatcgacctaagatgttcagaaagtcgtttgggactagacaataacgtgcaaatactattcggatcaccgggatggacctataccaaacccattcaaagtactttggtgttgcccgatgcaccattaagattggatcaaaaagcgaatgatcctgagaccccgaaaacaacagttctttccgggaatagcagcagcacttctgtgacagacgtaaaagggaatgtggtgaaggatgaggagggaggatctcaaccttca

SEQ ID NO: 24149 - DNA, 1965 bp, DROSOPHILA
cggacgtgtgctttcgccactcctacactcaaaaatatattgcaatcacattgaaagaccgatcgcagagtcctcagtactcggactacccaaccgactgtggaaaagtgataaagtgcgagtttttgggaagctgaagtaaaacagttgatgcaacatgccgcccaacgcccaagccggtgcccagtccatctcagactcactgatcgcagcagctagtgccgccgccgacgcgggtcagagccccaccaagctgcaggaggactccaccggagtgctcttcgagtgcgatgtggaaaccaccgacggtggtcttgtcaaggacatcaccgtgatgaagaaggccgagaagcgccgcctgaagctcgtctggcgcaacatcatcgccttcggttacctccatctggctgccctctacggagcctacctcatggtcacctctgccaagtggcagacgtgcatcttagcttattttctatacgtcatttctggcctaggcattaccgccggtgcccatcgtctgtgggcgcatcgctcctacaaggccaagtggcccctgcgagtgattctggtcatcttcaacacgattgccttccaggatgccgcctaccattgggctcgcgaccatcgcgtccaccacaaatactcggagactgacgccgatccccacaacgccacgcgtggtttcttcttctcgcacgtcggctggctgctgtgcaagaagcacccggaggtgaaagccaagggcaagggagtcgatctatccgatctgcgcgccgatccaatcctcatgttccagaagaaatactacatgattttgatgccgattgcttgcttcatcatcccgaccgtggtgcccatgtacgcctggggtgaatccttcatgaacgcctggtttgtggccaccatgttccgctggtgtttcattctgaacgtaacctggctggtgaacagtgctgcccacaagttcggtggccgtccctacgacaaatttatcaatccttcggagaacatctccgtggctatcttggcctttggagagggatggcataactaccatcacgtcttcccctgggactacaagacggccgagtttggcaaatactcgctaaacttcactaccgccttcatcgatttcttcgccaagatcggctgggcctacgacctcaagacggtgtccacggatatcataaagaagcgtgtgaagcgtaccggtgacggcactcacgccacgtggggatggggcgatgtggaccagcccaaggaggagattgaggatgctgtcattacacacaaaaaaagcgaataggcaggttgagcgtagggccaatcatgggagggtttagcagaaaatcaatcaaattcaagtaaagcaaagaaacataaatttccattttgcaaatgtccgcggaacatatttcctaacagagcagaagcccatttaattaattctaagataaagcgttgatgataactgtttgttgtatctcgaaaaactttataccgtctgtgttaaaccagctccggaaatgtttttatttcgctctctttttatggggagacgcaaaactaactttgtatttatacacgcatataattgcttaatacctggatatttatgtacaatagatggcaattggagattttcattcactgttatctcgaaatcacttttgtaatttgagagaaattttcagttaaaaatctaaaagaaaaaatgatacaaatggaggaaaactttccgcttcaaagaaaaagaaatacctgcaaatgaaagattttagtatttagcgtaagccaaaaacaacaagaattatcaaggaactaatatatataaactatataataaacgatcgatgttagaacactaaaagacactttcacctatacatatgatatttctttaaatgttattaaataaaatgggaaaacgcctctgggaaacaaaacatcccagtagacttt

SEQ ID NO: 24150 - protein, 383 aa, DROSOPHILA
MPPNAQAGAQSISDSLIAAASAAADAGQSPTKLQEDSTGVLFECDVETTDGGLVKDITVMKKAEKRRLKLVWRNIIAFGYLHLAALYGAYLMVTSAKWQTCILAYFLYVISGLGITAGAHRLWAHRSYKAKWPLRVILVIFNTIAFQDAAYHWARDHRVHHKYSETDADPHNATRGFFFSHVGWLLCKKHPEVKAKGKGVDLSDLRADPILMFQKKYYMILMPIACFIIPTVVPMYAWGESFMNAWFVATMFRWCFILNVTWLVNSAAHKFGGRPYDKFINPSENISVAILAFGEGWHNYHHVFPWDYKTAEFGKYSLNFTTAFIDFFAKIGWAYDLKTVSTDIIKKRVKRTGDGTHATWGWGDVDQPKEEIEDAVITHKKSE

SEQ ID NO: 24151 - DNA, 9424 bp, DROSOPHILA
aactaatagttttacattaagaagttttaataaactgcggaataagctttagaatttagaagaatttacaagaaattgtgctgatcagagtgttcgaaagaggggttttttgcttagctgcactcagttacttacaatatatatgagtacatataacataaaaaaggaaatgaccattaggtacacagtgttagaaatcgtttcatttggcgaatccctgcagttacattcacattcttaatttattccaaataataacttttgtgagttttatttgttgttatttgaaaaattaatcaattgtctgaattcggatataccaatttcttaaatactcctgaataaaattcgcgatttggaagggcgcgtgccgtttcaaagaggaatccattattttcatttcgcttcgtcccttacccctaatatgaaaacttgatgtttgattaacaatgaatgcgcgcaacatataactgaagaaatgaagatatagctattattcagagaaagagcatgttgctcttattatcaatccccaacccacataaacgggttgtgctcggtaagtaaataaaaacgtagaatcaatttgataggaaacatctagtgtgacaaaaagtaaaatatgtaataccactttcgcagagcaaaacaaatttttcttaaattttgtttattaataggaccctatgaaaaatataataccaacggtattttacattcgggacattcttttttctcgttcccgttctatactcttgtgcggcttcagctgtagttttggttctgcaaaagagacaacatgattttaagccagtcgtttcttttatgccgaagcggctgtagtcgtaatgttaatagcaagcggcttcttactgtttcagtttctttcatacggtttgggagttccacccttggtcagaattggtaaaacgtttagaaattagtacaatcaatattctaatattttctttaaggagctatattttcaaaccagcctggaatgtataactcggagttagcgtttagatacgctattcatagacttaatatggacaaaagccttttgcctgagactaccgttgattactatgttgaatacgtaaaccgatttgactctttcgagacagttcaaaaaggtaggattatgattgggaaataattagttaaaacgtaatctgtcttctagtgtgcaaacttatacgagttggtgttcaagctgtttttagtccaactgactctgttttggcgacccatataaattcaatttgcgacgcactggacatcccaaacataggccggtctgcccatgacttttctattaacgtctatccatcgaagcaacttgtaaattatgcctttaacgatgtaatacagtatttaaattggacacgctttgggatattgcatgaaaaagaaaatggttagtccccagttgttaaatccaaatgtttaattcagtttttgtggccgagccgttaagattatgccaagaaaaatttacaaaagtggggccaagaaagtttttggtagcctgtgagcgttataatgggcttggaaatcttcggtggcacacttgcttaacgtagttgtagcgagaatcctcatcatttaatcgtttttgtctttaaagtactagaaaacccaacaccttttatatttaacattaagaataagtgttctactttcgatcaattaaacgatcttgaatttaatatggaaaacatttaaattcccttcaagaattcattgattataaaatttatattaatttacataagatataacaatatttatacacgtcagtcatagtagtaacgtaagcaacgggcagaagtaagcgctttcgaccacataaagtgtatacatgcattcttgatcgggatcaatatccgagtcgaactggccatatatatccgtctgtctgtccgtctatgaacgttgatatcttaggatctatacaagctagaaggttgagataaagcatacagtttctaaagacataaacaggtttgttcacccaagttgctacgcacacacccaaaaacggccaatttttttaatattttcccaatttctacggatactcctgaaaaatgttaaaaactatcggtttgggctaggtgagtaacggtttctgatagacggggaactcgactgtggcgttctctcttgtttttatttaacaaattaacaaattaaagttattaaaaaatccctgagaaaaccaagaaagtgagcttagtcgaatactatatatacaagaagaaattacatttttctgtggttctctgatgttaacgagtgtttcaaaaacaaaacaaaaacttagggttttgcatacaaattaaaaaaattaaaaacattaagaaatataaggcttaggagaaagctgtgaaactgtgcaagacagaactttaaaaattggtgttgtttggggatccctccctcataaaaagcatttacaaaaagctacgcatacgattgtcgagttgtaatgagccgttaaaaaaatattctacgaacaaaaccaaaattatcggcaatttttaaaaatgaaaaggcttaattttggccaccaataaagttcaggtattcagacacctgtggatatagaattgtgctttcagtcattgaaaaggctttttcatttgaatgtttaaattttttttcaaacgtattttatttattatttataatataacatattaaaagctataattaagcttttacactttttggaacattgaaaacacttgaaactcctatgaaactaactatatatatatagctagatagatatataatgtataacactagaattattctatttggtataatcgaaggctattaacttcccagttaaaaatattctagggatccacgcacactttaacccccatacaccgcccaccacacccacacttttagaaaatgcctcaatttttacattttaatatatgtatttaaattttttgttatcgatgtgtcaaatatatatggccgacgcctactttatatattgtttttgttttggtgttcataaattgttttactaatttttataaacatcggcccactctaacgctcgccaattttattaatttaattattgatttcccactagcggagtagcaggtatctaggaacaggactatagctttctctcttagtatcagtcaatataaagagtaatatataaaaaactcgttacaggaatcataaacttgcatcagctatcccggtcatttcacggagaagttcatatgcgacaagtttctcgggattcatatgtatccgcattgaacgaatttaaaggaaaggaaatacataatattattattgatacaaactcgaacggtatttccatattgttgaaaaatgtaagtaacattttaatattgagggtatctattaaaaacgacttgtttttacattacattttttttcttatggtaacgagacattattaagatagagtaacgagactctaattgagatagtcacgttctgaaagttaatgcactatcgccatcttatacgaacaaaattgaagatcatcatgaaaaattattctccagttctttgtcgcacttgcagtttgcctgaatgtagtcccatgtaacaattgattgaattgaaacggggctaaattaaagcgattccggcttgaaaagtaggcctgaacggcaaaggcacgctcctcactattccaacacatgatggcgattgaaccgtgtcggaacataacttttcaatagaccctcttgaacgggaccactagcgctccgctatgacatcaaccaactgattggctcgcattttaaaaaaggaagttatgctgcctcaccttgtatgtataccgcaatcacaagcgatacataatgctttatgcctctaagcaaccacacaaaggtactctgcatatgatctgactttcaacaatcagcaatctgcaaatttatagactttaaaaaaatatattatattcgttgaaaaaatgtaacaaaaacacttcgtttccgaacctgtaaacttcttgttccgtacgagtcaatctgcgaaaagctagcactggcagattctagaaacacgattttgttttactttatcgccacaagccgcacaaaacttcgcagccacactcattaggatttttttgattagagtagagtaaaagggtatccgttgaaaagtatgtaacagtcagaaggaggcgtttccgaccacataaagtatatatattcctgatataacgcccacaaactctaacgcccacaaacggcacaaaactcccacgcccacacttttgaaaaatgttttcatatttttattagtcttgcaaatttcataaatttgtaaatgtggctgagtaacgggtgtctgatagtcggggagctggaattctctcttgtttttcattttatttgttttctggttttggttgccaatgcctatcgatgtgccgcaagctacgtcacgggtatctgatagtcaaagaaattgccttaggattcgcataccataccatttgtatatatttattttatgccgtctatattaatgtagtaattgttgttatttgaattttacacatattaatacttttcaaatccatttgctttttttaaacgaaactatagatattgcagcaacaaatgaatgaatacaagtaccattacttgtttacaagcttcgatttggaaacttatgatctggaagactttaaatataatttcgtgaacattacatcgtttcgattggtcgacactgcggatgttggggtaaagcaaatcttgaaggatatcggattgtatagtcaccatatatttaaaaaaccttatttgaatctacatattaaaaaatcaaccattcttgaggtaagcttaatagaaatgacgtggtaagtacactataataaaagcgtttctacaaatctttagtcagagccagccctaatgttcgattcggtgtacgttttcgcgattggattgcagacactggaacaatcacactctttaacccttttaaatataagctgcgaggaggaaaactcgtgggacgggggccttagtcttattaactacttaaatgcggtgagtttgactgcaaataaggggctaaacaagaaacaacattttattaaaaatagcgatattacatttttcagtttgtttagaagacccagtaaatggtttataaccacagattttgttagctagggatgtttacctaaatatcgaaatgaaaattatcattatcttttctaaaataaaataagtgtgggacccagagacgtggcctgacgcgagttcaggagttaccagagactaaatgtctaatctgaacttaccatgttactatctactatatatgtttaaagtgtaaaagaaaatagaatgctatagtggagttcccccgactaatagatactcagctaattaaaatgccaaagcggaattttatactttttatcaatagatatcggaaaataaaataagataaaatttatttgtgggggttagagtgggcgtggcatataaatgttgggatacctatagaaattggcaagtcaaatacatttttaaaaggtgtgggcgtggcagctagggcggtttgtaacctgtaaatacttttcaaagaatctagtataccctttttactgtctgattaaagggtgtacaaatcttgaataaagtaagcgactggaaattacgaaaaatttctaatcaacttatctgtatacagcaatgtcgcgtgccatttaaataagaaaatggtttgtccaaaggttttagccaatgagcattaattttgggtgtataagttgaaaattttgaaaatctagaaggacacgttttggcccaataaagtacatatattgttgatctgccgtgtcgatctgcccatatccatctgtctgtcagtttaaacgttgtattcactggaattataaaagctaaacagatataacgtagacgcttattttactagtcgtcatggaaattttgcccacgaaaagataaaatatctacgaaccttttttctggctaagtagagtcgaaatcgaccatagcgggactctagttagaaacccattttgttgaaaacaagcagtgacttggcttgggaatttcttgtttggattgtagagtgcaaaaaagtaagtacgatgtacataaattgttatacccgttactagtagagtaaaattgtgtactaggctcgttgaaaattatgtagcaggcaaagggcagcgtttgcgactatataaggtatatatattcttgatctggatcaataaccgagtcgatctggccatgtccgtctgtccttatgaacgtcgagatctcaggaactataaaagctagaagtttaagatttaccatacagattctagagataaagacgcagcgcaagtttgttgacccacgttgccacgttgccacgttgccacgttgccacgcccacgcactaaagtcgccgaaccgttcacgtccactttttggaattcaattctttaattttttctcatttgatttcccaatatctattgatatcccagaaaaattatgaaatttcgcggtttttatttatatttctaattatgtttattactttttatactctttaaggttgaatggaaaggtctgacaggtccgattcagtttaaagatggccagcgggtccagttcaagttggacttaattaaattaaagcaacattccattgtaaaagtcggggaatggactcctcatgggcatctgaatataactgaaccatcaatgtttttcgatgctgggtccatgaatgtgacacttgtagtgataacaattctggtttgtgaggacgacgaataaaaatttataaaagtaattgtaaagttaatttccaggaaacaccatatgtaatgatgcattatgggaagaattttacgggaaacgaacgattttatggtttttgcgtagatatattggaaaccatttctcgggaagttgggtttgattacatactggatctggtaccggatagaaagtatggggccaaggaccccgaaactggggaatggaacggaatggtcgctcagctgatgaaatatgtaagtttgtttatatttttttttttttgaagtgacaaatagcacttataaatatacttagaaggcggacctggcagttggatctatgactataacgtatgcaagagaaagcgtcattgattttaccaaaccatttatgaacttggggataagtattttatttaaggtaaatatccttttactttatatggtaatgttaatagaaaagactcttcttgttcaaggtcccaacatcagagccaacgagacttttttcatttatgaatccattagcgatagagatttggatatatgtgctaattgcatattttcttgtgtctctctgcatatatattgttggaaaactttcgcctatcgagtggaagtgcattaacgcctgcgatctagaaaatatttctattggcaaccagttctccctaactgacagtttttggtttaccatagggacttttatgcaacagtcacctgatatttatccacgagcaatgtcgactcgaataataagcagtacttggggttttttttcacttattattgtcgcatcctacaccgcaaatctagcagcttttttgacaacggagcgcatgattaatcctatcgagaacgcagaggatttggcttctcaaactgagatttcttatggcactctagatagcggatctacaatgacattttttcgggtatgcaactagtaaagtggcaaatcttctttgataagtaaatacattcattaagtaggactcagtgatagaaacttacaaaaaaatttggagaagcatggataacaaaaaaccatctgcatttaccactacttatgaggatggtattaagcgagtaaatcagggtaattatgcgtttttgatggaatccacaatgcttgattacatcgttcagagggattgcaatttgacgcaaatcggaggacttttagatacaaaaggtatgacaatttgccttcgttgttcctctaacgtaaaaaaaataacgttaaaatattcaaataatatgtttttaattcaaaaagaattttgtttcctcttgtgtacatttctctttaacacttctgtaggttatggtatcgctacaccaaaaggttcgccttggcgagataaaatttcattggctatacttgagcttcaagaaaggggtgacattcaaatgttgtatgataagtggtggaaaaacactgatgaaacatgtactcgcaaaaacacaagcaagcaatctaaagcaaattcacttggtctggagagcataggtacgttttcacaatgcaattggctaatatgtactacagttatattaaggtaaatatgctgtttgattattagttattgcttattattgtccacatgatattgatttgttttctaaggatttgcttttatacttatgatcaattactcacctaataaattaaaaaaataaaaaatatacaaataacgaatggtaaaactctacaatgacgctattgttgccattcgaaacgtaatccttaaataataattccattctaattggatttggagataggtaaatcaccatggttataattttccttagaattgactatgaattacccgatgacaacccttttagtttgattatcaaccattttccactttttccccattgacttacgacagacggaattaaatattcttcgttctaaggtaataaccttgtcaatttaaattcacagaaactctctaccaagcattaacatagattaaaaccgccatctcgaaaatttaatatatttaaatttaaaattttgactttacatgaaaataatatttatatcaaattccttgaaattccttgtgaaatcgattcctgcgatatatgcatatgtaagtatgtatcttgatcaggatcctagtcatgtccgtatgaacgcatcgatctcaggaactatgaaagataaaatgttgcgattaagcaagcaacttctagaggggacatagacgcagcgcatctttgtttccaaaagtttatatatattaacaatatatcgattataccaaacaataatttaaatttttgataaacttcatttcgatatttaagaaagcatctagctaaaacaaatgttggaattatttttattatctttgaaggaaatggagacaaacgaaatattagatgttcgactgctttttaaagttttgttttaattttacacttattgcattctttctttttaaccagttgattttcacaaaatctgtggttataacccatttactgggtcttatatatattccgaagttgttttgatattgttatttggtctactaatcgtcacataatgtaatgtaaggcatt

SEQ ID NO: 24152 - DNA, 1988 bp, DROSOPHILA
atgtataactcggagttagcgtttagatacgctattcatagacttaatatggacaaaagccttttgcctgagactaccgttgattactatgttgaatacgtaaaccgatttgactctttcgagacagttcaaaaagtgtgcaaacttatacgagttggtgttcaagctgtttttagtccaactgactctgttttggcgacccatataaattcaatttgcgacgcactggacatcccaaacataggccgcttcgatttggaaacttatgatctggaagactttaaatataatttcgtgaacattacatcgtttcgattggtcgacactgcggatgttggggtaaagcaaatcttgaaggatatcggattgtatagtcaccatatatttaaaaaaccttatttgaatctacatattaaaaaatcaaccattcttgagccagccctaatgttcgattcggtgtacgttttcgcgattggattgcagacactggaacaatcacactctttaacccttttaaatataagctgcgaggaggaaaactcgtgggacgggggccttagtcttattaactacttaaatgcggttgaatggaaaggtctgacaggtccgattcagtttaaagatggccagcgggtccagttcaagttggacttaattaaattaaagcaacattccattgtaaaagtcggggaatggactcctcatgggcatctgaatataactgaaccatcaatgtttttcgatgctgggtccatgaatgtgacacttgtagtgataacaattctggaaacaccatatgtaatgatgcattatgggaagaattttacgggaaacgaacgattttatggtttttgcgtagatatattggaaaccatttctcgggaagttgggtttgattacatactggatctggtaccggatagaaagtatggggccaaggaccccgaaactggggaatggaacggaatggtcgctcagctgatgaaatataaggcggacctggcagttggatctatgactataacgtatgcaagagaaagcgtcattgattttaccaaaccatttatgaacttggggataagtattttatttaaggtcccaacatcagagccaacgagacttttttcatttatgaatccattagcgatagagatttggatatatgtgctaattgcatattttcttgtgtctctctgcatatatattgttggaaaactttcgcctatcgagtggaagtgcattaacgcctgcgatctagaaaatatttctattggcaaccagttctccctaactgacagtttttggtttaccatagggacttttatgcaacagtcacctgatatttatccacgagcaatgtcgactcgaataataagcagtacttggggttttttttcacttattattgtcgcatcctacaccgcaaatctagcagcttttttgacaacggagcgcatgattaatcctatcgagaacgcagaggatttggcttctcaaactgagatttcttatggcactctagatagcggatctacaatgacattttttcgggactcagtgatagaaacttacaaaaaaatttggagaagcatggataacaaaaaaccatctgcatttaccactacttatgaggatggtattaagcgagtaaatcagggtaattatgcgtttttgatggaatccacaatgcttgattacatcgttcagagggattgcaatttgacgcaaatcggaggacttttagatacaaaaggttcgccttggcgagataaaatttcattggctatacttgagcttcaagaaaggggtgacattcaaatgttgtatgataagtggtggaaaaacactgatgaaacatgtactcgcaaaaacacaagcaagcaatctaaagcaaattcacttggtctggagagcataggtacgttttcacaatgcaattggctaatatgtactacagttatattaaggtaaatatgctgtttgattat

SEQ ID NO: 24153 - protein, 656 aa, DROSOPHILA
MYNSELAFRYAIHRLNMDKSLLPETTVDYYVEYVNRFDSFETVQKVCKLIRVGVQAVFSPTDSVLATHINSICDALDIPNIGRFDLETYDLEDFKYNFVNITSFRLVDTADVGVKQILKDIGLYSHHIFKKPYLNLHIKKSTILEPALMFDSVYVFAIGLQTLEQSHSLTLLNISCEEENSWDGGLSLINYLNAVEWKGLTGPIQFKDGQRVQFKLDLIKLKQHSIVKVGEWTPHGHLNITEPSMFFDAGSMNVTLVVITILETPYVMMHYGKNFTGNERFYGFCVDILETISREVGFDYILDLVPDRKYGAKDPETGEWNGMVAQLMKYKADLAVGSMTITYARESVIDFTKPFMNLGISILFKVPTSEPTRLFSFMNPLAIEIWIYVLIAYFLVSLCIYIVGKLSPIEWKCINACDLENISIGNQFSLTDSFWFTIGTFMQQSPDIYPRAMSTRIISSTWGFFSLIIVASYTANLAAFLTTERMINPIENAEDLASQTEISYGTLDSGSTMTFFRDSVIETYKKIWRSMDNKKPSAFTTTYEDGIKRVNQGNYAFLMESTMLDYIVQRDCNLTQIGGLLDTKGSPWRDKISLAILELQERGDIQMLYDKWWKNTDETCTRKNTSKQSKANSLGLESIGTFSQCNWLICTTVILR

SEQ ID NO: 24154 - DNA, 2818 bp, DROSOPHILA
ccaagaaccacaatctgtgcgtgtactcttataattgcagtttttgacgtccgtaccgatgcctcgattcttatttttttcgcaacgaaattagagatggaactgaaccgatgttctatcttatcggtttacctgccgacatcaatgatttccagctctggactaacacgccatctatcgcaacattaatagctgctgttacgggactcactgtaagaaatcgcatcgaaagtgtgcaccagagaactgcagcaagccactggcactccaagtgcacccgctaaacactgttgtatctaggcagccgggtgttttttgacactctacttgcgggaataaaaaatatccgacagttttttattacgagcgcaataaccttttctggtgagcgactcacaagcaacgatcggccgcaggtcattttctgtatgcataaaatttgtatgggcggaagcgagattgtctaagaaatgaagggtgaaagggaacacccaaggaaaaggtcgtgcacgtgtttttttttttttgatgcaacccatttcgcagaatatttttttattaatatttttttatttaaaaattaaattaagttttttaattatacaattacaaagttaaataagggaagcatatattaagaactaataataaaataaaaaaaattgtctatttcgtttttttttaaattatttaattaaattaaaattatttacagttttgtaaaaagaatgtaaaaaagaggctatatacaaattttggacttaatccataatctatactatgcacccctccattccaatttcaattatttaggagtaatttatactttcgatacgacagcaaccgttttatatcggtacgtcttacgaacttctattaaaccaaaaactaagctaaattgcatgtaaaatcattaataacgattatattcagtttggccggaacgccctgctccgcttcatcggtcaaaatgtactaacgcgtggcacacgccacacagctgctgtgacacatatggagtagagtggaacgacatgttgcgcctgtaaaagggaatcagatcgactgggattcaattaaaaggcgagccgcagagctccgaagcgattctgttaggatgggcgaaccgaaagccaccgcagaccctggggaggagcaggccttcaactgcgaggacgaagccaacgccataattaacgatgttaaggctcacgtcgctgagatttgcatctcatccaaactggcaagcgatgccacgcaaatttacctgaacatccggactatcgagagcgccacttgctgcgttcaggtgagcagtcgtggcttcaagatcgtctcctcccagtacgacaccatagacgaggacagccggatctctgcactgcttcgcaacggacaagagcaaggcgacgacgaggaggaggagatatttgaaacgccgtacgcgctgctggacaagatcagcccccgctacgtcgagtcgttcggcaaccagctgtgccagcagcttagagcgctgcaacagatgcgaaccgagttcaacgaggaggacgaggaggaggaggaggaggcggaggaggaggagaagaagtgacggtaaccggactccagctttcaaacgaggctgtttactctttagacagacgattttaatgttagtttaattaaatgtttatttttaatagcagagcttgagctccgacttcctacatatacaaaattgtgtgtttgtgccgcaaaagtatttccgcgtgagttggtcttgcacttctcaattcaccacatcctttccttgcatagcaaacaaatgtcgctccagatccgcgttagaccttaagacgtttcaagaataaagattgtgattgcaactctagctccgtcagtttgcgtacagttggcaccagctgctcgacgtggtcttcgtagccgctgccagttcttaaattcttttgaccgtacacgaccttgccgtcgaagtcattaactggcacatccatggtcttgtccacctgctggatggtgatgttcaagtggtcctcaacttcggccagtaggtttggttcgttgtaccagatgcagcatcctcggacttcggttaagtttgtgttgttgcagctacggccgcgcgacttgcaccactcgccgtggtaccaaaccttctccggcactgttgccaccaaactaatggccaaccccatgcgttccgccctgcccacacgtccgatgcgatgaacgtaattggtcttgtcatcgggcagcgtcacatttatcactgaggataaggaagtaaattatttggaaaatggtttaacgacggttattgtttcaaaatttgagaacttactaaacggcagccccgtaatgtctagaccacgagccgccacgtccgtgcaaatcagaaacttgacttgttgccgcttaaacatttccaggttttctttacgctcctgcggctttcggtcaccatgaaggcagacgcacgagtaatgttttccgcctcgctggcggagaaatctttctaagttatcacagtcttgcttggtgcggcagaagataatggctcggtccatattgtgtttatctatagcgtgcacacagtattcgcccttgagcagcttgactgcctgcgacaacgtctccttcgaatgattgcctggatgaacgttgtcacggtcgtggacgccgtcggtgccaatgggttggcgcagcgactgccaggtggtgtccatctgcgggtcgactagacagacgacgtggtgaaccgtctcagggacagcatcctcccccttcagatccacccaggtggggaagtgcatca

SEQ ID NO: 24155 - DNA, 818 bp, DROSOPHILA
ctgctgtgacacatatggagtagagtggaacgacatgttgcgcctgtaaaagggaatcagatcgactgggattcaattaaaaggcgagccgcagagctccgaagcgattctgttaggatgggcgaaccgaaagccaccgcagaccctggggaggagcaggccttcaactgcgaggacgaagccaacgccataattaacgatgttaaggctcacgtcgctgagatttgcatctcatccaaactggcaagcgatgccacgcaaatttacctgaacatccggactatcgagagcgccacttgctgcgttcaggtgagcagtcgtggcttcaagatcgtctcctcccagtacgacaccatagacgaggacagccggatctctgcactgcttcgcaacggacaagagcaaggcgacgacgaggaggaggagatatttgaaacgccgtacgcgctgctggacaagatcagcccccgctacgtcgagtcgttcggcaaccagctgtgccagcagcttagagcgctgcaacagatgcgaaccgagttcaacgaggaggacgaggaggaggaggaggaggcggaggaggaggagaagaagtgacggtaaccggactccagctttcaaacgaggctgtttactctttagacagacgattttaatgttagtttaattaaatgtttatttttaatagcagagcttgagctccgacttcctacatatacaaaattgtgtgtttgtgccgcaaaagtatttccgcgtgagttggtcttgcacttctcaattcaccacatcctttccttgcatagcaaacaaatgtcgctcca

SEQ ID NO: 24156 - protein, 158 aa, DROSOPHILA
MGEPKATADPGEEQAFNCEDEANAIINDVKAHVAEICISSKLASDATQIYLNIRTIESATCCVQVSSRGFKIVSSQYDTIDEDSRISALLRNGQEQGDDEEEEIFETPYALLDKISPRYVESFGNQLCQQLRALQQMRTEFNEEDEEEEEEAEEEEKK

SEQ ID NO: 24157 - DNA, 3385 bp, DROSOPHILA
cacggcgaatatattgatgtaacaaaagcaatcttcgtcatggtggccagaaatgccaccaatacgggaccggctcccattaatcctatagaggttggcgatgaaaccgagaagctcatttgggagcaggcagagaagcggcaaaaagtgcgcaagtcttctgccatggactcagtgttcaactcgccgcccagggagcacgaacaggccctcatgtacgagatcctcaagagaaccaccccagccaatagtatggatctcaacaagcgtgtgctgccgccgaaatgccgctggatggaggactctatgcagtctacgatgattgctccatttccggagaacaggaatgcgcagaacaccatctttgggggctatctcatgcgccaggccgttgaaatcagcttcataatggctagcatctatctgggcgatcggcccaccctcaggtgcatctcggacattagtttcatgcacccggtgcatgtggatcggttcctccagctcaccgcccacgttgtttacgccgcccagaactacgtccagctgatgaccgtggcccagatttgggatgccaagagcggcaaagtgcagaccaccaatgtcttctacttgacctatcgggcggacaaggtgctggacgaagtcctcccgcgatcctaccgagagatgttgtggtacgtccacggtaggcggaaactcctgggcgctctgcacttgcagccggagtaccccgatcctatcgaagtggccaaagagagctcaaatcatatcagcacttagaattagcgctaatgtaaatcgaagttgtagttgatccaaatatgttaatctgatggaattttaactttatagctgttattttataatttataggatatatcaatgaaataaaattgtagaaaggaatttaaattgatgcttgtgtgcaattattggattttagaaaatgaactaatcgtcacagctggggttctttgatgaaaaggccaaaactttccgttttgtaaggtttattttacaaatcctgttagtctaaccagcgggcgcgcttgtacagtgtttttgctttagaaatccttaaactgaagaaccaaatccatcccctcgcttagaatcgcatgcggtgggggtattgggaggagtgcagggcaaacatgttctgcaagtacttggcgaagaacttgccctcgggatgggccttgatgaccttcagcagggcggcgtccacctccttctggtccttcttgcgctgctcgttgggcacgaagcgctccttcttggccgcgaagatgtcggcctcgccggtcttcttgtccttcttagccttcagacggcggaagtaggcgtcgttcaggtgctcgggcaccttgaaggcaccgagatccaccttcgaggaggtgccgatcacgtagcgctgggacacgcgacgcagcgggcacgagttgagggcgaagggtccggtgaccagcaggagtccggaggccaagaccttcaacaggacgacgcgcttgccctggtggcgtccggccagcaggatgagcacggttccgggggtcaggttgcggcgcgtgttgcgtttgtgctcgctgaagtttgccttggaggggcgcttcttcacgaacgtcttggtcgggtaggaggccttgctcttcttcaggaagaccgtgcgctcaccgccgttcttgggtcctccgatcttcttcaccttcttgatgggcaccttggccttctccacgacggggctcttcttgtccttcaggcggtacagagcacgacgcttgtacatctgaaataggttggaaaagtggttagcttgatccttgatccacaagcctttgaactagggggttattttgtttacgtgtatcactaatacgctccacttgttgcacagtcacaagcaagggcattgaggattattgaacttatttgtgagaagagtaaacaatttaggcaaagtatgcatggtttgtactcatagccacttgaacacacgggaattaaaataaatgcatttggattcaggaaccgcactgacgaatactgagttttcaagtaaaactaactcaaagtgggtggatggtgtgtggtccatcccgcggatagatgagcaagtatcggatcccttggaatcggagaaccacaagtaagccacgctgctgcgccttctcatcgggcggaggcgtcactcgggccagaggccatttccccactgtttccggcgatatttacctgggccttggagtaacgcaggataccgcccttcaggtaggagttgacggggtgcttcttgccctttttggccgacttggccacctttttagctttctcgatgggtgccattgtgaaacacgtgtacacagcacaaaaattattggaaaaggaaggttatgtctagagcggtgtgaccagggcggtcgatacaaaaataccacccggttaccgaagaaataccaattcagtttgtaaacataccatctatataccccaaattaaaacataatttccccagcattgattatttctactcaagagctgaaagttacaaatatagtttcagttcctataacagtggattttaattaacattagaactcatgtttatagcattatttgtgtaatcgggtctgctatcgataaaaaaaatgcacacagtcgcaatataaaaagtatcgcaacgttttaaatctattgcaataaaaatcgataagcttaacggtcgatttattgaatgaccaatttaaaaaattaaacagtcagaaagataaataatccgaaatatgtcagcttaaagataaaataaattgaagacacgccttttcatttaccatttaataatacttttttccatttatttgttgtaatgtgtataatgatttaaatcacgagcttcagctgttttcaaacaacttgttccacatttctttacacaatgatccatttgcttataatgattctggtggacgcctaaagtagagtctaattgttagttacaggatgtaatttaaaataaataaaatgagtggttcgtaatgtacagtatgaattcatttcgtgtggtaactaatcctaaagtgtaaacctcaaccgaatataagctcaaaacttgacgatgggcaattgcccaccatcattgttatcatgaataaaagtagtcgtcaaataaaaactaaatatacaataattgagattttcattcatgtttttgatgttgatacttgcaaatatttaactaactccgcgctaaatacaatgtaaaatttgctagttgttaaaattatgaaatctcagcccgtggcagtcgatggtagaaaaacttagtgctagacatattttcaccgctttcacctttctcttaatcgcctaatcgtcaattggctgttat

SEQ ID NO: 24158 - DNA, 939 bp, DROSOPHILA
tccttttccaataatttttgtgctgtgtacacgtgtttcacaatggcacccatcgagaaagctaaaaaggtggccaagtcggccaaaaagggcaagaagcaccccgtcaactcctacctgaagggcggtatcctgcgttactccaaggcccagatgtacaagcgtcgtgctctgtaccgcctgaaggacaagaagagccccgtcgtggagaaggccaaggtgcccatcaagaaggtgaagaagatcggaggacccaagaacggcggtgagcgcacggtcttcctgaagaagagcaaggcctcctacccgaccaagacgttcgtgaagaagcgcccctccaaggcaaacttcagcgagcacaaacgcaacacgcgccgcaacctgacccccggaaccgtgctcatcctgctggccggacgccaccagggcaagcgcgtcgtcctgttgaaggtcttggcctccggactcctgctggtcaccggacccttcgccctcaactcgtgcccgctgcgtcgcgtgtcccagcgctacgtgatcggcacctcctcgaaggtggatctcggtgccttcaaggtgcccgagcacctgaacgacgcctacttccgccgtctgaaggctaagaaggacaagaagaccggcgaggccgacatcttcgcggccaagaaggagcgcttcgtgcccaacgagcagcgcaagaaggaccagaaggaggtggacgccgccctgctgaaggtcatcaaggcccatcccgagggcaagttcttcgccaagtacttgcagaacatgtttgccctgcactcctcccaatacccccaccgcatgcgattctaagcgaggggatggatttggttcttcagtttaaggatttctaaagcaaaaacactgtacaagcgcgcccgctggttagactaacaggatttgtaaaataaaccttacaaa

SEQ ID NO: 24159 - protein, 262 aa, DROSOPHILA
MAPIEKAKKVAKSAKKGKKHPVNSYLKGGILRYSKAQMYKRRALYRLKDKKSPVVEKAKVPIKKVKKIGGPKNGGERTVFLKKSKASYPTKTFVKKRPSKANFSEHKRNTRRNLTPGTVLILLAGRHQGKRVVLLKVLASGLLLVTGPFALNSCPLRRVSQRYVIGTSSKVDLGAFKVPEHLNDAYFRRLKAKKDKKTGEADIFAAKKERFVPNEQRKKDQKEVDAALLKVIKAHPEGKFFAKYLQNMFALHSSQYPHRMRF

SEQ ID NO: 24160 - DNA, 11477 bp, DROSOPHILA
aaaaaaaacgtatcataccagtcaaccagtaaaagtgatttatcgaccatttgttgagtaactaaaaaaaaccttctatctaatacccccgttttttaaggcttctaccttttcataacaatcggacatcaattaacaaattaagttcaagttgaaggccccttttgcaatcaaggccccgaaaatcagctgataattcgcaagcctttgctcaggtgcaactggaacacaaagttcggggaaacagtgcattgaacttttcgaatgtttatgacgaacttttcgaaacaccgacaaaaccctagaaaacattatcaacgataagatagcaattagggggaaagctagaaaagaaagaaaacaaccgggccgaaatagaaatccaatgacattgaacatccacatctaagttcaatgtgagaattcaaggacgcacaacagctggctaagatatacataggtaagaggtattcgagtatatgcctcacagatatatatatatatgggttttgcataagcgaatactctttccgcgacccttgctgcggtctacgtgcgtgtattttgttgttgcgtctagcgggtattgttgccgattgttgccgaaaaaaaaggcaaaaacaagggcagcgaaaataaaaaacaaattgccacacacacaaacaccacgcatacatatatgtatgtagaatgggcggttcgcagagggggcggacagacgaacggacggacgggcggtgggcgagccagccagtctcatgacaattgtgttgttgccgctctggctgataatggaatcgctaatattctagaaacttgtttacgccaacaagttcagatcgtcatcgacacatttgcttacattcgagattatatatgcgcgtgttggctatgtccaaaatcactaaaaataaagtccggtgatccctgccgcaaagttctttggtccaatttacaattatgtttggaaaactgcccctcttaagataagatcgcagactcacctagaacgcaggccatcgtcgagggcgttggggatgccttcctcaatggtgggcaggtcggaggagaagcggttgatcgggcgcaagacgcgcagcgtgcgactggacagcttccagacaagccgctgcttgtagggcgccttgttctgcccgttgtaatgggacagaatacccgaaacgatgctgaagccgcaggtgaaaacgcgatcaggaatctgtggggcacacgaagccaggacattagagaggttcaagtgaaagttccagtttctcaacgaaactcaccctcatgtactgctgcaggaagagaatgtactcgaagacgtgcttcagctccggactgccgcgggtgtacgactccttgatgtggaagtccaggtgcaggcagatgagcaccagcgccagcgtcgagggcgtgatcaccgtggtcttcacgtcgcacatcaggatctccaggcggttctccagttcctccagcttgatgagctgctggtagaacttgaaaaagtcgccgccgatctccttcgccaagttgcggaagagggcgtagtagatgcgcaggtagctcacagaagtgatcggtgcatgtcccatctggacgcccagcttgttggcaatcacgccggccatgcgttccagatcaccagcggtacaaccacactggaaaaacaaagggagtaagcaccctgctgcgaaaatgaaaaatgttttccaatcacccacctgagatattgtaaccagatcctcggcgggaatgggtttcaagtccagctgcttgatggccaagtggaacgaggccacgctcatgcaggccatgtgcttcggcttgacggccatgcgatccaggaagcggtccaccaggctcatggccgagaacaggacgtcggagggcagctcgtaccacatcttcaggcagcgcagcacgtaggcggatccatctcgtcctccggcagtaacctcacgctgcagaaggaatacatgttatgttggtctccatcttaaaactaaagcagctcactacactcacccttgattccttgggcaacagcagcaccgtgtggaacttgtcctgcaggacgtcgtactccttgagggtttcgtacaactcgtccgaggtgagggcgtgcagctgatcctctagctttttcaaggacgacgacgattcgccgttgttgttgctggctccaccgacggctcctgcctcggactccgccagatcctccagttgttgttgttgttcgtacttctgatattccaagccagcagcacccggtgtcccataccggccctcgtccgcaatcctcatccaatcagttggcatctctgcattgcggttaatgccgttggccagcttgcccccaccgatagcaccacccaatcccgatcccgatcccgcaccagcagatccacccgcggatgcggcagcagcggcggcagcctgggccgaagtcgagggctgctcgtcgtcgaccagaatggcgttgatgctgtgggcgtccatggcgagtccgatgttgttgttgtggggtccgttcaaaagggcggctgggtggtcctggtgatcctggggcaaggctaggcctggcataaccgacgacgacatcgatgtcctctgctgcatcaactgctcctgctgccgcgccgcctgcaactggcaatagtaggcgatatcctgctcccgttggtactggtagtgctggtattgctcgtattgctgttgcaagtgcaactgttgctgctgttgcagagtgctctccaactcacaatcaacttcggcggcgtattcggcggcagcagaggagtagcgtacagggacagacattgtgagggctggcctagtacctgttgtggttttcaaggttgtaatttaaacaagcaacactctttgctggcaaaaagtgtcgggaaagtgcaaaaagaaaactaggcccagatgaaatcgcaaggaggagaagtggaagggagcggaattcgtcctttcgttctcgcagtccttggcaaattttgtttgcttttattttcagctaaacgcggatctcagacttcccaattgggccgatatcaacgagtttatacgaagaaactctcaatctttcgctcaagatccgtgtttgtcatcaacttgcgcttcagggagtccgaaaagaccactggaactctctatcgaaacgccaccgaaaataaaactaatctgtttgctacttgtgctgcacacaccggtctcagaactcagagattttgcttttcgaaaactctggctggttttcagtaacgccagcagttcagtgaccttaatgcaattctttcaacgattggcaaacgggaaacaaacaaaagacaccctctacaatgatggttcaacgacgacagaattgcgggcagtgtaccaaaggacaattcgacagtagctatgtctatataggctatggtcgacttttgatttgtctggcgtacgctgatctcacaaattgtcgcgctaatgaaatggaaaatgtgttcagaaactcaaaaccaagtgagttcctgggcaaagcgctgaattgatggtttattaagtgttcgctcagtgcttttcacgataataaactcgtgcgcttgcctaatttgcttttcagcttttcagcttttacgatagctttgtatgctaggtttttggtttggctaaattcaaataaaacttacgagctgcaaaagttgtttgtgtggggcacagagaaattcaaatattattacagtgtttcaaaataaagtcaatggtggtatggcatgcaaattaattgagtgtgtgcaagtgcattgcactcgttcaccccttttgtgtgctcttcgaaatacacgatgttcagtgcgtttaacgaactttttgaattcagctaaaaaaaaaaaaaaaaaaaaaacacctgtacagtgcaacaaatgcttaccaatggagcaataaacacgatggcattggaattcgttttattttgagcaatgctctactcaaatcgagcgaccgacctcagccagtgacacattttattcaaatcgctcggttacaaggttgttttatgggaagtaggagaaggagggggtctgggactcgatgtggcgcccaaggcgaaccacgtaaatagatcgagatcgaggcaagtaatcaaagcatgaatagaatcggacagcagacatactttgatcttaattattcggatacgtttggtaggctttgataaacgaccttgctgctttggatttcatatacttgaaataaaccaataagttcgactagtagtaccagaactatagctattcaaaactttcctaatcgaatcgatccactcctttgccacagccaagagcaaacaaactcgaatgggtaaacaacaatatattagatccctgagtacttctatatcacttcacacttccgccagacaagagctgtgcccaaaagcccgcgattaaaacttgagcaaacgcaaagcccgacaagggagagcaatctacatatgaacacttgagcaaacatcaccatattgtgtgctagtttagtacggtcagaggaaaatccaaagattgctgcctgcctccaatgctttctctttcatcggaaaccaaaacataaacttcacatggtgtaaacaatgcgatgatagatgacataaacccagctaagccaaacactcgagaaactaccaaactatcaaatggcgatggtaaattggtaaataaagcccagacaattggctccagatgtggtcggtatctggcagtgatgagggatcgtctggttatttttagaaaagcaacaaggaggaaaccgaactgcttccgatcacaagaactatctgcccctgagccactggcgccaagggtttcgtatcttttggcatttcgatcgtcctcaatctgcatacgttaacaaccacaagtgagggtatttaaagcgtttaacctgcttcatggcaaaccagataagcaaggctgcttattagcaaaacaaacagcagctaaaagcaagtacgagcggagaaatccaaaataaaaacacatctttgctggcatacctcgaatactaaaaaattttactttatcgagtcgcgttattgggcaatccaagtccatatgccaatctttcaattcggactctgagaatccgaattcgatgaaccaggtcagagaatcattttcgaccgcgccctgaatcatctttcaatacgccaacatagccatgaatcagatgcgggttgtgtgacacacagggagtgtatgtatgtgactccattgaaaatgaatcgaaatatttgtgcattgacagcaaagacttccgttttctggggtttctcttgatcagatctatttataagacccagacgaaaacagccaataacaataaccgaataaaactagctttgggcccgcaattcaaggtcgcccacccaccaaaaaaaacccgttccaagggtcgggggagatccagcaaagtttttggctcgaaagctgctgagccaagcacgaaagaaatatggagatcgcggcttgaagagagcttaaaagtaaatcagaaaaaagcttccgtcgagaaaataagtgataacggtagacaaggtggttaaagttcaactttatgctctgctgaccataaaaacaatgaacaaaagcatatatcaatgggcaacataggtcgaaagtctacacactctggaaaattatttaaaaaaggctattgtaaaatccatccctttcaaaaaatggttattgtaataaaagagcaggcgattagattttggcatttgttgctatcaatactgagattagttgataacaacatccgacgcttgttttccttaccctccagttaccataaaattccacccgttccactggtggttccactgtacagtagagatagagcgagaacaaaaagctttttgttatacaaaccacattttgagctagacaaaaagttatcgcacttttgatctctagcaaggttttctgctcgaatgcagttgtacttaaaatggttatgtatatgaacgccagatttctcaactgagttatttcttattttcttatttttcgtttgacggcttgttttacgttgtttttcttttttggcgcgcgctccgctgacgcaaaaagcacgtacgcacacgcgaataagcaaagtatctgtgtagccatatttttaatgttgttgttaaaaataccagcagaagcgcacaaaaatttcactttttacctattttcgtaacaggcgaaaggcggcggagggcgtggcaccactacctgggcagacaggcaggtgcgaactattttcgtgacttcgctttgtttttatctaggcaccaacaacgccgcaaatccctcaactgcaattgaaagttaagctacgggtgcggctgacaggtaaaaagatgcgtttccaaatcgaaagcgcgcggatcgtaaacaaaagcctaaaagccaaacgcgaaatatttccactgcaaacatatgatcgtcggaaattgttttcaatttgtacgccttgcgctctgccttccgtttacttggcttttttacttgaagcgagcggttggattgttcatttatcatcgtcatcgactgatgaaggtcagcaaatgacagccgaagagagagtgagatcggtgctgcagattgcgggaaagagatggccagagagaccatacaaagccagcttttcatcgaagaaattgaaacgtgaccagagacaggcttcaaatggcagaagaaatggtgagcgtgagcaagttctaggctgcatttcgaatttcgattgttttcctatcattttcacaatacaatatcctaaatgtggcatcatatgtggagggatgcaactttgagtttaggcgccaaataaaattgtctccgcctcaaattttctttcattcgttgtttcctgcttaaataaacctgaagcagccgaaaaaaaaatcgttgtcaacccctaagaaacctgaacagttcgactttaaaaaggtgtacggatgtgtgactttgtcgcgggccataattaacggatggaagaaggaaattgcccagccagttgactcaggggtggctctactccaccgagcaaccccaaaagcgttcaaatccaccctgctgacagacaggccagagctcggaatttgaatttcccagatgacccagcacaagtggcggggaaattaaatgaatagatcttgcagcagctgcattggcatgtgctgcaaaagatacgaaagatacactaacgaacaaagaaaagaaaagaaaagacctcgaaagaaaaaaagaaaaagatcattgcactggggttggctggatttggaaatagtgccaccaccacatctatcaggcgatcgacctttgccaagcctgttttccagtgccctctcgtagcttccttggttttggaatcaatgttttcgtcggctatctgccaatggactagcgatttgcacccgcgcactgaccattatcaacggaaatgcagtacaagaatttctctgacgtgaagcgaacgtgcccaaagtcggagtcactgcagcgtcggctgagcgtctgaggagcgtgcccaaaaggaatgataagcgagtgctaatcgcggtcaacgcagtcgtagttcaaagtcccaaaataacaaagggacggggacgctagttggttttttgaatatatatgatcgaacacaaaggcagtggtctaatgattcattctcctgaagagctgggttaccatgctatcagaaattgcatttgtttgggtacttttagaaatattcgtgtatccaagtgcaagaggatccctcgaccaagtaaatagcaaagctcatgttccgcaggaaattttccaggcgtaattggagaaaatttcctccctatagaggcttctatgtttatcggcgtaattgctggcctcaagttatcgcatgggcttaattacgactgtaggctgtattccctgtacacgcgttctatatccaaggttcctttggctgacatttagataactggctggtggtacactgcaatcccattgatgacttatagaccgggattcgcttatcggagaagaggcggacgtttcgtaacattccatgacgtaagtacatgggttcgatagataaagcggctcgatcttatcgcatttgtcacaaaacccatagaaatgcctccagaggagagcagctgcagtgcaaatagagggaaagggcagctgcagtcgggaccatgggatttatttcgtcacctttcgtgaaattcaattagaaaggggtgggactcgaaaagtcgcctggcacgagctggaaatggggggaaagtcgaagggaagggggttgaaatcggttcagttgagtgctttttctgggttttctggctttgaatctccgggaatgggaatcgtggtatatatgtacatatggctttttgggatggtcagctgtctctcaagtgttggcattgaatttcactttgggccgtctgtcgttttgcagacacacgaatttcatggcatactgaaatcgaagaaaacaggtagaaagcagacgatatctgctaaaaaggcgccaccctaaccacaagtggaagccaaatagatgtcagctggatttcgggttatttagccttaaactaatcattttggttcaatggctttaggggaatatataaacgggaattgtaagttaatctctttattccaaaagcgacttacttagtagacgtgacccaaatagttggacattgcccacctaagggttaatgatgaattctccccttttcacacccgttcccatctctattcattccacaaagaaggtaggcagagaatagaagagacctttttacatgtaaacaagtgtggagaggaataaataaaacaacggtacagcaacacccacacacccacaccaacccaactgtttcattagtatgcgtgcgtggggtcgttttatgcgttgtatttatattattttggaggctatggaaaatatgaaaatcaacaaattaagcaattctgcgcgactttgcgactgcgcaacaaattgaaatcaacaaatatgacccagaaaacaaagtaaatgcgctgaaggtgaaatcaggagaaacggggtacaaaacggaatgtaatagcagttgttacttgtgttttccagaaacaagttgcttcctaaaatgagcaaaagtgtttttgaaacgaaaacaagtagttttatccgtcgcacatattttatttttggctgacgcaattccaagccagagcacgcacactcccaaaccaatcaagttgctgtgctggtgtgagtgtgtgtatgaggtaaaaatccgaatgggaacaacatacacacatacaaagtctttgtttgcagctcgcgtgtgtgtacgatggcaagggaactttggaagcggaacacacaaattgtggggagaacaacaaaggaaaaggggaatatgaagtaaaacaattgacgcaaattggaaataaaacagatatgcaaatgggggaaggcaataggaatgggttttctaggcgaataaggcggtgccaaggaaacaaaggcgtacattagtctcattacatatgtatgttgtacagcttgcataaaaagcacagcccctcaaacacacataccactgcaagcagcatagttcctcgcccacccctcgttcgaccctctcgctcactctgtaagcaacgacctacgaatagcggaccccaaatccactctctcgcttacacacacaaacaccagacaaacagctgtgaaacaaatggaagcgaaacaaacacgtaaatgaacgaattttgtatgtatgcctaatataatttcttttttcctacaaacaaaatcatctgatagatgaagaaaaaaaccttgattctctttttgcattttatcgacttttccactcttaaataaatttagcattttcttacgtttttacagccattttgttgttttgtgttgcgcaggaatgttgagatgaactttgtttagttgtgaatttttgcttctattgcactcgaaaataagtgaataaattggctggcagctttacgcttattcaattgcgtcagatagttagctataaaaccttgtcgttggccatttaagctagttgttaactaatttgtactgcgtttgtatcacaattggaactctgtttattaggctggcattttatcctcaatttttcccgtctgcggatcgatttttcccacacacactgggctgaaggtgcttgggacttttctccatcagctgtgcattttcctcctgctgattttttttagttctgctttagcaaagctttgtacgtttgcacttggtccttttcaatttctattttctattcctaagcaaacaaacacattcaaacactcgcgctcgcaaaaacggtacttctccgctttgttgtttttttacgaatgaagaatattgtgagcgaccagtgttaccagtaggcctacaagttccacagatttggtgcgaactgaaatttgtactataaaataccctaagccagcggaagcgatagtccctcactatcgatgtgtatgttattcgattctctctgttaactaacatttcgctgtaatgttatcgaaccctaataagcccgcaataattcttttttgatgtcgaacaattttgaacaccgaactcaaataagcccgcaataattctttttggtgtcgaacaattttcaacaccgtaagcctgatagggattaaataataactttatgcttctgaatgcgggatgtagacaattttatgacaagtgatttaattagttagggaattaaaaaatatgagggcaacaaatcctcgaagttaaattgagttcccaaattactattacaaatggaagcttctgttttggcagggaatcgcaaacttcccacacataatttcacaatcaatgtcattgccaaaatataaacatatttacatatgtacgccgcaaatcgaaattccgttcagataagcgttgaaattacgcattttgataagatattttgaagatggaaactacgcagcaaactgttttacaaaagccggagaaatgcatttccggcgaaaaggaaattcgttactgttgccaagtgaacattttcaagagaagaggggaagggggtggtctatttcaggccccactacacacacatgcatatttctagaaacaacctgtcacacaaacgactcatcaacggcaattttttatgaatgaattttagcaattaaagcaatggaaagaaacttttcaatgggaatgcgaaaacatcaattaacttgttgcacaagatgttcagccttcgattttccccaatctcaacgataagaaactttcctcaatttcgtcacacacacacacacatgcgaatgggaaaaaacgcgtggcgattgattttcggcctttcaaaaagttcgttttacgcactgaacagcccgcgaaatgagtgtaagtcggtgtaa

SEQ ID NO: 24161 - DNA, 2191 bp, DROSOPHILA
tggaacttgtaggcctactggtaacactggtcgctcacaatattcttcattcgtaaaaaaacaacaaagcggagaagtaccgtttttgcgagcgcgagtgtttgaatgtgtttgtttgcttaggaatagaaaatagaaattgaaaaggaccaagtgcaaacgtacaaagctttgctaaagcagaactaaaaaaaatcagcaggaggaaaatgcacagctgatggagaaaagtcccaagcaccttcagcccagtgtgtgtgggaaaaatcgatccgcagacgggaaaaattgaggataaaatgccagcctaataaacagagttccaattgtgatacaaacgcagtacaaattagttaacaactagcttaaatggccaacgacaaggttttatagctaactatctgacgcaattgaataagcgtaaagctgccagccaatttattcacttattttcgagtgcaatagaagcaaaaattcacaactaaacaaagttcatctcaacattcctgcgcaacacaaaacaacaaaatggctgtaaaaacgtactaggccagccctcacaatgtctgtccctgtacgctactcctctgctgccgccgaatacgccgccgaagttgattgtgagttggagagcactctgcaacagcagcaacagttgcacttgcaacagcaatacgagcaataccagcactaccagtaccaacgggagcaggatatcgcctactattgccagttgcaggcggcgcggcagcaggagcagttgatgcagcagaggacatcgatgtcgtcgtcggttatgccaggcctagccttgccccaggatcaccaggaccacccagccgcccttttgaacggaccccacaacaacaacatcggactcgccatggacgcccacagcatcaacgccattctggtcgacgacgagcagccctcgacttcggcccaggctgccgccgctgctgccgcatccgcgggtggatctgctggtgcgggatcgggatcgggattgggtggtgctatcggtgggggcaagctggccaacggcattaaccgcaatgcagagatgccaactgattggatgaggattgcggacgagggccggtatgggacaccgggtgctgctggcttggaatatcagaagtacgaacaacaacaacaactggaggatctggcggagtccgaggcaggagccgtcggtggagccagcaacaacaacggcgaatcgtcgtcgtccttgaaaaagctagaggatcagctgcacgccctcacctcggacgagttgtacgaaaccctcaaggagtacgacgtcctgcaggacaagttccacacggtgctgctgttgcccaaggaatcaaggcgtgaggttactgccggaggacgagatggatccgcctacgtgctgcgctgcctgaagatgtggtacgagctgccctccgacgtcctgttctcggccatgagcctggtggaccgcttcctggatcgcatggccgtcaagccgaagcacatggcctgcatgagcgtggcctcgttccacttggccatcaagcagctggacttgaaacccattcccgccgaggatctggttacaatatctcagtgtggttgtaccgctggtgatctggaacgcatggccggcgtgattgccaacaagctgggcgtccagatgggacatgcaccgatcacttctgtgagctacctgcgcatctactacgccctcttccgcaacttggcgaaggagatcggcggcgactttttcaagttctaccagcagctcatcaagctggaggaactggagaaccgcctggagatcctgatgtgcgacgtgaagaccacggtgatcacgccctcgacgctggcgctggtgctcatctgcctgcacctggacttccacatcaaggagtcgtacacccgcggcagtccggagctgaagcacgtcttcgagtacattctcttcctgcagcagtacatgaggattcctgatcgcgttttcacctgcggcttcagcatcgtttcgggtattctgtcccattacaacgggcagaacaaggcgccctacaagcagcggcttgtctggaagctgtccagtcgcacgctgcgcgtcttgcgcccgatcaaccgcttctcctccgacctgcccaccattgaggaaggcatccccaacgccctcgacgatggcctgcgttctaggtga

SEQ ID NO: 24162 - protein, 542 aa, DROSOPHILA
MSVPVRYSSAAAEYAAEVDCELESTLQQQQQLHLQQQYEQYQHYQYQREQDIAYYCQLQAARQQEQLMQQRTSMSSSVMPGLALPQDHQDHPAALLNGPHNNNIGLAMDAHSINAILVDDEQPSTSAQAAAAAAASAGGSAGAGSGSGLGGAIGGGKLANGINRNAEMPTDWMRIADEGRYGTPGAAGLEYQKYEQQQQLEDLAESEAGAVGGASNNNGESSSSLKKLEDQLHALTSDELYETLKEYDVLQDKFHTVLLLPKESRREVTAGGRDGSAYVLRCLKMWYELPSDVLFSAMSLVDRFLDRMAVKPKHMACMSVASFHLAIKQLDLKPIPAEDLVTISQCGCTAGDLERMAGVIANKLGVQMGHAPITSVSYLRIYYALFRNLAKEIGGDFFKFYQQLIKLEELENRLEILMCDVKTTVITPSTLALVLICLHLDFHIKESYTRGSPELKHVFEYILFLQQYMRIPDRVFTCGFSIVSGILSHYNGQNKAPYKQRLVWKLSSRTLRVLRPINRFSSDLPTIEEGIPNALDDGLRSR

SEQ ID NO: 24163 - DNA, 12600 bp, DROSOPHILA
aaaaaaaacgtatcataccagtcaaccagtaaaagtgatttatcgaccatttgttgagtaactaaaaaaaaccttctatctaatacccccgttttttaaggcttctaccttttcataacaatcggacatcaattaacaaattaagttcaagttgaaggccccttttgcaatcaaggccccgaaaatcagctgataattcgcaagcctttgctcaggtgcaactggaacacaaagttcggggaaacagtgcattgaacttttcgaatgtttatgacgaacttttcgaaacaccgacaaaaccctagaaaacattatcaacgataagatagcaattagggggaaagctagaaaagaaagaaaacaaccgggccgaaatagaaatccaatgacattgaacatccacatctaagttcaatgtgagaattcaaggacgcacaacagctggctaagatatacataggtaagaggtattcgagtatatgcctcacagatatatatatatatgggttttgcataagcgaatactctttccgcgacccttgctgcggtctacgtgcgtgtattttgttgttgcgtctagcgggtattgttgccgattgttgccgaaaaaaaaggcaaaaacaagggcagcgaaaataaaaaacaaattgccacacacacaaacaccacgcatacatatatgtatgtagaatgggcggttcgcagagggggcggacagacgaacggacggacgggcggtgggcgagccagccagtctcatgacaattgtgttgttgccgctctggctgataatggaatcgctaatattctagaaacttgtttacgccaacaagttcagatcgtcatcgacacatttgcttacattcgagattatatatgcgcgtgttggctatgtccaaaatcactaaaaataaagtccggtgatccctgccgcaaagttctttggtccaatttacaattatgtttggaaaactgcccctcttaagataagatcgcagactcacctagaacgcaggccatcgtcgagggcgttggggatgccttcctcaatggtgggcaggtcggaggagaagcggttgatcgggcgcaagacgcgcagcgtgcgactggacagcttccagacaagccgctgcttgtagggcgccttgttctgcccgttgtaatgggacagaatacccgaaacgatgctgaagccgcaggtgaaaacgcgatcaggaatctgtggggcacacgaagccaggacattagagaggttcaagtgaaagttccagtttctcaacgaaactcaccctcatgtactgctgcaggaagagaatgtactcgaagacgtgcttcagctccggactgccgcgggtgtacgactccttgatgtggaagtccaggtgcaggcagatgagcaccagcgccagcgtcgagggcgtgatcaccgtggtcttcacgtcgcacatcaggatctccaggcggttctccagttcctccagcttgatgagctgctggtagaacttgaaaaagtcgccgccgatctccttcgccaagttgcggaagagggcgtagtagatgcgcaggtagctcacagaagtgatcggtgcatgtcccatctggacgcccagcttgttggcaatcacgccggccatgcgttccagatcaccagcggtacaaccacactggaaaaacaaagggagtaagcaccctgctgcgaaaatgaaaaatgttttccaatcacccacctgagatattgtaaccagatcctcggcgggaatgggtttcaagtccagctgcttgatggccaagtggaacgaggccacgctcatgcaggccatgtgcttcggcttgacggccatgcgatccaggaagcggtccaccaggctcatggccgagaacaggacgtcggagggcagctcgtaccacatcttcaggcagcgcagcacgtaggcggatccatctcgtcctccggcagtaacctcacgctgcagaaggaatacatgttatgttggtctccatcttaaaactaaagcagctcactacactcacccttgattccttgggcaacagcagcaccgtgtggaacttgtcctgcaggacgtcgtactccttgagggtttcgtacaactcgtccgaggtgagggcgtgcagctgatcctctagctttttcaaggacgacgacgattcgccgttgttgttgctggctccaccgacggctcctgcctcggactccgccagatcctccagttgttgttgttgttcgtacttctgatattccaagccagcagcacccggtgtcccataccggccctcgtccgcaatcctcatccaatcagttggcatctctgcattgcggttaatgccgttggccagcttgcccccaccgatagcaccacccaatcccgatcccgatcccgcaccagcagatccacccgcggatgcggcagcagcggcggcagcctgggccgaagtcgagggctgctcgtcgtcgaccagaatggcgttgatgctgtgggcgtccatggcgagtccgatgttgttgttgtggggtccgttcaaaagggcggctgggtggtcctggtgatcctggggcaaggctaggcctggcataaccgacgacgacatcgatgtcctctgctgcatcaactgctcctgctgccgcgccgcctgcaactggcaatagtaggcgatatcctgctcccgttggtactggtagtgctggtattgctcgtattgctgttgcaagtgcaactgttgctgctgttgcagagtgctctccaactcacaatcaacttcggcggcgtattcggcggcagcagaggagtagcgtacagggacagacattgtgagggctggcctagtacctgttgtggttttcaaggttgtaatttaaacaagcaacactctttgctggcaaaaagtgtcgggaaagtgcaaaaagaaaactaggcccagatgaaatcgcaaggaggagaagtggaagggagcggaattcgtcctttcgttctcgcagtccttggcaaattttgtttgcttttattttcagctaaacgcggatctcagacttcccaattgggccgatatcaacgagtttatacgaagaaactctcaatctttcgctcaagatccgtgtttgtcatcaacttgcgcttcagggagtccgaaaagaccactggaactctctatcgaaacgccaccgaaaataaaactaatctgtttgctacttgtgctgcacacaccggtctcagaactcagagattttgcttttcgaaaactctggctggttttcagtaacgccagcagttcagtgaccttaatgcaattctttcaacgattggcaaacgggaaacaaacaaaagacaccctctacaatgatggttcaacgacgacagaattgcgggcagtgtaccaaaggacaattcgacagtagctatgtctatataggctatggtcgacttttgatttgtctggcgtacgctgatctcacaaattgtcgcgctaatgaaatggaaaatgtgttcagaaactcaaaaccaagtgagttcctgggcaaagcgctgaattgatggtttattaagtgttcgctcagtgcttttcacgataataaactcgtgcgcttgcctaatttgcttttcagcttttcagcttttacgatagctttgtatgctaggtttttggtttggctaaattcaaataaaacttacgagctgcaaaagttgtttgtgtggggcacagagaaattcaaatattattacagtgtttcaaaataaagtcaatggtggtatggcatgcaaattaattgagtgtgtgcaagtgcattgcactcgttcaccccttttgtgtgctcttcgaaatacacgatgttcagtgcgtttaacgaactttttgaattcagctaaaaaaaaaaaaaaaaaaaaaacacctgtacagtgcaacaaatgcttaccaatggagcaataaacacgatggcattggaattcgttttattttgagcaatgctctactcaaatcgagcgaccgacctcagccagtgacacattttattcaaatcgctcggttacaaggttgttttatgggaagtaggagaaggagggggtctgggactcgatgtggcgcccaaggcgaaccacgtaaatagatcgagatcgaggcaagtaatcaaagcatgaatagaatcggacagcagacatactttgatcttaattattcggatacgtttggtaggctttgataaacgaccttgctgctttggatttcatatacttgaaataaaccaataagttcgactagtagtaccagaactatagctattcaaaactttcctaatcgaatcgatccactcctttgccacagccaagagcaaacaaactcgaatgggtaaacaacaatatattagatccctgagtacttctatatcacttcacacttccgccagacaagagctgtgcccaaaagcccgcgattaaaacttgagcaaacgcaaagcccgacaagggagagcaatctacatatgaacacttgagcaaacatcaccatattgtgtgctagtttagtacggtcagaggaaaatccaaagattgctgcctgcctccaatgctttctctttcatcggaaaccaaaacataaacttcacatggtgtaaacaatgcgatgatagatgacataaacccagctaagccaaacactcgagaaactaccaaactatcaaatggcgatggtaaattggtaaataaagcccagacaattggctccagatgtggtcggtatctggcagtgatgagggatcgtctggttatttttagaaaagcaacaaggaggaaaccgaactgcttccgatcacaagaactatctgcccctgagccactggcgccaagggtttcgtatcttttggcatttcgatcgtcctcaatctgcatacgttaacaaccacaagtgagggtatttaaagcgtttaacctgcttcatggcaaaccagataagcaaggctgcttattagcaaaacaaacagcagctaaaagcaagtacgagcggagaaatccaaaataaaaacacatctttgctggcatacctcgaatactaaaaaattttactttatcgagtcgcgttattgggcaatccaagtccatatgccaatctttcaattcggactctgagaatccgaattcgatgaaccaggtcagagaatcattttcgaccgcgccctgaatcatctttcaatacgccaacatagccatgaatcagatgcgggttgtgtgacacacagggagtgtatgtatgtgactccattgaaaatgaatcgaaatatttgtgcattgacagcaaagacttccgttttctggggtttctcttgatcagatctatttataagacccagacgaaaacagccaataacaataaccgaataaaactagctttgggcccgcaattcaaggtcgcccacccaccaaaaaaaacccgttccaagggtcgggggagatccagcaaagtttttggctcgaaagctgctgagccaagcacgaaagaaatatggagatcgcggcttgaagagagcttaaaagtaaatcagaaaaaagcttccgtcgagaaaataagtgataacggtagacaaggtggttaaagttcaactttatgctctgctgaccataaaaacaatgaacaaaagcatatatcaatgggcaacataggtcgaaagtctacacactctggaaaattatttaaaaaaggctattgtaaaatccatccctttcaaaaaatggttattgtaataaaagagcaggcgattagattttggcatttgttgctatcaatactgagattagttgataacaacatccgacgcttgttttccttaccctccagttaccataaaattccacccgttccactggtggttccactgtacagtagagatagagcgagaacaaaaagctttttgttatacaaaccacattttgagctagacaaaaagttatcgcacttttgatctctagcaaggttttctgctcgaatgcagttgtacttaaaatggttatgtatatgaacgccagatttctcaactgagttatttcttattttcttatttttcgtttgacggcttgttttacgttgtttttcttttttggcgcgcgctccgctgacgcaaaaagcacgtacgcacacgcgaataagcaaagtatctgtgtagccatatttttaatgttgttgttaaaaataccagcagaagcgcacaaaaatttcactttttacctattttcgtaacaggcgaaaggcggcggagggcgtggcaccactacctgggcagacaggcaggtgcgaactattttcgtgacttcgctttgtttttatctaggcaccaacaacgccgcaaatccctcaactgcaattgaaagttaagctacgggtgcggctgacaggtaaaaagatgcgtttccaaatcgaaagcgcgcggatcgtaaacaaaagcctaaaagccaaacgcgaaatatttccactgcaaacatatgatcgtcggaaattgttttcaatttgtacgccttgcgctctgccttccgtttacttggcttttttacttgaagcgagcggttggattgttcatttatcatcgtcatcgactgatgaaggtcagcaaatgacagccgaagagagagtgagatcggtgctgcagattgcgggaaagagatggccagagagaccatacaaagccagcttttcatcgaagaaattgaaacgtgaccagagacaggcttcaaatggcagaagaaatggtgagcgtgagcaagttctaggctgcatttcgaatttcgattgttttcctatcattttcacaatacaatatcctaaatgtggcatcatatgtggagggatgcaactttgagtttaggcgccaaataaaattgtctccgcctcaaattttctttcattcgttgtttcctgcttaaataaacctgaagcagccgaaaaaaaaatcgttgtcaacccctaagaaacctgaacagttcgactttaaaaaggtgtacggatgtgtgactttgtcgcgggccataattaacggatggaagaaggaaattgcccagccagttgactcaggggtggctctactccaccgagcaaccccaaaagcgttcaaatccaccctgctgacagacaggccagagctcggaatttgaatttcccagatgacccagcacaagtggcggggaaattaaatgaatagatcttgcagcagctgcattggcatgtgctgcaaaagatacgaaagatacactaacgaacaaagaaaagaaaagaaaagacctcgaaagaaaaaaagaaaaagatcattgcactggggttggctggatttggaaatagtgccaccaccacatctatcaggcgatcgacctttgccaagcctgttttccagtgccctctcgtagcttccttggttttggaatcaatgttttcgtcggctatctgccaatggactagcgatttgcacccgcgcactgaccattatcaacggaaatgcagtacaagaatttctctgacgtgaagcgaacgtgcccaaagtcggagtcactgcagcgtcggctgagcgtctgaggagcgtgcccaaaaggaatgataagcgagtgctaatcgcggtcaacgcagtcgtagttcaaagtcccaaaataacaaagggacggggacgctagttggttttttgaatatatatgatcgaacacaaaggcagtggtctaatgattcattctcctgaagagctgggttaccatgctatcagaaattgcatttgtttgggtacttttagaaatattcgtgtatccaagtgcaagaggatccctcgaccaagtaaatagcaaagctcatgttccgcaggaaattttccaggcgtaattggagaaaatttcctccctatagaggcttctatgtttatcggcgtaattgctggcctcaagttatcgcatgggcttaattacgactgtaggctgtattccctgtacacgcgttctatatccaaggttcctttggctgacatttagataactggctggtggtacactgcaatcccattgatgacttatagaccgggattcgcttatcggagaagaggcggacgtttcgtaacattccatgacgtaagtacatgggttcgatagataaagcggctcgatcttatcgcatttgtcacaaaacccatagaaatgcctccagaggagagcagctgcagtgcaaatagagggaaagggcagctgcagtcgggaccatgggatttatttcgtcacctttcgtgaaattcaattagaaaggggtgggactcgaaaagtcgcctggcacgagctggaaatggggggaaagtcgaagggaagggggttgaaatcggttcagttgagtgctttttctgggttttctggctttgaatctccgggaatgggaatcgtggtatatatgtacatatggctttttgggatggtcagctgtctctcaagtgttggcattgaatttcactttgggccgtctgtcgttttgcagacacacgaatttcatggcatactgaaatcgaagaaaacaggtagaaagcagacgatatctgctaaaaaggcgccaccctaaccacaagtggaagccaaatagatgtcagctggatttcgggttatttagccttaaactaatcattttggttcaatggctttaggggaatatataaacgggaattgtaagttaatctctttattccaaaagcgacttacttagtagacgtgacccaaatagttggacattgcccacctaagggttaatgatgaattctccccttttcacacccgttcccatctctattcattccacaaagaaggtaggcagagaatagaagagacctttttacatgtaaacaagtgtggagaggaataaataaaacaacggtacagcaacacccacacacccacaccaacccaactgtttcattagtatgcgtgcgtggggtcgttttatgcgttgtatttatattattttggaggctatggaaaatatgaaaatcaacaaattaagcaattctgcgcgactttgcgactgcgcaacaaattgaaatcaacaaatatgacccagaaaacaaagtaaatgcgctgaaggtgaaatcaggagaaacggggtacaaaacggaatgtaatagcagttgttacttgtgttttccagaaacaagttgcttcctaaaatgagcaaaagtgtttttgaaacgaaaacaagtagttttatccgtcgcacatattttatttttggctgacgcaattccaagccagagcacgcacactcccaaaccaatcaagttgctgtgctggtgtgagtgtgtgtatgaggtaaaaatccgaatgggaacaacatacacacatacaaagtctttgtttgcagctcgcgtgtgtgtacgatggcaagggaactttggaagcggaacacacaaattgtggggagaacaacaaaggaaaaggggaatatgaagtaaaacaattgacgcaaattggaaataaaacagatatgcaaatgggggaaggcaataggaatgggttttctaggcgaataaggcggtgccaaggaaacaaaggcgtacattagtctcattacatatgtatgttgtacagcttgcataaaaagcacagcccctcaaacacacataccactgcaagcagcatagttcctcgcccacccctcgttcgaccctctcgctcactctgtaagcaacgacctacgaatagcggaccccaaatccactctctcgcttacacacacaaacaccagacaaacagctgtgaaacaaatggaagcgaaacaaacacgtaaatgaacgaattttgtatgtatgcctaatataatttcttttttcctacaaacaaaatcatctgatagatgaagaaaaaaaccttgattctctttttgcattttatcgacttttccactcttaaataaatttagcattttcttacgtttttacagccattttgttgttttgtgttgcgcaggaatgttgagatgaactttgtttagttgtgaatttttgcttctattgcactcgaaaataagtgaataaattggctggcagctttacgcttattcaattgcgtcagatagttagctataaaaccttgtcgttggccatttaagctagttgttaactaatttgtactgcgtttgtatcacaattggaactctgtttattaggctggcattttatcctcaatttttcccgtctgcggatcgatttttcccacacacactgggctgaaggtgcttgggacttttctccatcagctgtgcattttcctcctgctgattttttttagttctgctttagcaaagctttgtacgtttgcacttggtccttttcaatttctattttctattcctaagcaaacaaacacattcaaacactcgcgctcgcaaaaacggtacttctccgctttgttgtttttttacgaatgaagaatattgtgagcgaccagtgttaccagtaggcctacaagttccacagatttggtgcgaactgaaatttgtactataaaataccctaagccagcggaagcgatagtccctcactatcgatgtgtatgttattcgattctctctgttaactaacatttcgctgtaatgttatcgaaccctaataagcccgcaataattcttttttgatgtcgaacaattttgaacaccgaactcaaataagcccgcaataattctttttggtgtcgaacaattttcaacaccgtaagcctgatagggattaaataataactttatgcttctgaatgcgggatgtagacaattttatgacaagtgatttaattagttagggaattaaaaaatatgagggcaacaaatcctcgaagttaaattgagttcccaaattactattacaaatggaagcttctgttttggcagggaatcgcaaacttcccacacataatttcacaatcaatgtcattgccaaaatataaacatatttacatatgtacgccgcaaatcgaaattccgttcagataagcgttgaaattacgcattttgataagatattttgaagatggaaactacgcagcaaactgttttacaaaagccggagaaatgcatttccggcgaaaaggaaattcgttactgttgccaagtgaacattttcaagagaagaggggaagggggtggtctatttcaggccccactacacacacatgcatatttctagaaacaacctgtcacacaaacgactcatcaacggcaattttttatgaatgaattttagcaattaaagcaatggaaagaaacttttcaatgggaatgcgaaaacatcaattaacttgttgcacaagatgttcagccttcgattttccccaatctcaacgataagaaactttcctcaatttcgtcacacacacacacacatgcgaatgggaaaaaacgcgtggcgattgattttcggcctttcaaaaagttcgttttacgcactgaacagcccgcgaaatgagtgtaagtcggtgtaacaaatctcatggcacttacccggatgcctctgcgttttgatcagtatctgcttttcttgcttcttatttccaaaaaatataaacttattctcaaatcaaatcttcgagaactgaccaaactaggtgtttgtaaaaatccaaggtaggtatttcgcgctttgcccatctggcaacgcccgcccatgttgtatcgcgaaacggtcactctgcacagccgcaacaaaataaaaaaggaaaaaaaggcaaattggctggaaaactggatttcgtcgggcggaaaattgtactttcgagtttcccaagcagccaattaagtgcaaactatgaaattccacgaaaaacagtaaaagccagtctctaccaaggatttgagcaggaaacttctcgctgggcgtgtgtgtgtgcagtgcgtgtgccagtgtgcgtaaagaaggaggtggagaagacgaaggagaggagagttttcgcagggaaattacgccaactttgtgggagttcaagtcgagttagttcagcgcgcgcgtgtgtgtgtgtatgcgtgtgtgcaacaccccccaagcccactcacacaaagccatccagccgccgtttgttttgtgctcacattcgcgtgccgcctttgtttggcttttctttggccagtgattctacgccttgtttttgcccgccgccggcttcgattacgcctgctccagccaccgtacgatccccactccgctctccgccgctcacgatccccattccggatccggatccagcaacaacgccgccgtggatgcccatgctcgcactctgggctcgctcgcccaggactttggcatgggcggcggctcgggggcgtgtccgcccgcccacatgtacggcgccgtagccccgcaggacagtaagtgaagttctctagaggagcagcagtcatagtgaactccttttcgagttgttattctaaaatcgatttgtggccaagtattgtggacaatcctaaatcttaccgtagcattattatttactgttgataaacttgaaactctttgaaatttaaaatgaaattggattgagctgtacagtatccgttgatctactaaaaaaactcagagctaattacccccaccatctgcagtaattg

SEQ ID NO: 24164 - DNA, 2596 bp, DROSOPHILA
ctagtttggtcagttctcgaagatttgatttgagaataagtttatattttttggaaataagaagcaagaaaagcagatactgatcaaaacgcagaggcatccggctcgtaagttttatttgaatttagccaaaccaaaaacctagcatacaaagctatcgtaaaagctgaaaagctgaaaagcaaattaggcaagcgcacgagtttattatcgtgaaaagcactgagcgaacacttaataaaccatcaattcagcgctttgcccaggaactcacttggttttgagtttctgaacacattttccatttcattagcgcgacaatttgtgagatcagcgtacgccagacaaatcaaaagtcgaccatagcctatatagacatagctactgtcgaattgtcctttggtacactgcccgcaattctgtcgtcgttgaaccatcattgtagagggtgtcttttgtttgtttcccgtttgccaatcgttgaaagaattgcattaaggtcactgaactgctggcgttactgaaaaccagccagagttttcgaaaagcaaaatctctgagttctgagaccggtgtgtgcagcacaagtagcaaacagattagttttattttcggtggcgtttcgatagagagttccagtggtcttttcggactccctgaagcgcaagttgatgacaaacacggatcttgagcgaaagattgagagtttcttcgtataaactcgttgatatcggcccaattgggaagtctgagatccgcgtttagctgaaaataaaagcaaacaaaatttgccaaggactgcgagaacgaaaggacgaattccgctcccttccacttctcctccttgcgatttcatctgggcctagttttctttttgcactttcccgacactttttgccagcaaagagtgttgcttgtttaaattacaaccttgaaaaccacaacaggtactaggccagccctcacaatgtctgtccctgtacgctactcctctgctgccgccgaatacgccgccgaagttgattgtgagttggagagcactctgcaacagcagcaacagttgcacttgcaacagcaatacgagcaataccagcactaccagtaccaacgggagcaggatatcgcctactattgccagttgcaggcggcgcggcagcaggagcagttgatgcagcagaggacatcgatgtcgtcgtcggttatgccaggcctagccttgccccaggatcaccaggaccacccagccgcccttttgaacggaccccacaacaacaacatcggactcgccatggacgcccacagcatcaacgccattctggtcgacgacgagcagccctcgacttcggcccaggctgccgccgctgctgccgcatccgcgggtggatctgctggtgcgggatcgggatcgggattgggtggtgctatcggtgggggcaagctggccaacggcattaaccgcaatgcagagatgccaactgattggatgaggattgcggacgagggccggtatgggacaccgggtgctgctggcttggaatatcagaagtacgaacaacaacaacaactggaggatctggcggagtccgaggcaggagccgtcggtggagccagcaacaacaacggcgaatcgtcgtcgtccttgaaaaagctagaggatcagctgcacgccctcacctcggacgagttgtacgaaaccctcaaggagtacgacgtcctgcaggacaagttccacacggtgctgctgttgcccaaggaatcaaggcgtgaggttactgccggaggacgagatggatccgcctacgtgctgcgctgcctgaagatgtggtacgagctgccctccgacgtcctgttctcggccatgagcctggtggaccgcttcctggatcgcatggccgtcaagccgaagcacatggcctgcatgagcgtggcctcgttccacttggccatcaagcagctggacttgaaacccattcccgccgaggatctggttacaatatctcagtgtggttgtaccgctggtgatctggaacgcatggccggcgtgattgccaacaagctgggcgtccagatgggacatgcaccgatcacttctgtgagctacctgcgcatctactacgccctcttccgcaacttggcgaaggagatcggcggcgactttttcaagttctaccagcagctcatcaagctggaggaactggagaaccgcctggagatcctgatgtgcgacgtgaagaccacggtgatcacgccctcgacgctggcgctggtgctcatctgcctgcacctggacttccacatcaaggagtcgtacacccgcggcagtccggagctgaagcacgtcttcgagtacattctcttcctgcagcagtacatgaggattcctgatcgcgttttcacctgcggcttcagcatcgtttcgggtattctgtcccattacaacgggcagaacaaggcgccctacaagcagcggcttgtctggaagctgtccagtcgcacgctgcgcgtcttgcgcccgatcaaccgcttctcctccgacctgcccaccattgaggaaggcatccccaacgccctcgacgatggcctgcgttctaggtga

SEQ ID NO: 24165 - protein, 542 aa, DROSOPHILA; identical to SEQ ID NO: 24162

SEQ ID NO: 24166 - DNA, 8907 bp, DROSOPHILA
tacgagttgtgtttaaatttaagaagctgaagaagggttgtactccgcatgcaagggctatttaaatatatattttaacccgcccgagctcaccattaccagaaattcgataaacgagcaaacagtattatacgcaataaaaagacacctgcaaccataagtatttacctagctgatgtgtgggaatttatcgtaacataccatattatcgcttaatgtttaacttctggacttaataataaataaatattttattctacgacaaagaagaacttttcaatgtaacattattaactgctttaagtcatatccttaaactttcgccttgaaaatctttaaaaccctacaggtattccaaattaataatctcaggtgctagaaatttaattaatatattttggaaacagcataaattagtgaaaatacaacattgttttaatcaaacatttttaaaagcatgttttcggttgcaaagttttccaatttcaatcctgaaattaaagttgagttgaacaattgctataaaaagcgaccatttattacgttttataaactgtcccgattgtgattttagttgtttattttatttcatatttaaaaccgttactattttaaaaatcgttcgctaaagattgtgcttttaagcattgataactatcgctaattgccagaattcgtaatcttatttgacttgaattgtaaaaatataggatttaggatttttaccaaatagatgtagttcaaagaacacaattctttttattattaagcattttattttgggagttccttgcactagctttttgcagcgacctgtgtgtaagcttacattgagataacattaatgtgaacgtgcagcgaatgcagcactataacattggccagtggaaacatgatatttgctagcatgctgactggcgccgtggattttgacgttcttagttgacggtcacacagcgcaccgagctgcgtttttcgttgataatttttaaatttatttattagtttattggttggaaatagagctgcccccaactgcccgctgaccacggaattatcggtccggtccaccgacctccgctttcacacactattcggcaatcgatatatacgctgacggtaattggagaacgttttttccattttatctccaccttgtccgcacttcgttttgtgctctctttgtgcgctgcctccgcttaacatttgggcctgtaagaaacacatataagcagaacggcccgccgtgtgtgcctgtgaaattggttaaataacgtacagtggaatgggccaatggccaaaatgcaataagaatatgtgtgtgcaataaaaatagggaacggtaccgtgccccaaaacatgaaaatggtgctagacgctcctaacgccgtgccgagctggcatattttgcttagcgacgccgtcggctccgtttttcccggccgcgaactttgcgcgaggaatttacaacaaaaacaatgaattaaatggtatttaaattgtccatataatgcggtttggaaatgcgaaattgtgcctaacttgcccaatgcaaacgaatgtttctctttgaaggccctgcttaatgacgtcacaagcgtagcagagtgcaacagacagacaacaatgaccgatgagcataaaagtaacattaacagtaacagcagtcactccagcaacaacaacaacaacggcagcagcagcaataacgacaacaacagcaacgacgacgcagcaagtagcagcaacagcaaaaacaacaacaccagcaacgagagcagccacagcaacaacaatactagtagcataattgcagaggcggccgccaagtttctactgaaaaatggcctaaacggcagtagcagcaccagctacccccctctgccaccgcctctgcccgccaacttaagcaggacgaccacgcccacgacaacgacaacgccctcatcctccagctccaccgcctcaaatggctttttgccgcatgccaagacgcccaaaagtagtagcattatggctgcgtccgccgcagtggcagccagcgtcgttggagctactgcgtccaagcccaccatcgatgtcctggggggcgtcctggactacagttccttgggcggagctgcaacaggctcactgcccaccactgcagtagtagcggcggcagcgggaacagcgaagatcggcaagggaagcaactccggcggaagctttgatatgggcaggacaccaatatcgacgcacggcaacaacagctggggcggctacggtggtcgtttgcagttctttaaaggtaagtatcttggtttatttataccgaatcagagcagtgtaaagaaaaccattttttaactattctgcgtagatggcaaattcatattggaactggcgcggtccaaggatggcgataaaagcggctgggtttcggtcacgcgcaagaccttccgccctccatcggcggccacctccgcaactgtgaccccaacgtcggcggtgaccacagcgtatccaaagaacgagaattccacatcgctgagctgtacgtaacacatggcatagtagttcccaacggattaccccttccatttaattacttgacccgattggaatcagatttgagtaaaaggaattggattttgaaacatgtgtagatagctagcttaatccgagcggtcaaagcttacaaacacttgcagttataaaaaacatgtgcctatttgacttaaattgttctaatggcacgtagaggataaagtccaatttcgaaaacaaaaaatctgtaaaaaacgaccgcacctatgttcaaatctctgatctattttaaaactgtatatatcggccatctctaatattatatttaaaatctacgaaaatgtcaaacgttttaatgaaatagtaagaaaaaaccaaactgttcagaatcggtcatgttctttgtatgacagttttccaattcgatcctataaaatataatgtcctcccatccttgtatacatttaaatcctatttcataaattgttaacaatctgaatcaaacaaaagcaaatatttatttatgccaaactataattaactactacaatttgtctatgtataccttgcgttaatattcctcttcattgcagtttcggacgacaacagctcgatacaatcctctccttggcagcgagaccagccctggaaacagtcccgacccaggcgcggcatatctaaggagctgtcgctcttcttccaccgccccaggaacagtacgcttggccgagctgctctccggacagccgctcgcaaacgacggcgcccccacgagccgcttaccaccagcgaggatcagcagcccatttttgcgacggcaatcaaggcggaaaatggagacgatactcttaaagcagaagctgcagaggccgttgaaattgaaaatgttgctgtggcggacacaaccacaaatgagattaaaattgaaaaaccggacacgatcaaaggcgaggatgatgctgaacggctcgaaaaggagccgaagaaggcggttagcgatgatagcgagtcaaaagaagcatcgcccggtcagcaagtggaaccacaaccaaaagatgagactgttgatgttgagatgaagatgaatacgagcgaggatgaggaacccatgacagagctgcccagaatcacgaatgccgtaaatggtgatctaaacggcgatctaaaggcgagcattgggaaaccaaaatccaagccgaagccaaaagccaagctcagcagcatcattcagaaactcatcgatagcgtaccagcacggcttgagcaaatgtcgaagacatcagctgtgatcgcatcgacaacgacgtcttcagatcgcattggtggcggtctaagtcacgccttgacgcacaaagtaagttttacttggcacaacctgcataagctgcggtttcaaatgttaatcatgtactgcaacatttttattatgttaaagttgtaaatctagttagggactttcataaagaaaaaactttgaattgaccacttaaatatcttcttttaggtttctccaccctcttctgcgacagcagccggacgactagtcgagtaccacacccagcacgtgtcgcccaggaaaagaatcctgcgcgagttcgaaaaggtgtcgctagaggacaacggatgcgtaaacaacggcagcggtggagctagtagcggtggtgctggaggaaaacggagtcgagcaaagggaacttcgacatcgtctccggctggcaaggcgtcaccaatgaacttggcgccaccccaaggaaagccaagccccagtcccggctccagctcatccagcacttcgccagcgaccttgtcaacgcagccaacgcggctcaacagctcttacagtatccactccctgctaggtgggagcagtggcagcggtagctcatccttctcctcctctggcaagaagtgcggcgatcacccggcagctattatcagcaatgtgcaccatccacagcactcaatgtaccaacccagttcctcgagctatccacgcgccctgctcacctcgccaaagtcgcccgatgtgagtggcagcaatggcgggggcggaaaatcgccctcgcatacaggaaccaagaagcgttcgccaccgtactcggcgggatcacccgtagactatggccactccttctacagggatccctatgcgggagcaggtcgtccttccacatcgggctcagcatcgcaggacctgtcgccaccgcgctcttccccagcatcgccagccacgacgccgcgtactgtgcccaaaaagactgcatcgatccgacgcgagttcgcttcaccgtcggccagcagcagtagctgtccctcgcccggcgaccggagtgcatcgcccccggaacggcggcacatgcagcagcagccgcacctacagcgtagctcgccgctgcactactatatgtacccgccaccgccccaggtgaacgggaacggctcggccggaagtccgacctcggcgccgcccacgtcgaacagcagtgcagctgcagtagcggcggcagcagcggccgcagccgcatacattccctcgccttcgatatacaacccgtacatatccacactggcggcgttgaggcacaatccgctgtggatgcaccactatcagacaggagcgtcgcccctgctgtcgccacatccacaacccggtggctcagcggccgccgctgctgcagctgctgctgcgagattatcgccccaatcggcctatcacgcgttcgcgtataacggagtgggagcggctgttgccgctgcagcagctgcggcagcctttggacaaccggcgcccagtccccacacgcatccgcacttggcccatccgcaccagcatccgcacccggctgcactgaccacccaccactctcccgctcacctggccacgccaaaactgactgatagtagtaccgaccaaatgtctgcaacgtccagtcatcgcacagcctccacttcgccgagcagctcgagcgcatcggcctcctcctcggcggccacttcgggcgccagctcctccgcaatgtttcatactagtagtctaaggaatgaacaaagttcaggtaagcattcaatcagtgcaccaataatggcaagcagtttgatgattcaattttcattcctctgggaatgtctgaagaaaatatattacagatccatttattatgttgtcaatttaatgcacgtaaaacacaatttaataacgtttcttatttatttcttccttagacttaccactgaatctgtcaaagcactgagacatacacacgccccagctgccccagtttctgggccaaccattcgagttaagaacattttcgcactagtagcgcttaagacgacattcaatacacgtaatataatttgataagttcgctgatagtttagttgtaacccgattgtttaatcctaagcctaatcctaggttctcaattagggccgaacatttagaaatcgcatacaaaaagagatgaaaaactcaactttgtttttaaacccgttccagaactctttatacaatcagttgagaaattttattttcgacaaactgaataaaatatgcaaaggaattttattctatgccgactaatggaaagaaatactaataaaaacattttctataggatgtataaaatgcaagtcttaaagaatctcaaaaaagagttacgtttttttcatcaaaacatttccttgaaacagactgaacctgaatttttttagaaaaaaaaaatgaaaaacttagttacgaatcgcaaaatataacattttaaagtatatttaacaaaactacaagaacagatttttataaaatgcttgtgcctttaaaaatggaaacagaactagggatacaaaaattaatattaaaaagaaaaagaagtttactataaaaacatttatgtgcaagcatgtgcaggtattctatggtgaaaactttagaatttcttgatatcgtggtccaaaatgcagttgacaggaatttgcactaagcagattgtatacgacaccaactttttaagtacttttaaaaatgtatcttttaattatttcggaataattattctaaaatagttaaaagataaaagcaatccaaaactatacaactcgtctgtacttcaaaacgaaagagattactctttggtcttacattttttggtagactgtaaaaactaaaattcgaaaaaattgttgaagtttgaatttaaatcctcggcggatctaaatttaacctccacgattgttgtcaccatcaaaaatattatataactgtgcctagtgcacattcgctgtcagtggctgtccaatcaaaaacaaataaaatgtacaaaaaatccacatatacgacaaatttacaagaaacggaaagcaaaaagatcctaagcagacaatttcaaaccggaactcgtacaactgaaactgatacaaataaaaaacatattcctaacgcaaaaagacaaaaacaaaacgcggtttctcatattttctaaattatttatataaatcaaatgtctatttatatttactgatatgataatgtgtaagtaaataggtgtaattgtaaatacagtatttttacacaacaaaaagttaatcaatacgcgagaaataaccaatatatttaatataactatttttataacggattttaacaagtaactgtatattttgtatctgattacgcagaataaaaaacaaaacgaattccatatgaggtcaagaacagtttgcacaaggcggcctgaaacttgcttaaaacttaatgcactgaacaaaatccgaactaaacacatctgttccaggcagatacaaaatattttccaatggaaaaatggagtagattcatttattttttactaatcaatacataaatctttcagttcgaaatttttaagcaagttgcagtcggctaaactttttagtaggctttaatgaaaattaaaaagaaatataaatacaattttcatacaaattccatatggtttctactacctactgattagttagttagataggcgtctagggactattaatttacatttgtaacggtactgtgtacgacgtttttgtttaactgaacggtagtgtttttaatttgaaattcgatgtttttagtgagtggctattgttgaacgaacacatgtactatgtgcattgtcgaacaatgtgcgcaaacccaaaaaaataattttggcaaaaagtgaaatatatgaagtaagcaaatggtttcaagatactgcatctcgtgatgttggagtgtgtgtgtaaagtaaaggaaacaaaattaattttaaagaaatatattttatataggtatatatactgcaactgaatacttgatgtcaataaaaacttatactaaatgtatgaaaacgtatctacgaaagctttgcgttgggcatgattaatccgatgatccgatttccccattaaaacgacgttagttattgagacgaatgcggtctatcgtaaacgtagaagcacataatatatctatatttttctggtttcgctttaattgtatacattcgttcgtttctatatttgatttctttcgttttattgtatttatccagcgatttacaaaatacgttacaattattagagaacattataaaatgaaaccgggaaacacgataatgttgattggttgctggtacaaaagcacacacaaattatagtacacaattaatcgtaatgtagggatagaaaatcgttaattttaacttatagagttaatgtctcttaaattaatatagcataataggatacaatttttgcacgttcatgcgccaatgtgcatgtgcgggggggtgttcaaacaacaaatgaataatagacaacaaaacaatttttaggatcaaaaatcactgtataagagggggcggggcgataaatgattacagttacaagaatgggtgaacgtgaaatgtacaaattaagagtaaggtgtatatattggagcacttgtgggagcgacactatcagctatggatcgaggggttgtcgattgggtagttctcggcctaacatagtgaacacatagttttgaactttatgaattggatacaaaattgtactacgcctgttgcagaggctcggaagggcaggcagaaacttagacttggtgagtgggtttgcttgattgtgagatgtcgctgacttcgaagcaatcgtgttgttgttgtcagcttgttgatgtagatgtagttgtctgttgtttactgtttgttgtttttggagaagttgtgcgaggcccagttaagggaagtcttccaggagttggccaaagcttcgctgaatttcgctcggaaatgttcgcgtgctttttcctccgtgtagtccagcacctaaaaacagaatacaacgtatagttactcaggcctaaat

SEQ ID NO: 24167 - DNA, 5477 bp, DROSOPHILA
attagtttattggttggaaatagagctgcccccaactgcccgctgaccacggaattatcggtccggtccaccgacctccgctttcacacactattcggcaatcgatatatacgctgacggccctgcttaatgacgtcacaagcgtagcagagtgcaacagacagacaacaatgaccgatgagcataaaagtaacattaacagtaacagcagtcactccagcaacaacaacaacaacggcagcagcagcaataacgacaacaacagcaacgacgacgcagcaagtagcagcaacagcaaaaacaacaacaccagcaacgagagcagccacagcaacaacaatactagtagcataattgcagaggcggccgccaagtttctactgaaaaatggcctaaacggcagtagcagcaccagctacccccctctgccaccgcctctgcccgccaacttaagcaggacgaccacgcccacgacaacgacaacgccctcatcctccagctccaccgcctcaaatggctttttgccgcatgccaagacgcccaaaagtagtagcattatggctgcgtccgccgcagtggcagccagcgtcgttggagctactgcgtccaagcccaccatcgatgtcctggggggcgtcctggactacagttccttgggcggagctgcaacaggctcactgcccaccactgcagtagtagcggcggcagcgggaacagcgaagatcggcaagggaagcaactccggcggaagctttgatatgggcaggacaccaatatcgacgcacggcaacaacagctggggcggctacggtggtcgtttgcagttctttaaagatggcaaattcatattggaactggcgcggtccaaggatggcgataaaagcggctgggtttcggtcacgcgcaagaccttccgccctccatcggcggccacctccgcaactgtgaccccaacgtcggcggtgaccacagcgtatccaaagaacgagaattccacatcgctgagcttttcggacgacaacagctcgatacaatcctctccttggcagcgagaccagccctggaaacagtcccgacccaggcgcggcatatctaaggagctgtcgctcttcttccaccgccccaggaacagtacgcttggccgagctgctctccggacagccgctcgcaaacgacggcgcccccacgagccgcttaccaccagcgaggatcagcagcccatttttgcgacggcaatcaaggcggaaaatggagacgatactcttaaagcagaagctgcagaggccgttgaaattgaaaatgttgctgtggcggacacaaccacaaatgagattaaaattgaaaaaccggacacgatcaaaggcgaggatgatgctgaacggctcgaaaaggagccgaagaaggcggttagcgatgatagcgagtcaaaagaagcatcgcccggtcagcaagtggaaccacaaccaaaagatgagactgttgatgttgagatgaagatgaatacgagcgaggatgaggaacccatgacagagctgcccagaatcacgaatgccgtaaatggtgatctaaacggcgatctaaaggcgagcattgggaaaccaaaatccaagccgaagccaaaagccaagctcagcagcatcattcagaaactcatcgatagcgtaccagcacggcttgagcaaatgtcgaagacatcagctgtgatcgcatcgacaacgacgtcttcagatcgcattggtggcggtctaagtcacgccttgacgcacaaagtttctccaccctcttctgcgacagcagccggacgactagtcgagtaccacacccagcacgtgtcgcccaggaaaagaatcctgcgcgagttcgaaaaggtgtcgctagaggacaacggatgcgtaaacaacggcagcggtggagctagtagcggtggtgctggaggaaaacggagtcgagcaaagggaacttcgacatcgtctccggctggcaaggcgtcaccaatgaacttggcgccaccccaaggaaagccaagccccagtcccggctccagctcatccagcacttcgccagcgaccttgtcaacgcagccaacgcggctcaacagctcttacagtatccactccctgctaggtgggagcagtggcagcggtagctcatccttctcctcctctggcaagaagtgcggcgatcacccggcagctattatcagcaatgtgcaccatccacagcactcaatgtaccaacccagttcctcgagctatccacgcgccctgctcacctcgccaaagtcgcccgatgtgagtggcagcaatggcgggggcggaaaatcgccctcgcatacaggaaccaagaagcgttcgccaccgtactcggcgggatcacccgtagactatggccactccttctacagggatccctatgcgggagcaggtcgtccttccacatcgggctcagcatcgcaggacctgtcgccaccgcgctcttccccagcatcgccagccacgacgccgcgtactgtgcccaaaaagactgcatcgatccgacgcgagttcgcttcaccgtcggccagcagcagtagctgtccctcgcccggcgaccggagtgcatcgcccccggaacggcggcacatgcagcagcagccgcacctacagcgtagctcgccgctgcactactatatgtacccgccaccgccccaggtgaacgggaacggctcggccggaagtccgacctcggcgccgcccacgtcgaacagcagtgcagctgcagtagcggcggcagcagcggccgcagccgcatacattccctcgccttcgatatacaacccgtacatatccacactggcggcgttgaggcacaatccgctgtggatgcaccactatcagacaggagcgtcgcccctgctgtcgccacatccacaacccggtggctcagcggccgccgctgctgcagctgctgctgcgagattatcgccccaatcggcctatcacgcgttcgcgtataacggagtgggagcggctgttgccgctgcagcagctgcggcagcctttggacaaccggcgcccagtccccacacgcatccgcacttggcccatccgcaccagcatccgcacccggctgcactgaccacccaccactctcccgctcacctggccacgccaaaactgactgatagtagtaccgaccaaatgtctgcaacgtccagtcatcgcacagcctccacttcgccgagcagctcgagcgcatcggcctcctcctcggcggccacttcgggcgccagctcctccgcaatgtttcatactagtagtctaaggaatgaacaaagttcagacttaccactgaatctgtcaaagcactgagacatacacacgccccagctgccccagtttctgggccaaccattcgagttaagaacattttcgcactagtagcgcttaagacgacattcaatacacgtaatataatttgataagttcgctgatagtttagttgtaacccgattgtttaatcctaagcctaatcctaggttctcaattagggccgaacatttagaaatcgcatacaaaaagagatgaaaaactcaactttgtttttaaacccgttccagaactctttatacaatcagttgagaaattttattttcgacaaactgaataaaatatgcaaaggaattttattctatgccgactaatggaaagaaatactaataaaaacattttctataggatgtataaaatgcaagtcttaaagaatctcaaaaaagagttacgtttttttcatcaaaacatttccttgaaacagactgaacctgaatttttttagaaaaaaaaaatgaaaaacttagttacgaatcgcaaaatataacattttaaagtatatttaacaaaactacaagaacagatttttataaaatgcttgtgcctttaaaaatggaaacagaactagggatacaaaaattaatattaaaaagaaaaagaagtttactataaaaacatttatgtgcaagcatgtgcaggtattctatggtgaaaactttagaatttcttgatatcgtggtccaaaatgcagttgacaggaatttgcactaagcagattgtatacgacaccaactttttaagtacttttaaaaatgtatcttttaattatttcggaataattattctaaaatagttaaaagataaaagcaatccaaaactatacaactcgtctgtacttcaaaacgaaagagattactctttggtcttacattttttggtagactgtaaaaactaaaattcgaaaaaattgttgaagtttgaatttaaatcctcggcggatctaaatttaacctccacgattgttgtcaccatcaaaaatattatataactgtgcctagtgcacattcgctgtcagtggctgtccaatcaaaaacaaataaaatgtacaaaaaatccacatatacgacaaatttacaagaaacggaaagcaaaaagatcctaagcagacaatttcaaaccggaactcgtacaactgaaactgatacaaataaaaaacatattcctaacgcaaaaagacaaaaacaaaacgcggtttctcatattttctaaattatttatataaatcaaatgtctatttatatttactgatatgataatgtgtaagtaaataggtgtaattgtaaatacagtatttttacacaacaaaaagttaatcaatacgcgagaaataaccaatatatttaatataactatttttataacggattttaacaagtaactgtatattttgtatctgattacgcagaataaaaaacaaaacgaattccatatgaggtcaagaacagtttgcacaaggcggcctgaaacttgcttaaaacttaatgcactgaacaaaatccgaactaaacacatctgttccaggcagatacaaaatattttccaatggaaaaatggagtagattcatttattttttactaatcaatacataaatctttcagttcgaaatttttaagcaagttgcagtcggctaaactttttagtaggctttaatgaaaattaaaaagaaatataaatacaattttcatacaaattccatatggtttctactacctactgattagttagttagataggcgtctagggactattaatttacatttgtaacggtactgtgtacgacgtttttgtttaactgaacggtagtgtttttaatttgaaattcgatgtttttagtgagtggctattgttgaacgaacacatgtactatgtgcattgtcgaacaatgtgcgcaaacccaaaaaaataattttggcaaaaagtgaaatatatgaagtaagcaaatggtttcaagatactgcatctcgtgatgttggagtgtgtgtgtaaagtaaaggaaacaaaattaattttaaagaaatatattttatataggtatatatactgcaactgaatacttgatgtcaataaaaacttatactaaatgtatgaaaacgtatctacgaaagctt

SEQ ID NO: 24168 - protein, 1059 aa, DROSOPHILA
MTDEHKSNINSNSSHSSNNNNNGSSSNNDNNSNDDAASSSNSKNNNTSNESSHSNNNTSSIIAEAAAKFLLKNGLNGSSSTSYPPLPPPLPANLSRTTTPTTTTTPSSSSSTASNGFLPHAKTPKSSSIMAASAAVAASVVGATASKPTIDVLGGVLDYSSLGGAATGSLPTTAVVAAAAGTAKIGKGSNSGGSFDMGRTPISTHGNNSWGGYGGRLQFFKDGKFILELARSKDGDKSGWVSVTRKTFRPPSAATSATVTPTSAVTTAYPKNENSTSLSFSDDNSSIQSSPWQRDQPWKQSRPRRGISKELSLFFHRPRNSTLGRAALRTAARKRRRPHEPLTTSEDQQPIFATAIKAENGDDTLKAEAAEAVEIENVAVADTTTNEIKIEKPDTIKGEDDAERLEKEPKKAVSDDSESKEASPGQQVEPQPKDETVDVEMKMNTSEDEEPMTELPRITNAVNGDLNGDLKASIGKPKSKPKPKAKLSSIIQKLIDSVPARLEQMSKTSAVIASTTTSSDRIGGGLSHALTHKVSPPSSATAAGRLVEYHTQHVSPRKRILREFEKVSLEDNGCVNNGSGGASSGGAGGKRSRAKGTSTSSPAGKASPMNLAPPQGKPSPSPGSSSSSTSPATLSTQPTRLNSSYSIHSLLGGSSGSGSSSFSSSGKKCGDHPAAIISNVHHPQHSMYQPSSSSYPRALLTSPKSPDVSGSNGGGGKSPSHTGTKKRSPPYSAGSPVDYGHSFYRDPYAGAGRPSTSGSASQDLSPPRSSPASPATTPRTVPKKTASIRREFASPSASSSSCPSPGDRSASPPERRHMQQQPHLQRSSPLHYYMYPPPPQVNGNGSAGSPTSAPPTSNSSAAAVAAAAAAAAAYIPSPSIYNPYISTLAALRHNPLWMHHYQTGASPLLSPHPQPGGSAAAAAAAAAARLSPQSAYHAFAYNGVGAAVAAAAAAAAFGQPAPSPHTHPHLAHPHQHPHPAALTTHHSPAHLATPKLTDSSTDQMSATSSHRTASTSPSSSSASASSSAATSGASSSAMFHTSSLRNEQSSDLPLNLSKH

SEQ ID NO: 24169 - DNA, 12600 bp, DROSOPHILA; identical to SEQ ID NO: 24163

SEQ ID NO: 24170 - DNA, 1157 bp, DROSOPHILA
ctagtttggtcagttctcgaagatttgatttgagaataagtttatattttttggaaataagaagcaagaaaagcagatactgatcaaaacgcagaggcatccggaagtacgaacaacaacaacaactggaggatctggcggagtccgaggcaggagccgtcggtggagccagcaacaacaacggcgaatcgtcgtcgtccttgaaaaagctagaggatcagctgcacgccctcacctcggacgagttgtacgaaaccctcaaggagtacgacgtcctgcaggacaagttccacacggtgctgctgttgcccaaggaatcaaggcgtgaggttactgccggaggacgagatggatccgcctacgtgctgcgctgcctgaagatgtggtacgagctgccctccgacgtcctgttctcggccatgagcctggtggaccgcttcctggatcgcatggccgtcaagccgaagcacatggcctgcatgagcgtggcctcgttccacttggccatcaagcagctggacttgaaacccattcccgccgaggatctggttacaatatctcagtgtggttgtaccgctggtgatctggaacgcatggccggcgtgattgccaacaagctgggcgtccagatgggacatgcaccgatcacttctgtgagctacctgcgcatctactacgccctcttccgcaacttggcgaaggagatcggcggcgactttttcaagttctaccagcagctcatcaagctggaggaactggagaaccgcctggagatcctgatgtgcgacgtgaagaccacggtgatcacgccctcgacgctggcgctggtgctcatctgcctgcacctggacttccacatcaaggagtcgtacacccgcggcagtccggagctgaagcacgtcttcgagtacattctcttcctgcagcagtacatgaggattcctgatcgcgttttcacctgcggcttcagcatcgtttcgggtattctgtcccattacaacgggcagaacaaggcgccctacaagcagcggcttgtctggaagctgtccagtcgcacgctgcgcgtcttgcgcccgatcaaccgcttctcctccgacctgcccaccattgaggaaggcatccccaacgccctcgacgatggcctgcgttctaggtga

SEQ ID NO: 24171 - protein, 258 aa, DROSOPHILA
MWYELPSDVLFSAMSLVDRFLDRMAVKPKHMACMSVASFHLAIKQLDLKPIPAEDLVTISQCGCTAGDLERMAGVIANKLGVQMGHAPITSVSYLRIYYALFRNLAKEIGGDFFKFYQQLIKLEELENRLEILMCDVKTTVITPSTLALVLICLHLDFHIKESYTRGSPELKHVFEYILFLQQYMRIPDRVFTCGFSIVSGILSHYNGQNKAPYKQRLVWKLSSRTLRVLRPINRFSSDLPTIEEGIPNALDDGLRSR

SEQ ID NO: 24172 - DNA, 3917 bp, DROSOPHILA
ttgcgattgaaatccggacgaatcgcaatgtagtccacggtgcgaatgacggcgtatggaccagcctgattggaggcaccaccatagatcttgaagtcatttttgttcttgttgtaaacgcaatgagcggcggtgataacccaacgcggcttaaccagtgatccgccacatagctcctctgatgtggtgacctgtacgagatatttctcctccttgatgctggacacatggccaccaatgatgcggggttgtatctgcacgctgtcgggatgtgcgtacacagctgaatggaatcccaaaatctgaacaaggaacaacgaagtcagacaccgggcaatcattgtggttatccaactatatcgaaatgaagctaaaacttgaatttatattatgtaaatctgggcggaacaagacattaacatttgcacaattgttcaattaaacttcttttctgggaagtttaatttactcgcaacctaagatattagaacggaaatgctcacatttgaaatttggattcaatcccgtatgtaagaaaaagttttttcccttccgatagttttgaatttgatcaaagatggtgaggtttcaaacacactattttactttacacatgtacaaatatttctttcattgttagattgggagttcttcaacagtttgcattgcatttacctaagaaagttgtttgtcttttcctaagttgtatatcttgtcttaaagtgtttatttccaatgcctatcattctatatatatttattcatactgcctatgggcgaggctaaagtttcctgcgtcaagatatatctgttgatcatgtgtttttaagatattctatgctctgtgatcagtgtttacccttcttcagttatagaatctattttaaaaatgccatattgccaaaaagcatgaaagagcgtgtttagttaacaaacatttattatatcgcacataactttcaacgaccttaaaatctaagttgattcgaattttcaatcctcaattgttggccatgatgttggtggcccactggcggatcgcaaccacggctgtgtatacacctgggtagccggctctggcgcacccgtagccaaaggatacgatgcccaagagtgtgttgttcctggtcactgggccaccggagtctccgctgcatgaatccttgccagcagcgcgggcacaaagcatgtacttggtgatggtagcctgaccgcggtagtccttccgacacttttgctgcctgaccacccttatctgggcggtctgcagagttttggatgccgttgtagaaccttccttggtcacaccccatcctgcaatgcgtacccttgaaccggccttgggtcgatagttgcccattgatatggttccgatattggtgcccgtcagggattggttcagcttcagcaaagctgcatccatgttcattttcttcgaggtgaacttcggagccacatgaatggaactgacggagcgagtgacgccatcactcccatccaaagtagtggttcctccgcgcaccgtgaaatcggaggcactgtatcccttgacgcaatgggcagcagttagaacccattgctcggttatgagggaaccgctacacagattcgatcctcgacgcaactgaacaatgtacggtgtggtggaaatagtggtactggtgccacccacaatcctggactgaatcttggacgatgtggcggcctttttgttctggttgaccctcttggcggagagtttcctcgctgtaccttggcgtcgattgcttctgattccggtttggttttttgtgcccgtcaacctcttggttccgttgtcgcttctcagtctcctgtttctcctttgctgattggctgtcaccgcttcacccaactgggtaagctcggccaagagcagcattcccaaaataagatactcgcagcgccaaagcatatcgctgtgaactgttttggctatgaccttgccccggcttttattgccggatattcggcaaaacatcgagatatcacctgagcaaacagtgcgggtcacaatggcaggctttgccacttcaatggcactccagctccatgtgacgtcaacgatcagggttaactaatctaatactgattaatacaacgaagaatctgagcggagctagcagtacctgtgaatattatccgctatccagtcggacaggtagctcacatcggagtatactccgggactgtccctggcggcacaccgatgtgccctgccccacgacacgacgcccacaaggataccattcgaattaacaactggcccccccgaatcccccgcacaagcatcctttaagcccggcacggaggcacagaacatgctggacgtgatgttccggtagccacgatacagatccctacactcccgttgcggcatcacttgcacatggacactttgcagctgattgggcagcgacgtggagctcgagtcggttaatccccagccggaaacccggacaaaagatccaggtcgcggagatcgcacggccaaggagatgggttttgcaatggaggcttgaagtggttgcttgagctgaaggagcgccacgtcgtggtccaatgtggtgcgactgtaggccgatggcatcagtattttcctcacatagcgcgaattacgcatatcactcagataggtcaccccgccacgaaccacaaaatccgatggattgccatcattaaggcagtgggcggcagtcaagacgcagcgtggagtgaccagggaaccgccgcactcgaagttcccacgtcgccggatattaaccatgtgcggctggtgccacacatcgctcgggtggccacccacaatacgtgggcttcggcgtagctccagctcctctgcaacagactcccgaatccaaagcatccagaacatcagcgggagcagcataccttgcatctcgatatcgactcgtctgtaatgtgaacttcggttgactggaacggtgaactgcatagcacaatcatttatagagcgaagcgatactgacctttcccaacgagaaaccacttacaaaaacacctgttcttcggtgtttacacacggcaatgaacttgatatggtgggggctactacgaggaagtagagtgtatgtagcactgttcccactcgatggtgtttgtttagggttcggaaaatagataacgagtggtgggaacgcatttacttctatttattaacatactatacaaaattatatggataatgcatgatagctaaaactggctcttccatcattaattttagtattcctcaccacggacatctcgccgggacgccaaaaactgcactctcagattcaaatagacgtgggtgagctgtccgcccacgggagcaacacggccaccttctacatctttagcctgacggaggcggaaataaagctggcacagaggttaagctacactttggatgtggatcgcggtccaggcggaggtggcagcaatgcccgggtgagcacagctccgaacagctcagagtctacgcccgatcacgaggtgaagagtgtaatcccgagcgtggctgccatttccccggtgcagattgagtacctggacgaaacgcggttgagaaagtcacgagaggatacgctcactgtgcgatgctatggtgactttaagttcaacgcacgtttctacacgatggataggaagcctttgaaccaggtgtatcgtggcgagaactttttgctcagggccaacacggaagtggtggccgtggacgatgtggagatactagacagcttctttatatgtgtaagcctattttagaatgtttaaacgactataagccaatgaccaaatatcgcttccttgcaggatcacaacctagtgcaatcaaactacagctttaagcaaaagaaatacaccaacaagtacagcgccggcgagcaactgga

SEQ ID NO: 24173 - DNA, 1836 bp, DROSOPHILA
atgcaaggtatgctgctcccgctgatgttctggatgctttggattcgggagtctgttgcagaggagctggagctacgccgaagcccacgtattgtgggtggccacccgagcgatgtgtggcaccagccgcacatggttaatatccggcgacgtgggaacttcgagtgcggcggttccctggtcactccacgctgcgtcttgactgccgcccactgccttaatgatggcaatccatcggattttgtggttcgtggcggggtgacctatctgagtgatatgcgtaattcgcgctatgtgaggaaaatactgatgccatcggcctacagtcgcaccacattggaccacgacgtggcgctccttcagctcaagcaaccacttcaagcctccattgcaaaacccatctccttggccgtgcgatctccgcgacctggatcttttgtccgggtttccggctggggattaaccgactcgagctccacgtcgctgcccaatcagctgcaaagtgtccatgtgcaagtgatgccgcaacgggagtgtagggatctgtatcgtggctaccggaacatcacgtccagcatgttctgtgcctccgtgccgggcttaaaggatgcttgtgcgggggattcgggggggccagttgttaattcgaatggtatccttgtgggcgtcgtgtcgtggggcagggcacatcggtgtgccgccagggacagtcccggagtatactccgatgtgagctacctgtccgactggatagcggataatattcacagctggagtgccattgaagtggcaaagcctgccattgtgacccgcactgtttgctcaggtgatatctcgatgttttgccgaatatccggcaataaaagccggggcaaggtcatagccaaaacagttcacagcgatatgctttggcgctgcgagtatcttattttgggaatgctgctcttggccgagcttacccagttgggtgaagcggtgacagccaatcagcaaaggagaaacaggagactgagaagcgacaacggaaccaagaggttgacgggcacaaaaaaccaaaccggaatcagaagcaatcgacgccaaggtacagcgaggaaactctccgccaagagggtcaaccagaacaaaaaggccgccacatcgtccaagattcagtccaggattgtgggtggcaccagtaccactatttccaccacaccgtacattgttcagttgcgtcgaggatcgaatctgtgtagcggttccctcataaccgagcaatgggttctaactgctgcccattgcgtcaagggatacagtgcctccgatttcacggtgcgcggaggaaccactactttggatgggagtgatggcgtcactcgctccgtcagttccattcatgtggctccgaagttcacctcgaagaaaatgaacatggatgcagctttgctgaagctgaaccaatccctgacgggcaccaatatcggaaccatatcaatgggcaactatcgacccaaggccggttcaagggtacgcattgcaggatggggtgtgaccaaggaaggttctacaacggcatccaaaactctgcagaccgcccagataagggtggtcaggcagcaaaagtgtcggaaggactaccgcggtcaggctaccatcaccaagtacatgctttgtgcccgcgctgctggcaaggattcatgcagcggagactccggtggcccagtgaccaggaacaacacactcttgggcatcgtatcctttggctacgggtgcgccagagccggctacccaggtgtatacacagccgtggttgcgatccgccagtgggccaccaacatcatggccaacaattga

SEQ ID NO: 24174 - protein, 611 aa, DROSOPHILA
MQGMLLPLMFWMLWIRESVAEELELRRSPRIVGGHPSDVWHQPHMVNIRRRGNFECGGSLVTPRCVLTAAHCLNDGNPSDFVVRGGVTYLSDMRNSRYVRKILMPSAYSRTTLDHDVALLQLKQPLQASIAKPISLAVRSPRPGSFVRVSGWGLTDSSSTSLPNQLQSVHVQVMPQRECRDLYRGYRNITSSMFCASVPGLKDACAGDSGGPVVNSNGILVGVVSWGRAHRCAARDSPGVYSDVSYLSDWIADNIHSWSAIEVAKPAIVTRTVCSGDISMFCRISGNKSRGKVIAKTVHSDMLWRCEYLILGMLLLAELTQLGEAVTANQQRRNRRLRSDNGTKRLTGTKNQTGIRSNRRQGTARKLSAKRVNQNKKAATSSKIQSRIVGGTSTTISTTPYIVQLRRGSNLCSGSLITEQWVLTAAHCVKGYSASDFTVRGGTTTLDGSDGVTRSVSSIHVAPKFTSKKMNMDAALLKLNQSLTGTNIGTISMGNYRPKAGSRVRIAGWGVTKEGSTTASKTLQTAQIRVVRQQKCRKDYRGQATITKYMLCARAAGKDSCSGDSGGPVTRNNTLLGIVSFGYGCARAGYPGVYTAVVAIRQWATNIMANN

SEQ ID NO: 24175 - DNA, 3700 bp, DROSOPHILA
ccaaaagaattctaggatccaatcctgcgtagggtttgttctatgaattcatgaaccctttcgctagccacattggtgtaaacacccggaaaggaaggtcgggcgcaaccgaatccccaggagacaatgccacaaacctgaccgcggtagaccaaaggacctccggaatctccggagcaggaatcgcgaagaccgcgcacggcggcacatagcatggaatcgctcaattgaccatatccggaatatgagatcttacattccgctcctggaagcactcgcaccatggtggtgcggacctgttcggcaggttcacggttattctcgcgggtaactccccaaccactgatcctggcatacgcattaccctccggcggattgcgacaaggactaatggtggcgactttaccgggggttaggaccacgacttcctgcaactgcaacaaagctacgtccatgtcgaagttagtggcagagtagctgggcgaagtgtgaaacataactacattgcgaaccactggagcctcttggtccaaacgactcgcgccggcgtgaaccgtgaatccctccggctgcgatccataaacacaatgtgctgcacttaggactgctctgctggagattaaggatcctccacagataaagtaaccattttgccgcaggtaaaccaggtacggaacttccgaaatagttgtctccttgccgccaactatgcgcgttttgctagaggagctgggaagtacaagtgccaaatggcagagccaccagagcaaccttaggccaaccatggcgtgtccatactgacagctactatgtacacatgtatattgcttcctagttttcaaagtgataatgatgctgttattggctcgaacctgtcccggaaatgggactaatcgcactattatttgctattcggaaagagatctcaattgtaatatggagtgactgccttattaactatttattgcgttgaaggttaatcaaattgattgatagatttttagcaatgtcgctcgataaagtccttcagccagtacgtaatcgatggactactgaggcgggtgtagacgcctggataaccactgccacatccgtagccccacgatactatgcccacggagcgaccagcgtagattgcggggcctccggaatcgccttgacaggcatccctggcgtttttgcccagagcacaaaacatgttgttcgttactttttgccatccggatccaactgatttgatgcactccctgtgcgagatgagcttaacgttggcctcctgcaaacactggttccagttgtgaccctgctcattgatcgctccccaacccagaaccgtgagatttgaatgtggtggcaggtcattgtagtcgatcttcaccagactcgcattgccggcgatgtcaaagggacgactcaaacggatcaccgccaagtcggagtccaatccgcgttgagcgcagtagtttggtgataggccgacataccaggccgaacggacatgctccggcggcatgtcatcgccaaggcactgttgttgggcatgtacggtcaaatcccggacctgttgatatcgtccctccaagcaatgagcagctgtgagtacacagttgggcgagattatgacgccaccgcaccggaacttgccacctcgtcgaagattgacaaggaaggaatggtctttcaccaacgtggtttttcctccgaagattttaccctgacgaagagtgaatagtgagctgccctccagttgatggagcagtgctagtccaataaggagtatatacatggtctaccgaaatctaagccgggaagcaagtttatatatattattatatattatcttttcccgcattccccagttaattgccttcagataaacttgaactatttattgactcttaaagctaagacttaagattatgctcaggaatgctgctcgacgacgcgctgaaaccaatcccggatctcaggcacactggtgtatatgccaggcaaagcggaggcacatccatatccaaaggatacgatccccgccagctggccgcgatacaccaaaggtccacccgagtcgccgtcacaggaatccttcttgtacagcctggcggcgcacaccatggagcgggtaatgcggtggattcctctgaaagcagacacgcaggatgcacgcgaccacatgggcaccagcacactgtgcacccgctcggcagtctttgtcgcatcggcagttaggaaaccccaaccagataccttgaccaaagcgcgagctggaacggattgtgccgccagaggtatggtctctatattggctccaatcatatccgaattcaagcgcaaggcagccacatccatattgagggtcttgcgattgaaatccggacgaatcgcaatgtagtccacggtgcgaatgacggcgtatggaccagcctgattggaggcaccaccatagatcttgaagtcatttttgttcttgttgtaaacgcaatgagcggcggtgataacccaacgcggcttaaccagtgatccgccacatagctcctctgatgtggtgacctgtacgagatatttctcctccttgatgctggacacatggccaccaatgatgcggggttgtatctgcacgctgtcgggatgtgcgtacacagctgaatggaatcccaaaatctgaacaaggaacaacgaagtcagacaccgggcaatcattgtggttatccaactatatcgaaatgaagctaaaacttgaatttatattatgtaaatctgggcggaacaagacattaacatttgcacaattgttcaattaaacttcttttctgggaagtttaatttactcgcaacctaagatattagaacggaaatgctcacatttgaaatttggattcaatcccgtatgtaagaaaaagttttttcccttccgatagttttgaatttgatcaaagatggtgaggtttcaaacacactattttactttacacatgtacaaatatttctttcattgttagattgggagttcttcaacagtttgcattgcatttacctaagaaagttgtttgtcttttcctaagttgtatatcttgtcttaaagtgtttatttccaatgcctatcattctatatatatttattcatactgcctatgggcgaggctaaagtttcctgcgtcaagatatatctgttgatcatgtgtttttaagatattctatgctctgtgatcagtgtttacccttcttcagttatagaatctattttaaaaatgccatattgccaaaaagcatgaaagagcgtgtttagttaacaaacatttattatatcgcacataactttcaacgaccttaaaatctaagttgattcgaattttcaatcctcaattgttggccatgatgttggtggcccactggcggatcgcaaccacggctgtgtatacacctgggtagccggctctggcgcacccgtagccaaaggatacgatgcccaagagtgtgttgttcctggtcactgggccaccggagtctccgctgcatgaatccttgccagcagcgcgggcacaaagcatgtacttggtgatggtagcctgaccgcggtagtccttccgacacttttgctgcctgaccacccttatctgggcggtctgcagagttttggatgccgttgtagaaccttccttggtcacaccccatcctgcaatgcgtacccttgaaccggcct

SEQ ID NO: 24176 - DNA, 1317 bp, DROSOPHILA
atgattgcccggtgtctgacttcgttgttccttgttcagattttgggattccattcagctgtgtacgcacatcccgacagcgtgcagatacaaccccgcatcattggtggccatgtgtccagcatcaaggaggagaaatatctcgtacaggtcaccacatcagaggagctatgtggcggatcactggttaagccgcgttgggttatcaccgccgctcattgcgtttacaacaagaacaaaaatgacttcaagatctatggtggtgcctccaatcaggctggtccatacgccgtcattcgcaccgtggactacattgcgattcgtccggatttcaatcgcaagaccctcaatatggatgtggctgccttgcgcttgaattcggatatgattggagccaatatagagaccatacctctggcggcacaatccgttccagctcgcgctttggtcaaggtatctggttggggtttcctaactgccgatgcgacaaagactgccgagcgggtgcacagtgtgctggtgcccatgtggtcgcgtgcatcctgcgtgtctgctttcagaggaatccaccgcattacccgctccatggtgtgcgccgccaggctgtacaagaaggattcctgtgacggcgactcgggtggacctttggtgtatcgcggccagctggcggggatcgtatcctttggatatggatgtgcctccgctttgcctggcatatacaccactgctcattgcttggagggacgatatcaacaggtccgggatttgaccgtacatgcccaacaacagtgccttggcgatgacatgccgccggagcatgtccgttcggcctggtatgtcggcctatcaccaaactactgcgctcaacgcggattggactccgacttggcggtgatccgtttgagtcgtccctttgacatcgccggcaatgcgagtctggtgaagatcgactacaatgacctgccaccacattcaaatctcacggttctgggttggggagcgatcaatgagcagggtcacaactggaaccagtgtttgcaggaggccaacgttaagctcatctcgcacagggagtgcatcaaatcagttggatccggatggcaaaaagtaacgaacaacatgttttgtgctctgggcaaaaacgccagggatgcctgtcaaggcgattccggaggccccgcaatctacgctggtcgctccgtgggcatagtatcgtggggctacggatgtggcagtggttatccaggcgtctacacccgcctcagtagtccatcgattacgtactggctgaaggactttatcgagcgacattgctaa

SEQ ID NO: 24177 - protein, 438 aa, DROSOPHILA
MIARCLTSLFLVQILGFHSAVYAHPDSVQIQPRIIGGHVSSIKEEKYLVQVTTSEELCGGSLVKPRWVITAAHCVYNKNKNDFKIYGGASNQAGPYAVIRTVDYIAIRPDFNRKTLNMDVAALRLNSDMIGANIETIPLAAQSVPARALVKVSGWGFLTADATKTAERVHSVLVPMWSRASCVSAFRGIHRITRSMVCAARLYKKDSCDGDSGGPLVYRGQLAGIVSFGYGCASALPGIYTTAHCLEGRYQQVRDLTVHAQQQCLGDDMPPEHVRSAWYVGLSPNYCAQRGLDSDLAVIRLSRPFDIAGNASLVKIDYNDLPPHSNLTVLGWGAINEQGHNWNQCLQEANVKLISHRECIKSVGSGWQKVTNNMFCALGKNARDACQGDSGGPAIYAGRSVGIVSWGYGCGSGYPGVYTRLSSPSITYWLKDFIERHC

SEQ ID NO: 24178 - DNA, 4135 bp, DROSOPHILA
aattgatttagataaggtcaacgatgtggtggaaatgtgtgccacattcgagcgggttcagttgagcaacgacgacttgctgcagttgcaactgatagtgcggtaagtttagttgtctttccttcttatatgcagctacttagttgtccttgtttttagtgtgctcacggatattcctttgaggatacgcagcttccatgtcattctggccgacgcgggaaatccccagaacagctacaaactggaggcactcaagtatttctgctttcccaccctcacgcagctacgtggccaaaagcagccggatgatgagcaactggagaatccgtcacaagagcccaaaaactttgaaaagaatatgagattggagcccggctcctattaccagcttttctgcagcaccgaagcgcagcagttccacgaaaacactcaactgcgcattgtccgactggaggcccacatggggactgaccaggtagccgccctacttacgtgcagctccaactactcacggcagctgttccgacatcacacgcgcagccgcgatctcgatgacaacgtgacgatcaatcccatttgctacattgcgcccacgtaggtcaaaacgattggtaccggaagctgagatatatttccggacaattgcatgcaaccagcgcatttaatgctctactaaacacggttttctataccagctttcatctggacacgcaaacgaaccttggccatggacatgataacggtttgactgatgacaaggaaatggtggctacaaaaatgctggtcaacgaatactttcctgttgtgaccactgtcagcaatccatacaatgtctatctgcagaatgtgggcgtgcacattagtattcccgtgggtctgaggaatagtggtaagtaagagataaaatgtaatcgaacttatattagaggagcaggttaaattttaattaaattcagatctctaggcctaattaagcatctaaaaattttactattcgggtctacatgcccaaagccttgtcgataaagctcctaacagtcttgacattggtatagactcccggcgaactctttcgtgcgcatccaacgccccacgagacaattccgcatagttgaccctgatagacggcaggtcctccagagtcgccttcgcaggcatccttgacgccaggcactgaggcgcaaaacatggtgttggtgatggttccgcgcagcttatactggctcatgcatgccttacgcggaatgagcgccacatctacgctgcgcacctgcattgaaactgccttgttgcgctccgtaatttgtccccagccagagaccttgatcagatcgcctgccttgaagctggtattgcacagctcaatggtggacactttgggaccgctgatgggagcttttagttttaaaacagccacgtccgaggtgagggtgcgggtgttgtaagcctttggggtataaaccttgtccacaccacttctgacacccgtctccgtaagtctcgttaccccggcaacgactaggatacgagaagcgccaattcccttgacgcagtgggcagcggtgacaacatgctggggggtaaccaatgaaccgccgcacataaagttgccaccgatgcgcaggttcaccaagtagggcacactagcgatgtccaccggtacaccgcccacaatccgactgttggcctcgttgctggccgcccagcaaagtgggatcaggtggagcacgagccatagcgtcgccatcggcttactccatccctcgatatttgccgtatccggtagctgtaactaccaaccgagttttcgtgtcaccgtccagctgggtaaacacttttttgatcgctgttccgactcgaatcgcgcggctctgtgctccgatttatatgcctcttaggaaacaatcattacaccgcacacatattattttattgcgcaaataataattattttaataatccattttgtgtggcttatcggcggatttcatcagcgtatttggtatgagaaactgagacccatcaaaaaatgctgtgcaatgggactttatgtgggtgtactaagcgttgttacaaaccttctaccgttgattcaatttcacaaattggttgattaaataattgtcgattaatctctccttttaaaagatccgcgtgccattctaatgctttttattagtgctcctcttagtccgtttccgatacaaaggtttcatactcaaattaataaggaaatgatttgttaaggtcgaatagtttttaaaataataagattcaatatagcctgatcgcatgttaatagctatattcattagatgactaattcaaatttcaaatccacaagcacattccaaaagaattctaggatccaatcctgcgtagggtttgttctatgaattcatgaaccctttcgctagccacattggtgtaaacacccggaaaggaaggtcgggcgcaaccgaatccccaggagacaatgccacaaacctgaccgcggtagaccaaaggacctccggaatctccggagcaggaatcgcgaagaccgcgcacggcggcacatagcatggaatcgctcaattgaccatatccggaatatgagatcttacattccgctcctggaagcactcgcaccatggtggtgcggacctgttcggcaggttcacggttattctcgcgggtaactccccaaccactgatcctggcatacgcattaccctccggcggattgcgacaaggactaatggtggcgactttaccgggggttaggaccacgacttcctgcaactgcaacaaagctacgtccatgtcgaagttagtggcagagtagctgggcgaagtgtgaaacataactacattgcgaaccactggagcctcttggtccaaacgactcgcgccggcgtgaaccgtgaatccctccggctgcgatccataaacacaatgtgctgcacttaggactgctctgctggagattaaggatcctccacagataaagtaaccattttgccgcaggtaaaccaggtacggaacttccgaaatagttgtctccttgccgccaactatgcgcgttttgctagaggagctgggaagtacaagtgccaaatggcagagccaccagagcaaccttaggccaaccatggcgtgtccatactgacagctactatgtacacatgtatattgcttcctagttttcaaagtgataatgatgctgttattggctcgaacctgtcccggaaatgggactaatcgcactattatttgctattcggaaagagatctcaattgtaatatggagtgactgccttattaactatttattgcgttgaaggttaatcaaattgattgatagatttttagcaatgtcgctcgataaagtccttcagccagtacgtaatcgatggactactgaggcgggtgtagacgcctggataaccactgccacatccgtagccccacgatactatgcccacggagcgaccagcgtagattgcggggcctccggaatcgccttgacaggcatccctggcgtttttgcccagagcacaaaacatgttgttcgttactttttgccatccggatccaactgatttgatgcactccctgtgcgagatgagcttaacgttggcctcctgcaaacactggttccagttgtgaccctgctcattgatcgctccccaacccagaaccgtgagatttgaatgtggtggcaggtcattgtagtcgatcttcaccagactcgcattgccggcgatgtcaaagggacgactcaaacggatcaccgccaagtcggagtccaatccgcgttgagcgcagtagtttggtgataggccgacataccaggccgaacggacatgctccggcggcatgtcatcgccaaggcactgttgttgggcatgtacggtcaaatcccggacctgttgatatcgtccctccaagcaatgagcagctgtgagtacacagttgggcgagattatgacgccaccgcaccggaacttgccacctcgtcgaagattgacaaggaaggaatggtctttcaccaacgtggtttttcctccgaagattttaccctgacgaagagtgaatagtgagctgccctccagttgatggagcagtgctagtccaataaggagtatataca

SEQ ID NO: 24179 - DNA, 1434 bp, DROSOPHILA
atggttggcctaaggttgctctggtggctctgccatttggcacttgtacttcccagctcctctagcaaaacgcgcatagttggcggcaaggagacaactatttcggaagttccgtacctggtttacctgcggcaaaatggttactttatctgtggaggatccttaatctccagcagagcagtcctaagtgcagcacattgtgtttatggatcgcagccggagggattcacggttcacgccggcgcgagtcgtttggaccaagaggctccagtggttcgcaatgtagttatgtttcacacttcgcccagctactctgccactaacttcgacatggacgtagctttgttgcagttgcaggaagtcgtggtcctaacccccggtaaagtcgccaccattagtccttgtcgcaatccgccggagggtaatgcgtatgccaggatcagtggttggggagttacccgcgagaataaccgtgaacctgccgaacaggtccgcaccaccatggtgcgagtgcttccaggagcggaatgtaagatctcatattccggatatggtcaattgagcgattccatgctatgtgccgccgtgcgcggtcttcgcgattcctgctccggagattccggaggtcctttggtctaccgcggtcagctaccggatacggcaaatatcgagggatggagtaagccgatggcgacgctatggctcgtgctccacctgatcccactttgctgggcggccagcaacgaggccaacagtcggattgtgggcggtgtaccggtggacatcgctagtgtgccctacttggtgaacctgcgcatcggtggcaactttatgtgcggcggttcattggttaccccccagcatgttgtcaccgctgcccactgcgtcaagggaattggcgcttctcgtatcctagtcgttgccggggtaacgagacttacggagacgggtgtcagaagtggtgtggacaaggtttataccccaaaggcttacaacacccgcaccctcacctcggacgtggctgttttaaaactaaaagctcccatcagcggtcccaaagtgtccaccattgagctgtgcaataccagcttcaaggcaggcgatctgatcaaggtctctggctggggacaaattacggagcgcaacaaggcagtttcaatgcaggtgcgcagcgtagatgtggcgctcattccgcgtaaggcatgcatgagccagtataagctgcgcggaaccatcaccaacaccatgttttgcgcctcagtgcctggcgtcaaggatgcctgcgaaggcgactctggaggacctgccgtctatcagggtcaactatgcggaattgtctcgtggggcgttggatgcgcacgaaagagttcgccgggagtctataccaatgtcaagactgttaggagctttatcgacaaggctttgggcatgtag

SEQ ID NO: 24180 - protein, 477 aa, DROSOPHILA
MVGLRLLWWLCHLALVLPSSSSKTRIVGGKETTISEVPYLVYLRQNGYFICGGSLISSRAVLSAAHCVYGSQPEGFTVHAGASRLDQEAPVVRNVVMFHTSPSYSATNFDMDVALLQLQEVVVLTPGKVATISPCRNPPEGNAYARISGWGVTRENNREPAEQVRTTMVRVLPGAECKISYSGYGQLSDSMLCAAVRGLRDSCSGDSGGPLVYRGQLPDTANIEGWSKPMATLWLVLHLIPLCWAASNEANSRIVGGVPVDIASVPYLVNLRIGGNFMCGGSLVTPQHVVTAAHCVKGIGASRILVVAGVTRLTETGVRSGVDKVYTPKAYNTRTLTSDVAVLKLKAPISGPKVSTIELCNTSFKAGDLIKVSGWGQITERNKAVSMQVRSVDVALIPRKACMSQYKLRGTITNTMFCASVPGVKDACEGDSGGPAVYQGQLCGIVSWGVGCARKSSPGVYTNVKTVRSFIDKALGM

SEQ ID NO: 24181 - DNA, 13361 bp, DROSOPHILA
ctgcggttttgcttttgggaatcatgattcgtatgtatgtttgatttatacgtttgctttctttttcacgtttagatataaaagtatttattaagaaataattacatatttttttgttggaatggggcagatcgtgaccaccacaaacatttgatttagtgctcgttgcgttctgtgaagcccaccatcttaaatattaatgaaattatgtcttcttttattaacagccgagcggatttgctctctttccatattgccacagaagttcgaggaatacgctattgtactatcaggaggtatcgctaataagtagaagcgtcgttacataaataagtccgatgaattgcaaaatgtacacaaatcaagaacgcccatacatttggccatttacatttacacatatgtatgtatgtatgcttgaatacacatcgatgtatgtgacgagggtagatgtcctttcatttttgcaagaccgaaaaatcgattttccataattcaatgctggaaatttcagatgctaaaactgccaagaattttttatccaatttttcacagaccgacaaaaaactttgggggtgccattctcgtcgttgggcttagtctcaagtgaattcccttcgagtccacacaaatccagttcttatgccatccacagcgaagcgtattcccgaaccaacgttgcggacccccgttacgagcgcacaaaaaaaactaccccgacaaaattataatgaagttggtggtggtgcagaggaaagccaagtgtgcgtcgaaaacagggtacggcgaccagtaacggagaacaggacctgggtcccgaggtcctgggcaagggaccaagagattcgggtggagtgggctttctttgccacctttcttccgcctgcttgtgcagttggaacaccaccaccctgggttaaaattaaaaaaagcgaaaacaaaaaactcggcgttgtatgttgtatgtatgtatgtttatgtatgtatgtatctgcttgcgtaggtacataaaaaacgagatcatccacggcgatgaaacagaagcatccccagtgccccttggaatgtacaaatgtatgcatgtgtgtaagattttatgtatgtatgtatgtaattatgcatgtatgtttgtggctgtatgcatgcatgtgcgcgcacacagcagagcatcgaaggtatgccagtatgtgcacgcacgcaccatttatgcatgtgcttatttgtcgctttgaggaatgcttttacttctgttgtccactctcctttctggtgacctctgaccctgactgtgcgcgaaagaacgaccagagcctcaccattgcaggtaaaatcgtgtcaacacgcagcgtgagtgcagtataaacaatttaattatcaaacaagaaattataagactcaggtttgctaacagaaataaagaaggtgagttaactttttgcgattaaccatggccaataaaatttttgtaagtgtaataaaatacttatgaatgaaaattgttgatcattattaatctgaatgtcaagaattaagtagggtaacatggcatggcagatgcgtgcattggtaattatcaaattgtactctctttattttttttatattatttttttttaatatttttattattatttttttttttatttttaccagaaactttaattaaaaggcatttcggcctctaaatcccaaacacaagctaaatatgttcctaacggattacatactatatacaagttgtaaccgaaggcacataatatacagtgttattgtggatttaaaattcaatttgcttatcactgtcaacactttgtcactgaactgtagatttttttctttagattttgtgttacttttctattgggtgtatcactatgattggactacagatttcaattcttcgtgattatatagtagtcgcctttgcaaatctcctggggcgcttagtcactacgtggactgctctccacattgatatacgagctagaaatatattttaaaatattgctgaaatatccatagaaattggagagaaaaaagaaaattaaagaaagttaaaacatttttcaaaattattgacttgccaacatttaaaagtaagactgggcgtggaaatagaaatattaaaatgaaaagaaatgaaaacattttaagggcctggcacttgatctgcgtccgctttacttatgcctaatctcaatttcctagttttttccgtgatcgcagccctcaaacggagagacatggcggatggccatacagatagacgggcatccggtcctggccaagtcgagtcagttaggatcggaaaggctccttgttacgcactcacatctctacgagtaacgggtagagtagagtactctacgagtagagggtatattgatttcagtcgaagtttgcaacgctaccatataaagaatacaataataaaacttcattttttgtttttaactttgaacatgtacatatatgtatatgtatatggcacttgtaagtatgtattgggggtgtacttttttactgagggtgacaaacaactgctgctgggtacagttttttatattgatttcaatattgattttgttgcacattattaacatttacgtcgaatccatccacaccaccgaaaacgttctttcggaaaatcaattcagctgtcacaagaatttaaacgttttaaccccttttctgtatgatatttgaagcggaaaactatgcgttgttcagtttttaaccctcacatttatactgtatatttctggtatttcaaaatggcaaatattacgtgtttagttgcagcaatatatcttagtaaatagaattaggtaattataaaaaattaaagaatacgttgcacagttgcggaatccggtcacgaaaacagtccctgaatcatagattaggagacatacatatgttttttccaacatagaagaccttcttcttgaaatctttgatttaggatttctttagggaccagagtcacagttattgtctagtaatcaacaaaattgattgcaattttactattgtattctttttgacatagattatactagtttaaagggggctttcactccttagaatggtagacgaggtaacaaacccttttttttcatataatatacataaatttttgatcctagcgctgctaacatatagcatacggtgctgccaatgatacatacatacaaatacagttataatcttgaattacaggtaataattaactgtctcatttgcttaatctttgtttttgtttagagaaacgtattgcatcaaattccttttaggggctcgtcgtacataaacaaaattcagacatacagagtaactatgtaaaaagtaataagctgacctgtaaaattcttgatgtacatgcagcgccaccttttggaattttgagtagttcaagtaaattccttaattttttcccagttgcagaaccacaatttaatatcgaatggatcgattaacggagccgtccatagatttcgtgttggaatatgaggaaatagtaaaaatatactatcgatttctacacgctgcagtaatcgtatatttttttcgaatttgatttgatcaaaatattttgatttcgtttttaagtgctctggttttcccaaaatttacgaacttatttacgaacaatacttttggaaatcctttaaattaattaaataattgtctggcaactctatgactgacggagaacagatgttgaagtctacgtgtaaaaataggtctaaaatgctttaaaacctttcaagagaaaccatggatagaatcttctgagattgcccctgtagatatatattttttattagccctggattaaactggaacgtggtttatgtcctaacccaggttcaaacacggaaccagaccaaacaaattaaatatagaggcggaaatataatcgtagcaatgttcaaaattgaagtgaagcttttactcccgactttcctaaaaaatgtcatatattatataagaacacacgctatatatatgttgaaataattccttcttgaagatatcatctcaaatggctgcaagtttggggagactaaagatagctgtttatgttattcacctatacacacatatctgaataccgtagtatatacctaaaaaatcagttcgatgcacagaatgcctaaagattcagcgggaagcatttgatagaacaatatatttcttaattacaacttttagtaaaatattttattggtgcaaaacaataggtttgccgacaataagaaatattttataaagacaaattttaaagtaccaaatgtaaatcaactttttgctgttcgttttgataaatttattataatgtgatcgtcttaaaaataataaatttacaaatgtggtcatgtgaacatgtggatacaagtggatcacgcgaattccgcgttgttattttttcgacgtttttacggaacttctctataattaaatcagtatataaaaatagacacatttgcctatataacgtaaataaacgtaatcataaatacagacgataagtgatgtgagctaatctaaataattgtatagattattattaatacagtaaattgctctcaagcaataattaacctacttacaggattacaacagaatagaattacagtttacgtccaattaaagtagttttgcaataaaattaaaaacaacaaacgattatatcacgcacaaagtattcgctcttacagttatgattaggctgctttgagtaatccttatatgttacttgtgatattactacgtgattatatgaataatttcaatcacactcatatgtgttcttgaagaagtgaaaataccgatacaaattgatagttttttccatattttagaaaataaaaaaaatacattaaatcaagttctaagatatctaagtttaaggacagcacagaattttgccatcatgcatttgcaggagtacctcaggtatgttttggactcatactcttctttaacatatatgtaagaaaattaaaactgaaaattatttggtatctaaaaatgcaaaaaaagagcagtgttgttaattttttttttaattttcgatgaattttgttaatatgtcacacggtaggacggaaatgtggaaaatataacgattaatataaatattaatatataacgataatacgaagctgacgaagtattgaattagaacggcagctatttctaactctagcggtggaattacggcagttaacctaatgaatttttgtgtgttcgacctaacaggaatagaaaaagtacagtaacaatacaacaattatatactttaaaacgttctaaaattcagaaagccttttcatatatatgaactcgactagactcggtcctaagcgggcctttgatataatgcaagcgtacagaaaatcgcccagttttctaaattgtgcttattggtggaattttttttttttaatttgttgtaggctatagagtgacagcgttttatagaaacttacactgttacaagtcccgcttttatagctcccgagacctcgacgttcatacgaacggacggatattacaacatcgactctgctattgatcctgttaatataatttatatactctatatcgtcgaaattttgccttctatctgttttccagatactttataatatttcatgtccactaagattacatcttccccacgtttgaattgttttgtctatgcctttcgaagggataattcaatattcaaacaaaagatgagggtatacaatgtatggttcaaatggaacttggacaaaactgtattactaacgaatataaattcttagcaaatataggaaatcgaaagttaaatgtttgtttcagtattatacaacttttgggtcgtagttttctgcaaaacctaatacaaacaagtaaattaagtaacgtaaatcgacctgacattcactttacaaatatataaaaactgactgaatttattcagcaaatccaatctataccagtatcatgtattacatgttgttataagcactgcgatcattttgaaattcaccaggagtatcaatgggttcgacaatttatttatttatgtttttgaaaattctacttataaaattatttgcaaacgctgacttttatacatacgtgcagctctaatcagaccttctatccatggcataaactaggaatgtaattaaatcatctttaaagttcttactgttattcgtttattagctgtagtcaagttggtaccgacgcattatactgctgcagtgagcatgcgcaattccctccaggaaggggagcttatttgttgtcagctggctttgagttcagacagagaactttacttggacggaaaagctcaatgaagcttaaaaatcgatacgtgcattttattccgtgaaaactcttaaatatacaatatcatacaaatcttatagattagtaattttatgttcatgtactgtgtttaaatcaaataattaaagctaaacatcgtcaataaaagttgaggcatgtgcttcatcgtgccaataaaagtgcttcaccgccaataaaaggaaatcaataggaaagcgattaatatttgtgaatactttttaacttgttcataaaatacaaatatatatatatttaaagttcacattttcccaagtagaatccacattctcctggtatgtatacatttatttagaaaaaacccagttttaacagccaccaacttaggcgggggttgtgagacacaaaacttggacagaagtttctttaaatatataaaatgtacgtacagatattatgttttattctgaggagcagataaccatttaaagatagattttcgaaggactattagttttaaatcctcaatttctggttatatcttacacgatttaccaattagcatgctattggactgggggtaaagtactaatttcaaaaaaaggatgttttacaaggattaaagtaacttattttctatgccgaatgaacaaggcaacataaaataatattatatctgggaacgacattctataagacacattacatgaaaatcgataaaattccatatgctgtcgtttattgtgcataaattcccggctcagacctaaatgtatattaccgtctttctactaagtgggcaaatgaaatatgtgctagaaagattcacacaactggtgtcctctatgattgtgcaacatttttaaatacaatggaaattcaatgtctttataggcttggaatttttcctgttacagtttaacaacactttaaaaagtagtagctaaaaatagtacctcattgacgaaactgacggaaaggaataccctagatacacatattatttatgtttaagggactgtttacaatggggttgttcttaggtttacttctggtgaaatcttacatgtcacaataattcctctggtgttggggaaatgttttccgaactacttcatgtataagataagatcactcagcagctgacgcggacataacgaacgaagaactagcgtttgtatgcctatttacagctgtttttgattttctaagaaacagcaattgtgtaaaatgagacatatttttttttggtatatatacttatacgtacacaaatttttttcggccggagtgataaatatatgagaattaacaagcttccgatgttttggtgatagttgcgtaatatatatgtatgtacatatgtacttcaatactcgtcagatttccaaaccatcaaatatttgaatacattgtatatgcttgctaacaaaacagtaccgacgaaatagctcatgttaaagtaatattatgtagttagtatcgataggaagttcaacgaaactcaaaatgttcgaatttcattgttggtatgaaagttaaaaatatcatcgttgttttctatgcgttttatcagctttatttatttacttattggaatttatttgacacaagtatatttttgtttttaaaacataaagcatgaagcttaaagttttgtttgggaggtaaacaattttagaactgctcacatacgatatctaggatttcagaaaatatgtacaattttgggggaaaaaaaaaaacgtaaaggaaaggcaccttttagaaatctgtgtagagatttcgttatcctacatatatgggcgcaaagaagaataatgttgaatatcgatttttatgaaaaatcatgcatcgatgttttcatcgatatttctccagctctttattaagctgtgcctgttgaaatattttttttttcaaattatgttatcttttccttccctagtgcgtatagagcgctcaaaatgatctatatttttcgtattatagacaactgatgttttggcatttactatgcgttccgtaagtcgctctgaagatgcgttcaaatggacagacacactgttttctgtattatgtggattttcgagatattgctaagcaatgcaatggatttatttttttttagaaacgacgaaaatgcatccgcgcccgacgatggaaatcaatcatgccagccttcttccaaacaagatcagtatctaagtcctaaccgcaattgccagaaaaacctgttgaggctttacccaccacccccatctaaaccaccaccgctcgttggtgccatcctgcaaacccgtcttctgcatcagataagcccgtccgcaattgcagatgcggatgcagacttgaatgcagtaggggagcttctatacccaaatgtcctgcagcggtcagcaactttgccagcgaaacacaaccgcttaggggttcgaagccgcgtgacctttaaggtcccttcgtctaacctccctgctcaggattcatattctcatcaaccccgaaatcaggttgcagtcgctgcaaaggacggaatattggtagacgtcaaggctaaggagtccgtcaagatgacttctgaggatttgctgcagccaggtcatgttgtgaaggagcgttggaaggtgtgttttatatttaatgcgtacatatatagatatatatattttattttaattgtataccttgcaggttgtccgtaaaattggtggaggcggctttggagagatatacgagggtcaagatcttattacccgtgaacaagtcgcacttaaagtagagtccgcccggcagcctaagcaggtgctcaaaatggaagtggcagttcttaagaaattgcagggaaaggagcacgtatgtcgattcatcggatgtgggcggaatgatcgatttaactatgtggtgatgcagctccaaggaaagaatttagctgaactccgacgcgctcagccgcgaggggcattttcgcttagtacaacacttaggttagggttacaaattttaaaggccattgaatccatccattcagtgggatttcttcatcgtgatattaaaccggtaatagctacaatcttgttatgttttcaatatattcgggtggtcaaacaaaaaaatcgaaataattgttcttttgcattttagagcaatttttctgtgggtcgtttgccttataattgtcgacgcgtctatatgcttgacttcggattggcgcgtcagtacaccactggcacaggggaagtgcggtgtccaagagctgctgcaggttttcgcggcacggttcgttatgcttctattaatgcgcaccgaaatagagaaatgggacgccacgatgatctgtggtcattgttttatatgctcgtggagtttgtaaatgggcaactgccatggcgaaaaattaaagacaaggaacaagttgggttgacaaaggaaaaatatgaccacagaatactgttaaagcatttgccgtcagatttgaagcaatttctggagcacattcaatctcttacatatggagaccgcccagactacgcggtaagtcgaagattatcccaaaagatcattttatacaataaaataatgttgaattaattatagatgcttatcggtttgttcgagaggtgtatgaaaagacgtggggtcaaagagtccgatccttatgactgggaaaaagtggattccactgcaattggaaacataagtgcaacaggcaatccatcaattcctataaaaagcgattatatgcacggaaatattacacaaatgacagtggcagcatctaacgcaagtggcaccgaatacgtaagttattttacaacttggtttggtgtactggccgatatttacaaaccaaatagggaaaatagaataaatattgtatatattataaaaacataaaagtccgttagttatattttcttatttaatgatgaacacacacgttgtgacgaagagcactgagagcttcgagagcgtacaaggacattataataagaaaaagcaaaaattgctaccttagctcgcgtaatattgagagcgtaaggatcgaaacgtaatcgaaatgtttaatagctatattaattaaatttgggcattcaactgagttgttgtgtaaaaataatcttttgaatcccaaactagtatcaaaaagcagcagtaccaattccaagtcaaaattagagcgcaaaactacaaaaatacgcaactaaacatttcttattgatgcaaaattactaaggacacttaaattttggtataagtaatcgaagggctcaatattatagttcttaatagtaacaaaatacatatttacataattcgatactcttagcagtctttgtattacaaatatttgttcatacgttcgctttatggaggtttaagtgggaattgtactttggaaaaactctccattgtcgtcacaaaaatttgaatgatcgcacatgtgattcttatcatgaatatacatatgtacatatgtattctatagggtgtactctggttcattacatacaagcaatgcacaccgtgtgaacccaaaaagccaacaaagctcaattcgcataagggctataagggctgggattccagagagagacgctaacgctcaggagcctcacagaactgccacgcccacacatatgaaaaatattgccaattaccaatttctacagaactgccaacacccattcttttgaaaaatttcttgaaaattttgcattgttttatttttgttgacaattgtcattggaacgataaaaaaatgttgagttatatgttgacaagttgtcactaaattttatattacacatttttggagttgaaggagccatagtcttccatcctcctaataggtgtttttgttttatatgcgaattaaatgttgtaaggaaaagtgctcaattaattcaattaaaaaaaacatcctcccttttttgagtcttaatttattctctccattttaaaagatacgaaagcgggccgaaatcgaaaccgctcatataacggcgaccgatccccttaatataaaagaaaaagtaagtgaagcaaggaattggaaatggattttggtaaaaattaaaatttgttatattaaaggttgataaaaactgcaatgcaacttcactagcacagccagcaaaaggatctggtgaacccatggtacaacatggtaatgctgcaaataatcaaaatatcacatcaaaaggactgcaacagcaatctacgttaacaaactcccaagtagccatagcaaatatccaaagtgcaccatcaatgattgaaagagaggatgtacaggtaatgtttaccacattcagcatttcatgcaaagaactatcaacaccaaacgggaagggatgttttccataattaattacaattactgcctatttgtatgtcaactaatatgtccatatgaagataaacattgtaaagaaatgtcatgttgaccgtccccttgacagatgttgcattcttcaaatatactttttcatttatggatcaagaaacaacagttcactcttcaattgcttaatatgttttacagtcatagtgtaagattttcgatttttgcacctctgctcttgccagacatttttatattcgttgcgtaaagttaatttggtaaccgacaaagtatatttcagtattcctcttcgagtaacgcatttgattagcgtttgtcttgtagtgtcatacgcgataccgcccttgaaccttgcctcgtgattctaaactacattttttacagtatacgaagctggaagagggggcaccgacaaaatttataacaatgaaaccaaatggagagtgtgataatgttgatatagctgcaaagtgtatttttgagcaaaagcacgttgaagcaaatgatgacatagttggcagagcttccttaagcggggtcgaacagcattacaagtcccaaataaaaaaacataattcaccagaaattgctaataagcagatacagaggactgggacagtaacaaacgataaaacctcagaagtcaatcggtcaacggaagaacaaaaatctacgtttgggcgactacgtgtgctaacagccccaccaatgagtgtacatgatctaccatcgggtggaggccatagccatcaagtgtcagatttatctggaaaacaagatccatatgctgccactagcaatgctgccccaataggtataaacagctcgtccacaaaatttggcagccagcatggtcaaatttttggcctcgcagccatgccgccgattaatcgccgttctgcaacctccacaaatttgcggccatcttcctcggcaagtcaaaggattaatagtgggtcgacaattggaggagcagttggtaacggaagcaacactgccagaagcagcgttgcaggtgaccattcggtcacccaattcgctttaatagacgacgagaacgtttcagctttgcagcaagtaacgaaaggaggagctctcacgttggcatcgcaatggaagagtcagtttgatgattccgaggatactacggataacgaatggaatagagaacaccaggtaagtttaaaaactaaaaaaatactatacttaaaatgtctctcgtatacaagcctttttcataatattcgattattgttaacttatatcgcaatcatgggcttgtaatgaaaaatttggccacatgtttttgattgttataaattaataaacacgtgatgaatatatcaagtaaattttgcctcgcagttgcaacccaatttggagcaattgattaaactggatatttcattgcccttaaatgaagctaaaccatttccgcaacatggcgtcgctggtacaggcaaattaattaatcctccaggcgaagcaaaggggagaccgaaaaggtgagttttattcatatgaaaagtaacgattttcatgtcaaaggaatgatccgcatacttagagcgcatctgtcaaaggtgatacattaagctcttacagtctgagacacaatagactcttaacttcacgtccaatcaaattccgttttatg

SEQ ID NO: 24182 - DNA, 2850 bp, DROSOPHILA
taggtacataaaaaacgagatcatccacggcgatgaaacaatgtgcacgcacgcaccatttatgcatgtgcttatttgtcgctttgaggaatgcttttacttctgttgtccactctcctttctggtgacctctgaccctgactgtgcgcgaaagaacgaccagagcctcaccattgcagttttttccgtgatcgcagccctcaaacggagagacatggcggatggccatacagatagacgggcatccggtcctggccaagtcgagtcagttaggatcggaaaggctccttgttacgcactcacatctctacgagtaacgggtagagtagagtactctacgagtagaggaaacgacgaaaatgcatccgcgcccgacgatggaaatcaatcatgccagccttcttccaaacaagatcagtatctaagtcctaaccgcaattgccagaaaaacctgttgaggctttacccaccacccccatctaaaccaccaccgctcgttggtgccatcctgcaaacccgtcttctgcatcagataagcccgtccgcaattgcagatgcggatgcagacttgaatgcagtaggggagcttctatacccaaatgtcctgcagcggtcagcaactttgccagcgaaacacaaccgcttaggggttcgaagccgcgtgacctttaaggtcccttcgtctaacctccctgctcaggattcatattctcatcaaccccgaaatcaggttgcagtcgctgcaaaggacggaatattggtagacgtcaaggctaaggagtccgtcaagatgacttctgaggatttgctgcagccaggtcatgttgtgaaggagcgttggaaggttgtccgtaaaattggtggaggcggctttggagagatatacgagggtcaagatcttattacccgtgaacaagtcgcacttaaagtagagtccgcccggcagcctaagcaggtgctcaaaatggaagtggcagttcttaagaaattgcagggaaaggagcacgtatgtcgattcatcggatgtgggcggaatgatcgatttaactatgtgagcaatttttctgtgggtcgtttgccttataattgtcgacgcgtctatatgcttgacttcggattggcgcgtcagtacaccactggcacaggggaagtgcggtgtccaagagctgctgcaggttttcgcggcacggttcgttatgcttctattaatgcgcaccgaaatagagaaatgggacgccacgatgatctgtggtcattgttttatatgctcgtggagtttgtaaatgggcaactgccatggcgaaaaattaaagacaaggaacaagttgggttgacaaaggaaaaatatgaccacagaatactgttaaagcatttgccgtcagatttgaagcaatttctggagcacattcaatctcttacatatggagaccgcccagactacgcgatgcttatcggtttgttcgagaggtgtatgaaaagacgtggggtcaaagagtccgatccttatgactgggaaaaagtggattccactgcaattggaaacataagtgcaacaggcaatccatcaattcctataaaaagcgattatatgcacggaaatattacacaaatgacagtggcagcatctaacgcaagtggcaccgaatacatacgaaagcgggccgaaatcgaaaccgctcatataacggcgaccgatccccttaatataaaagaaaaagttgataaaaactgcaatgcaacttcactagcacagccagcaaaaggatctggtgaacccatggtacaacatggtaatgctgcaaataatcaaaatatcacatcaaaaggactgcaacagcaatctacgttaacaaactcccaagtagccatagcaaatatccaaagtgcaccatcaatgattgaaagagaggatgtacagtatacgaagctggaagagggggcaccgacaaaatttataacaatgaaaccaaatggagagtgtgataatgttgatatagctgcaaagtgtatttttgagcaaaagcacgttgaagcaaatgatgacatagttggcagagcttccttaagcggggtcgaacagcattacaagtcccaaataaaaaaacataattcaccagaaattgctaataagcagatacagaggactgggacagtaacaaacgataaaacctcagaagtcaatcggtcaacggaagaacaaaaatctacgtttgggcgactacgtgtgctaacagccccaccaatgagtgtacatgatctaccatcgggtggaggccatagccatcaagtgtcagatttatctggaaaacaagatccatatgctgccactagcaatgctgccccaataggtataaacagctcgtccacaaaatttggcagccagcatggtcaaatttttggcctcgcagccatgccgccgattaatcgccgttctgcaacctccacaaatttgcggccatcttcctcggcaagtcaaaggattaatagtgggtcgacaattggaggagcagttggtaacggaagcaacactgccagaagcagcgttgcaggtgaccattcggtcacccaattcgctttaatagacgacgagaacgtttcagctttgcagcaagtaacgaaaggaggagctctcacgttggcatcgcaatggaagagtcagtttgatgattccgaggatactacggataacgaatggaatagagaacaccagttgcaacccaatttggagcaattgattaaactggatatttcattgcccttaaatgaagctaaaccatttccgcaacatggcgtcgctggtacaggcaaattaattaatcctccaggcgaagcaaaggggagaccgaaaag

SEQ ID NO: 24183 - protein, 936 aa, DROSOPHILA
MCTHAPFMHVLICRFEECFYFCCPLSFLVTSDPDCARKNDQSLTIAVFSVIAALKRRDMADGHTDRRASGPGQVESVRIGKAPCYALTSLRVTGRVEYSTSRGNDENASAPDDGNQSCQPSSKQDQYLSPNRNCQKNLLRLYPPPPSKPPPLVGAILQTRLLHQISPSAIADADADLNAVGELLYPNVLQRSATLPAKHNRLGVRSRVTFKVPSSNLPAQDSYSHQPRNQVAVAAKDGILVDVKAKESVKMTSEDLLQPGHVVKERWKVVRKIGGGGFGEIYEGQDLITREQVALKVESARQPKQVLKMEVAVLKKLQGKEHVCRFIGCGRNDRFNYVSNFSVGRLPYNCRRVYMLDFGLARQYTTGTGEVRCPRAAAGFRGTVRYASINAHRNREMGRHDDLWSLFYMLVEFVNGQLPWRKIKDKEQVGLTKEKYDHRILLKHLPSDLKQFLEHIQSLTYGDRPDYAMLIGLFERCMKRRGVKESDPYDWEKVDSTAIGNISATGNPSIPIKSDYMHGNITQMTVAASNASGTEYIRKRAEIETAHITATDPLNIKEKVDKNCNATSLAQPAKGSGEPMVQHGNAANNQNITSKGLQQQSTLTNSQVAIANIQSAPSMIEREDVQYTKLEEGAPTKFITMKPNGECDNVDIAAKCIFEQKHVEANDDIVGRASLSGVEQHYKSQIKKHNSPEIANKQIQRTGTVTNDKTSEVNRSTEEQKSTFGRLRVLTAPPMSVHDLPSGGGHSHQVSDLSGKQDPYAATSNAAPIGINSSSTKFGSQHGQIFGLAAMPPINRRSATSTNLRPSSSASQRINSGSTIGGAVGNGSNTARSSVAGDHSVTQFALIDDENVSALQQVTKGGALTLASQWKSQFDDSEDTTDNEWNREHQLQPNLEQLIKLDISLPLNEAKPFPQHGVAGTGKLINPPGEAKGRPK

SEQ ID NO: 24184 - DNA, 3582 bp, DROSOPHILA
aagatatttaagagtctttatggagaagggtgagtaacttacaataaaatttcgatttcgaacgggtgtgtattaaaacttgactctcatgcagttctgacgatgaggagcagccagcagaagagaaaccagaagtgacaccagctgaagcgacagctccagccgaaaatggtcaagtctcgacagaaggtttgtccaaatcaaagaggaaacgcctgaaacgtaaggctgccgcagcagcagccagtgctcctaaggttctaaaagaagaaagtgactccaaggatccaaaggaagcggatggatctactgaagatgtccaggcagaaagttctaagaaaaaagtcgatactccctctaaaaagggcaaagatgacgcaaatcaggaaactaaaaacagtccacaaagcacggagaaaacgaaaaacaataatgccttaaaaaataacaaaaaagagcctaaaaacgtgcaaaatggattccaaaaaccccaaaatcaagcaaataaaagtgcaaagacaaagtcgaaccaaccatttaaaactacggaaagtgcgcctgcaaaagcagaaaaatcaaatggtaataatcctttcaataagccacaatcgaaatcccaacaaaggcaggaactgccaccaattcataaaaatcaaggtggaaacaaaaagggaccgagaaacgctaacggcaccaatccctttaagaaatcaaaccaaaagccaagtgcacccttcccagctaagaaaacgaacaactttaaggcgaaaaacaagcaaaataacaatagtggaataaccgacgatcgattaaaggcatatggcataaatcccagaaaattccacaagcgggaaaaatatggaaaaaaggataactaaagagttatgataaatctaagaataaaagttcatatatagttatacattttatagttacattttatgtacatatgataacatattaaaaaccaacacagcacaatgaactctgatttgatcagttattctgcggcagtcacgtcatcatcggtggccactccatcatcatcatcatcatcgtcctcggtgctcttcatgcgatccaattgaagacgccgctcttggatgcgaatgcatttggggcaaatcatatttttgcgcgtgaggcaaactcggtggaagatggaattgcactgatcacacttgatgcagccatcgtcgaagggaaagatcacctcgttgttgctacaaatctcgcaaatgtacgcttgggcaaggcacatggggcaggatcgtatgtgatcattgaatgccttgaaaactccttgcagaaattcgctcagcgctccagattccacctggctgagatcacttagggaatagaactcatttgactgggccagatgtcgccggacacccagttgctgatccaccagcttcaactcgctggcaatcttgcaggcagccagatagtggcgcatatgcaccagattttggcgaagtttctttaccgcacacaatttttctacgaacacaaacagcttgggattgtcctcctccaagcgaatgagcggtttatttaggaacaacctaatctcttggagcgccgtgcgcgacactctgcgtggcgaaaagtcccaattgtggataatgcgggctggtataaagttactgtcgttccagttgcagcgagggcagtagtacaatccactatagtcgcatagacgcggctcaatccaggtattttctacgaggaaggagtctaattattcggaaccaaaagagtagccttaacttacttatatttagcatcgtcccgcactcggcgcacttgtatccctgggaggcgagtccgatttctggacatatctccgaaatgggatgctgccgctctgaaaccaggacatgggcacaaaccctcttcacgccatcgatgcacttctgatggaccaggaatccgcaatcgctgcacacgtacgagttctgcaccacactccaaataatggtggtgcagtggtcacagtagttcctcttggcggctgcctgcagacgattccgtttgccatgatgcgggtgatggggcacaaaatgatgacccaccacagcacgtatggcattcataactaccatgtccgacgatagggaatgctgctcctgggcctcctccagctcctgcagtgagtatcgcaaatctaccaggtgccgcaccaaccagcgacgctcctcgctgagttcctcgctcagcaggacgagatctctgcaatgggcgatggccgcctgcaaatcctggatattggcatcgctggtgaagattaggcgccattgctcgcgcaccaaggacgcgggaatgggcaacgccctgtactccgcaccttgtggaccactttcctcggagcctccggcctcggatccagatccagtggagccagagcctccaaggccaactgttgatcccagcgtggatgaggcgtgtaacaggttgctggcgctctcgttaatcaactgcgccaccgtgcccggaatgctcgtgagactgtccttccaggagctcatttttggggaagaacaacaaaacaagtctttgtgtgtttttttagcgaccagggatgcgagcaattggtgcagatgagcgaactagttatcgttcacggggcaaactgcaggtggttgtacgcatccctggaatgcaccttaatacagtgaaagaaaaaatgtgagggttaattatttataaatattttgaatttaacttttaatatttttaaaatatgatacaatttgaaaccatattctgaaatatgtcaagcgtggtttgcataaagcaaatatttttgttaccatattttaccatttaatattaaattgtaatttaagaaatctaacaatctattgtgtttattccagataaaaatgcctatttttaacttgaaaattcgtctgctaaaaactgtaggctttaaaactagtatcaataagccctttattctattgttccttctatttacatatattctgtaagtagaggaaaataactagaaaaccaaaaatatattttgaaaaattgaaaagagagtgacttgtgttgaatacgtttattgttcgatggtcacaaggtggactgacaagctgggtaaaaattgagttaaattacgatctctatggggtaagtggatgcagacaaagatataacaaggaaaacatatgtaatctatccaatatcgttggttcgttttggggttcgtattcgttgggtccaggatctagaccacattggtgtgctcgtcgcgatggaagatcttcacgtcgacgaacttgaagttgtggacatcgaagtagtagtcatgcttcaccggcctgttgaaggggaaaccgaagggcagggcgtccacgtagcgggaaccgtgtcccacgccgcagctgaccaccggatcgtagccagtgaactgggcaacctcgggctggtggtacgggtagaccatgtagaagaactggaacacctggccgcccttcttgccgcgcggcagcatcattcggttgggcacgccgcaatgggcctccgactgatccagcttgaacttgtagtcactgttggtggcgtccatca

SEQ ID NO: 24185 - DNA, 1530 bp, DROSOPHILA
ctggtcgctaaaaaaacacacaaagacttgttttgttgttcttccccaaaaatgagctcctggaaggacagtctcacgagcattccgggcacggtggcgcagttgattaacgagagcgccagcaacctgttacacgcctcatccacgctgggatcaacagttggccttggaggctctggctccactggatctggatccgaggccggaggctccgaggaaagtggtccacaaggtgcggagtacagggcgttgcccattcccgcgtccttggtgcgcgagcaatggcgcctaatcttcaccagcgatgccaatatccaggatttgcaggcggccatcgcccattgcagagatctcgtcctgctgagcgaggaactcagcgaggagcgtcgctggttggtgcggcacctggtagatttgcgatactcactgcaggagctggaggaggcccaggagcagcattccctatcgtcggacatggtagttatgaatgccatacgtgctgtggtgggtcatcattttgtgccccatcacccgcatcatggcaaacggaatcgtctgcaggcagccgccaagaggaactactgtgaccactgcaccaccattatttggagtgtggtgcagaactcgtacgtgtgcagcgattgcggattcctggtccatcagaagtgcatcgatggcgtgaagagggtttgtgcccatgtcctggtttcagagcggcagcatcccatttcggagatatgtccagaaatcggactcgcctcccagggatacaagtgcgccgagtgcgggacgatgctaaatataaaaaatacctggattgagccgcgtctatgcgactatagtggattgtactactgccctcgctgcaactggaacgacagtaactttataccagcccgcattatccacaattgggacttttcgccacgcagagtgtcgcgcacggcgctccaagagattaggttgttcctaaataaaccgctcattcgcttggaggaggacaatcccaagctgtttgtgttcgtagaaaaattgtgtgcggtaaagaaacttcgccaaaatctggtgcatatgcgccactatctggctgcctgcaagattgccagcgagttgaagctggtggatcagcaactgggtgtccggcgacatctggcccagtcaaatgagttctattccctaagtgatctcagccaggtggaatctggagcgctgagcgaatttctgcaaggagttttcaaggcattcaatgatcacatacgatcctgccccatgtgccttgcccaagcgtacatttgcgagatttgtagcaacaacgaggtgatctttcccttcgacgatggctgcatcaagtgtgatcagtgcaattccatcttccaccgagtttgcctcacgcgcaaaaatatgatttgccccaaatgcattcgcatccaagagcggcgtcttcaattggatcgcatgaagagcaccgaggacgatgatgatgatgatgatggagtggccaccgatgatgacgtgactgccgcagaataa

SEQ ID NO: 24186 - protein, 492 aa, DROSOPHILA
MSSWKDSLTSIPGTVAQLINESASNLLHASSTLGSTVGLGGSGSTGSGSEAGGSEESGPQGAEYRALPIPASLVREQWRLIFTSDANIQDLQAAIAHCRDLVLLSEELSEERRWLVRHLVDLRYSLQELEEAQEQHSLSSDMVVMNAIRAVVGHHFVPHHPHHGKRNRLQAAAKRNYCDHCTTIIWSVVQNSYVCSDCGFLVHQKCIDGVKRVCAHVLVSERQHPISEICPEIGLASQGYKCAECGTMLNIKNTWIEPRLCDYSGLYYCPRCNWNDSNFIPARIIHNWDFSPRRVSRTALQEIRLFLNKPLIRLEEDNPKLFVFVEKLCAVKKLRQNLVHMRHYLAACKIASELKLVDQQLGVRRHLAQSNEFYSLSDLSQVESGALSEFLQGVFKAFNDHIRSCPMCLAQAYICEICSNNEVIFPFDDGCIKCDQCNSIFHRVCLTRKNMICPKCIRIQERRLQLDRMKSTEDDDDDDDGVATDDDVTAAE

SEQ ID NO: 24187 - DNA, 12631 bp, DROSOPHILA
tggtactatactatacatacacatgcacgtgtgctccctacacgttcaagcattgactttgttgaaggctctgcattaagttgcgttattatcaaaataaaaactatagcgttgcacatgatcggaggcgttaacttcgcaatcggctaaattaaaaacattcgttttgtgtcgtcagtacccatacatatatctctctatttatatatataaatatatatacatatttattttgtatataccttgtggtttgcggttaaagtcgcctagtttgtgaccaaattcatcataatttgcaattcatttcattagagtttagactttaaatcactacgattttcaaagtaaagcttggtattcagtttatttggattttcctcttcctaattgttgtaactaaacggctttggggtgaactaaattagtaatgcgattcgatattcgggatacagtattgtgctgtgctgaatttacgcgatttcattcaaagatatcggattacacttacttggttttttttttgttattatttggcagttattttgttgttgttgcaaaacattattagctctagcagtgatgtaatcccaacccaaagagaaccaacagtcgcaaaagcattgcaaacggaaacagaagccagaagctggaaaagcgggcaagcacacgggccaatcgaatcgaatatatgtgactacgttacttaggcaataataaattaattacgaaatataattgggctgaggtggtttgtggtgtgacaaggtgcgttgtggaaactaaggtaaaacgaagatctaaccatcaaaacaataacattatctcggcctgatctgcgatatatatgcacctaatagaatagactcggaaactaaagccaaactagttacagcatttgtttacagttacaaaatccttaactccttaacactgcttatacgtatctatagccaccagctgggttcaagttgtgtggataggacgccggcaatggagcgcactacagctgcgccagcgagtcggagcgaatgagcggcgccagtgagctgggcgccttgtgacccggctcaatctcgtactgtacgtctagcgaggcacctgcgaaagatcggaatggaaagtcagcacagtgtttttcacatcactgggaattttattcatgactaggttgcaattggcgcatcttgctccgggacaatgggtgggaagatggttagatggcttggcgaacttatcaacaatggcgtctgtggacccttacgtttcttttccaatgtggaggtctgcccctccggaatgaacgcggacactattatggcacagaagacgcacaaggcaccaaacacgaagggcggacctggcacatgctgtgagatcttctccacgttcgtcgccctgctgccgctgctcttcgcatgcgagtcgtggtcgtcgttcagatcgacgttaaacaggtagaagacgacgccgaagaccgcaggacccaggccattgcacagacccctcatgcccgtgatcatgccctgaacagcgcctgaaattgtgacatttgattcagctaagatctttcgaatggagcagttcaagcccttttacttaccctgactctcgggagccgcataaagggatacaaaagcactgatggcgggatacgtgatggagcccagggcagccacaacgccagccgaccacatcatcctgaataaagaagcgggatttaatttagatgatatgcctctaagatatttgagatatttattactcaccacttttgactgccaaagccgtaccacagcagctgcacgatttccagggctaggcccattataatcgtgcgcttggctccaaacactctgcgaaagaagcatgtaattagccaccgaaaaaatcatgctgaagaaatttaaactcactgcatgaaggagccgagtgtgacttgcaccgtgatgctgaggatgcctactatggctataaagaccgagacctccacatagttaaagcccatcttcagtttcagatagacaaacatgcaggaatactcccctgcctcgggcagataggataacagcacggtgaggcacagcatcagcacggtcttatcggtgcccactttgcgcagggcctaaaaagagcacagtgtcataaaactagtttgagagaattcagaggttaaagcttcagcttaccagaaatggatccgcctgctcccagctgataggcgcaccccaggaggctggccgcatcttctctgatagactctccggcacggccaccagtatgaagaatacatcgagcagcgcaatggccgtggagagggccacgaccagcgtgtctccgtacatctccatcagggcattgcccagagccggcgagatgaccagactggcggcaaatgtggccgaggccaggccataggcctttgatcgctcctccggcgtggtgacgtccgccacgtaggcaaacaccaccgagaaggtgactgcgaaggcgccgcttattgagatcatggcaaagaaccaccacgtattgatggacatcagcggtatgggcaggcaggtgaagaatactgtgactaataggaaaaactttcggccccagatgtccgaaagggcgccgatcagaggcgccgacaggaacgacaggatccccttgatgcccatgaccaggccgttcattaggaatgtgtgatccgggaacgtctggttgagagtctgtgcgaaaaagaggaaagagttaaaatctgatacgtatataaaacatatatagttatatagttagctcaccgatattatgggcatcgtcagcaggccccaggcgaagaactctagaaatatcacaaccagcgcatgatgaacactcggctccccgattccggaactctgtgaaattagaaattagaaagctcattagtaataatttagatatctatcggctaattaaagtgacgcgcccgctgccaattggcataatagcaggatgcactggcggacgcacccatgcgagtgcgtcatcgttttgaacccaaccagttgataaggcgacgacaatgccgcgttaaccctttgagtccccggccaattgctggccgcctttatttgtaaacatttgagtcccgcgtcagctaaaaacaaattgtactaaatgcgaaactgtttgagctcgttaactgcaccaatgtcacccgagtccggctggccatggattcggaatgccggcaactgatttgttttgtcgcgcttcaataaatggaaaacgaaacccaaatgatttcggttaatatttaaactagtcaagaagctttcattatgatcagaaaagatcgaataaggaagaatatattgtaattaaatataatagctactcgggttaaaggtgactcttaataagtccctattgaattattaattactagcgctaattaactggaaacttgtattgttgtattgaagagaatgacatctaatgaggctcagtatttactgaattcaattaactagaaaactaagttaataaccggagcaatccgattgtttcttaatttttagtttcgttaatatcccacttattttaacgtagaaatattgacatgatttatctactttggagcttttaaataaataacaaataacaaatagttttttctttaacaatattctccatcaaaacaataattttccatgttccaattaaatgtggacaaggtcttgagataagcgttatctgttagataaattaaacgtttatcgagtttatcttacatatggtacatcttatctggctattgtgaaagaaacccaattacacagaagttatttgagtctgagtaattatgtaaagccctttaaaaaattagattattcataataataaaccttaagtgaacttgtagctacattacctataacaagtaacatcagtgaatggaattgtatatcagtaaatgggttaacttaactgaaaagtgtgtgttttttatgaaataccttgcagcagcagatgttgcacacaacgcgaatccactcgaagaagcggttacgctttggtcgctccggagtcgcctccgagttgccgccctgcgatctcatcgagatgtaggaggcggccgagtgggtgcgcctgtgggcggctcctccgctaccgccgcacactcggcccgatcccgacgacgcggtgatcgccgtctccgcgaatgccgcgctgggatgtgctgctgcagctgcataccgcgaagtctgcggggatgtggaagttgaggaggaggaggacgaagatgagggcgggctctgccgcagatcgcacccacttaccgtgggcacatcgtccgcatcgggctgctgactgcagctggagctggagctgctgtccgcctgctctgcctgcttgtccttcagcggagagtgacgcttgaccagctgattgccccgaccgccaaaggcgggtggtgagagcggcagggagctgatcgtctccacatcggccacgtccgccgttgtcggcgtggagctgctgctacgcgtgctcagactgtccgtctgttcacccgactcctgccgctctcgatcggcatccccatcccgatctgtatctccgtgcgccgatggttctcccttgattgccaccggtgaattgacctgttccgcctcggaatcctccagctcgaagctgctctccaacgtgtcgctctgccgctggccatagctccgcccgctgcgcatggtatcgtgatccgttttagctgcgtgtctccctcttggtttctagtgcttctgtgggttcgcttatcacactaatttccattgccacgggtccacgaacatgtgcgatgtgcggtgagtggtgatgatgatttcggctgtgattttggggatacgatccgttccactgctctgcactccaccactccgtttatctcctcgtttctgcggcgatcgaagcgatgttctatcttatcatttgtttggcttaaacacgctgtttccgctggcaacgtttcactttgaggcacttctctagctgcaattaaagttggccaaccgaatggctcttactcatttgaattcatgcgaaacgcgcgatttgctttcagctgttccctaggaatattaagttggcaaaacaacacactaaaaacatcgccgtactgaacactcttgtttgtttgttgtttaatgaaaaaccgtttaaaagttgtatgcaactactagagtaaattaataactcgaaaaatatgtgtgatttatatttggaaaatgattttaatccttaaaggcgccgcaaagtatgctgctttttgtcggaatctaaatgtgttatccacacttacttggcccagaaaaagataaagatcgcgctaaaagccacttaatgtcagtgctttgtggcgattttaacaccctggtgtaaatcgcagtcgcaagcttggataggctcgaaagtagatcgatcaacattagggaaatgagcaaacgaagcaatttaaatcgaggcacatcaaagtgaaatgaatggaaaatcaagtcggcgctgcctggcagttcacagcaattttccggtcatgtcagatgggtcgaattatttctgggaattgtccggtccgcagaacgtggaataaacaatcacatacccgccgacttttggatgcctggactcacgtcagatcacagcgattcacaccacgcgcgcgaatatcgatctctgaaatttcaattaaatcgactaacgaaaaaaagtcacctagaattttgacaaacatgtgaatcaaaaacatctccaactgtgacgctgtcgatatcgagattgttccccccctcaaaaaaccagcgacgtctgctgcgtttcgatgtgcgcgactcactaaattggatcgcttgggcactcggttctccagcccaccgattcgccagttctccggtcttccagtgagcggaagctcggcagagcaacagagaatcccagagagaaacacatgtccacctgctgtgaagcttatttacaaaagagtcacaagcagaggcacacgatagagaaaagatacttgaacttgaagtatcgaatgaaagatatccattgcaatttgaatacatttttcgttttaaatacaagtccgaaatataaatatatataatatatataaaatatatttgcattatatgtttgcatttgggttgtttaaatgttaattataaacgagagtatgatcaaatcaaaacattagttccaagcacacgtactttacagccattgtgacttacaaagtttcaaattctattaaattaacaattctattatcccaaatggcaaaaatacccctcacaagcacaataaaatgcccaaaagcaattgtcgcacatatcacatagatgaacttgacaacgatgatgaaagtttcgcgttaaaagcaaatgagcagtgctccccagtacaatggaaatgtttttgctatccgaccacatggattttattgttatcaagcactctggaattatgctggctacttgtgttggctcaataaagtctcaggatgacggagccgaaaagatccgatgaggttgatttcgggggattctatgctataaaacatgtaaacatacataaactacagtgcgtgatattgaaaggcaaattatttcaataataaataaataaacatattacatatatttacaatgaataataatacaatgaaataataatacaatgaataaagttgtttttgcctagttatctataaatatggtacgccaaaatatgtaaaattctcataagaacgaaatggataagttcgcgaacttgacgcgcataaatctcagccgcgtgcgtggaattagctagatgaaacccatttaaaccgagctggtgatggtgacctgaccccgccggaccgggcagtccgtgagaaaacggcaatcgggtcaagtgcaggccgggagaccgaaggcgcttcagaaattcaatttccgcgactggccaagtgacaagggattggacttggacagcctgttgtccgagagggaaacgccagctgccaagtcaatcatggggagaatgaaccggaggatctgcaccccccccccccccccttccaacacatgggcctgcatgtgtcgcatcaaaaggcattaggaacgaccttgacaggagcgtcgaaaagtaaaacaacaggacgaacgggagggaacaggcatccgttttcgttttgcaggcacggcaaaaaaaaaaagcaaaacaatggaaaaaagctgacaacaagtcagcacgatggcgtaacgatttggcaagagacatgctggaaaatacatttccatgttttcctttcattaatgtcacaaaaaagtgactagctagtcgtttgtcgctgggctgggcactgtcaaattgaaaagccggctaaaacgggctgtgagctaacgactggtggctataacgtgccctcgactgaaatgcgttgcgaatttttggtttggtttgctaattaatcttgccggtcatgggcaatccatccgatgggttgccctcccgcaggacacgcaaaaattcaaatgggaaaaaggttggcagggtcaagttgggggccactcaggtattcgcaggccagcgaaatttgtgatacgatctgaacttcattaaaatgcatttaatgccactgaaaaaaaaaatattctctataatatattgttaggctgaaaactcgtgcacttgcatcggtaggcaaatgatgttagtttagaaattcaagcctgtacatttgtttcaacttcatttgagagaatccaataatatgcaaggaatgctttcataaatcggcattttattcaaatttcgtagattgtgttttggcgaagttacaacttgctccacattgaaattttgcgctcgtggcgcacttgatttcgatttggatttcgcaataatgccaagaccaccagacaatggccaataactggcaactccattgttgtggcttattgaaaagtaggccaaagcccgaggctccaaggacaccgagcactggcggcacaggcagcacagaagttgccccaaagtggaatatcctgctacccgattccttctgcttgcttcctgccacatgccaagtcagagattatcgcgcgtgggtccctgggctggcaggtgcttgaatccttaagcataggaatctggcgggacccaaggactgtcgcaattttaattaaaaacgctccagcagacctgacaaatcaatcagcggcacttttggcaggggtaagcaacccaaaagccgggcattaaaagcaaacaataagcggaattccattccattaaatttccttcttctatgcgggcttattgtttcaaaagtgtgggcagaggggttttaagatgtaacttttccggtaaggctaacaaaaataactcattttcctcaaagcagcaataatgaaaaagccatttctatagagccttcaatgaaaatgtacaataaaaggtataagcattaaaatgaaaaatgaagctacataaaacaccttgcaaaaacaattaagcaacttttggacaaatacttatgattttcactttttcctactcattcgaaagagcttaaattcctgccaagtgaaactgaaaacgcgcacgtggtgacttccatcgaccaaccgaagcgctttcatcttccgccatggctgatgccaaatgtcagcccacatgaactgcggactggctgacgactggtggctaatggagagcattccctggcaccaaggtcatgtgagtgcaccagcggaggcaagtgaaaaggacgcgagtagtgctgaaagagacgagcctgtgctggcagatgttgaaattcaattcagagcctgcagcgcgcgtgcaacgctgcggatacgtaatgtgcccgctcacattagccaaccaaccaacacaggctcaaccaacactctcgtgtgaggcaaacgctgcccgccgcctttcaatattaaaaatagtttgtcaacatggcccgaaagtggcaagctgcgacgggtgcagcctctaaatgggttcgagacccacaagcgcgatgagcaggaggaggaaggcgcaggatgggaagatgatttggaggagctcactggctttctgggttgacactttgagcaccccgctgccgccagcaaataatcaattctatcgattggttaatatatatatagggttgtaaactaaactaattcaacatttacactctgtaaactcttcagatttcgtaagatgtaattttttgtaaccgttttaatccgcatagttctaaaatcaactgttgaccgaatttcgggcatagggataaccaaaaaggacgcaggacaccacagcaaagcacaggatttattgattccggcagctagatgaaaaatgaaaattgcagtgctggcagaaaaaacaccgaaatcacagcaataccagccgcaatcatccatatgtactgacctgggatttcatcagcgagccgaatgaatggcgtctcttattgattagcggcaatgatgcacccagaccaatccaagcgaaccgaacccctggcaccacccaaccatccacccatcccatcagccgaaagctaacccgatccgaatctaaattcgatgccgagcacccggctgaccttgcatgccgcaccaactattggctgcatggcagacacggaacagcagttgttttaataaatttatgattcccgaactgttgcccaaaaagtgttgacacaacaaaaagaaagagaccgatgtaaatgcaacaaccgcagactaaaagctgcaacacgacagtgcaactgcatcagcggaagtcgtgcagttaatttgcataaggagacaacggaagcgggtgctttcgaggattggcacgtggccaaaatgccatagcactacgctactttgcttagataatttcgctcgtactgcattagattataaagagacataagaagcaccagaaaaaatgcacataataaggtgttgctaattaaatagggtttttggcttttgggtaatgctgcattaagcatttgaatggcaaaaattgttatcaaatgtttgcatattattaatttctcagctttttgatattattcgaaggttttagacaaaaatatattttaaaagttcttaaataaaaccccctttcacttgcggataagtcagtatctttgaggtgtatcttttagtcactggggtataaaataaatccagtgctgcacttgacaagcgtagagacccactgcggcatgtctatgagacaataggaggccccaactccgaccaaaggggaaaggggagccgaacaaagcctccgaattgggtatataatttatggatgccaacgcgttatccaacggcgttttgtaaggctcgagcagccactcatgtggcgaagtttcgccataattgattggtattcgagcgcctgactgtgcaaatgtttgtcctggcttcaggactcaatcccaactcgtgcctcggatgagaatgaaaatttatgcgtggcagactctttccatttcgctttcctagcaaaaaagaaaaaaaaaaaatagaaaagaaaagcacataaaaagtgtcatggaaattttgcggcgaaggtttattgaactctcaacgtttgccaagcaaatttggttaggcaaataaacgtgggttatgtgattaagtgagatgttctctcgccagaatgactgcatatcaagcaatttgtacatccgccgtatataacatacttatatccatatagaatgcaaatccgattgttgcatgcaccgcggaatagattatcatagatttaatgggctctagaaccagaagctcatcggctataaaaaatcattttacgagcgctaaatgcaaacgaatttatgcgaagttctcggaacattaaacaacagcatgctggtcaaggaaattataaggatcggaaaaatgggcgagcttgggtgaccttcttcaaggaaagcggacgcttttccttttcccttgcctttgcgtttcgtttcttttcattgccgttttcattttcgttttcgtttccatttttgttttttgtgtgcgtcaggcgggcgaagaacaaaggaaatcagtaacacgagaggctgaaggaaattcggtttccaaggggaaaattgtccgccacatttggtttttcctgcgccaaaacgaagaagcgaagaaaaaccagagatatgtacatgtatagtctgatctcatgaacaaaaacataattgtgccgagaataacaacaagagtggggagggtacagttacagttttgcgtaacgggacgattttcccagttttccgtgggtggaaagctgaaagcaaaagcgaattgagtgggtcagcgaatcgagaagcatttcaagttcactcctcgctcatttcccacttttcaatcattgaatttgcacaaaaacacacttttcaggcaattttcctcgcgaaacgagctgtttcaattttctttgctgttcatacaaggctctatttaattgcacatggtaccgatccgttataattagcaacaaaagcagtcacgaaaagaaaacgcgtggaaattgtttggcgaatttttcgtttgctacacggcgcgacaaaatgtgcgcttcgcgatgtgcgcttttccacacgctgcgccgtactcagctggaaaagcgtctggcagagcattttctttcgcttgcacttttcctcgcgtttttcattgaagctttggccgcgaaaagctttttggtattttcagaaaatgcctctcactgcggattcatgatttattctaaggcatgtacacaacaaaggtttgcaaacttgcataaattatttatttgaaatgttccacaaaaataagtgatttcttcttcttaagtgtagtatatttaagtaaaaatatatattatttgttgcttttttcacccacactttttgtagggattcatttccccctatcccaattactttcgattctttcactttcgtcgtcgatttgctccataaacctgctttctcgcgtgcttgagaatttcccacaacaattaccatcggactttttggccattgtttgtttgtttgtttgtttgccttgttgctgttgttgcatgccacattttcccggcttcgcattttccgagccaaagctttcgctcgtggggcattttccacgctctcctggcatttcattctgtggttttagttttatctctggcacctgttcgcttctgcgccctatcgccgtgttttatgaatgaaacagcttttccacatttccatcgcactcacggcgaaaagcttctctcggtgaataaatttacaagggaattttgcaaaaaaaaaaagttcagagaaccactaaaaactatggcttgttctggggaaattatctaattgcttgggaacggttgtacgtacactgtgagcaattcaacttacatacgatgtaaaatgaacaagtacaaagttgtaaattaaattacctatgtgacccgaagttttgaaaggcataatcttgttatttaagtgcactaagtatgcattactttctcagcaaatttagcgcagttaaggggcgcttcttaattgaaattaacttttccgaaactaggtttcgtcggaaatctcctgggtggcatc

SEQ ID NO: 24188 - DNA, 2547 bp, DROSOPHILA
tggaaaagcgcacatcgcgaagcgcacattttgtcgcgccgtgtagcaaacgaaaaattcgccaaacaatttccacgcgttttcttttcgtgactgcttttgttgctaattataacggatcggtaccatgtgcaattaaatagagccttgtatgaacagcaaagaaaattgaaacagctcgtttcgcgaggaaaattgcctgaaaactagagaagtgcctcaaagtgaaacgttgccagcggaaacagcgtgtttaagccaaacaaatgataagatagaacatcgcttcgatcgccgcagaaacgaggagataaacggagtggtggagtgcagagcagtggaacggatcgtatccccaaaatcacagccgaaatcatcatcaccactcaccgcacatcgcacatgttcgtggacccgtggcaatggaaattagtgtgataagcgaacccacagaagcactagaaaccaagagggagacacgcagctaaaacggatcacgataccatgcgcagcgggcggagctatggccagcggcagagcgacacgttggagagcagcttcgagctggaggattccgaggcggaacaggtcaattcaccggtggcaatcaagggagaaccatcggcgcacggagatacagatcgggatggggatgccgatcgagagcggcaggagtcgggtgaacagacggacagtctgagcacgcgtagcagcagctccacgccgacaacggcggacgtggccgatgtggagacgatcagctccctgccgctctcaccacccgcctttggcggtcggggcaatcagctggtcaagcgtcactctccgctgaaggacaagcaggcagagcaggcggacagcagctccagctccagctgcagtcagcagcccgatgcggacgatgtgcccacgacttcgcggtatgcagctgcagcagcacatcccagcgcggcattcgcggagacggcgatcaccgcgtcgtcgggatcgggccgagtgtgcggcggtagcggaggagccgcccacaggcgcacccactcggccgcctcctacatctcgatgagatcgcagggcggcaactcggaggcgactccggagcgaccaaagcgtaaccgcttcttcgagtggattcgcgttgtgtgcaacatctgctgctgcaagagttccggaatcggggagccgagtgttcatcatgcgctggttgtgatatttctagagttcttcgcctggggcctgctgacgatgcccataatatcgactctcaaccagacgttcccggatcacacattcctaatgaacggcctggtcatgggcatcaaggggatcctgtcgttcctgtcggcgcctctgatcggcgccctttcggacatctggggccgaaagtttttcctattagtcacagtattcttcacctgcctgcccataccgctgatgtccatcaatacgtggtggttctttgccatgatctcaataagcggcgccttcgcagtcaccttctcggtggtgtttgcctacgtggcggacgtcaccacgccggaggagcgatcaaaggcctatggcctggcctcggccacatttgccgccagtctggtcatctcgccggctctgggcaatgccctgatggagatgtacggagacacgctggtcgtggccctctccacggccattgcgctgctcgatgtattcttcatactggtggccgtgccggagagtctatcagagaagatgcggccagcctcctggggtgcgcctatcagctgggagcaggcggatccatttctggccctgcgcaaagtgggcaccgataagaccgtgctgatgctgtgcctcaccgtgctgttatcctatctgcccgaggcaggggagtattcctgcatgtttgtctatctgaaactgaagatgggctttaactatgtggaggtctcggtctttatagccatagtaggcatcctcagcatcacggtgcaagtcacactcggctccttcatgcaagtgtttggagccaagcgcacgattataatgggcctagccctggaaatcgtgcagctgctgtggtacggctttggcagtcaaaagtggatgatgtggtcggctggcgttgtggctgccctgggctccatcacgtatcccgccatcagtgcttttgtatccctttatgcggctcccgagagtcagggcgctgttcagggcatgatcacgggcatgaggggtctgtgcaatggcctgggtcctgcggtcttcggcgtcgtcttctacctgtttaacgtcgatctgaacgacgaccacgactcgcatgcgaagagcagcggcagcagggcgacgaacgtggagaagatctcacagcatgtgccaggtccgcccttcgtgtttggtgccttgtgcgtcttctgtgccataatagtgtccgcgttcattccggaggggcagacctccacattggaaaagaaacgtgcctcgctagacgtacagtacgagattgagccgggtcacaaggcgcccagctcactggcgccgctcattcgctccgactcgctggcgcagctgtag

SEQ ID NO: 24189 - protein, 680 aa, DROSOPHILA
MRSGRSYGQRQSDTLESSFELEDSEAEQVNSPVAIKGEPSAHGDTDRDGDADRERQESGEQTDSLSTRSSSSTPTTADVADVETISSLPLSPPAFGGRGNQLVKRHSPLKDKQAEQADSSSSSSCSQQPDADDVPTTSRYAAAAAHPSAAFAETAITASSGSGRVCGGSGGAAHRRTHSAASYISMRSQGGNSEATPERPKRNRFFEWIRVVCNICCCKSSGIGEPSVHHALVVIFLEFFAWGLLTMPIISTLNQTFPDHTFLMNGLVMGIKGILSFLSAPLIGALSDIWGRKFFLLVTVFFTCLPIPLMSINTWWFFAMISISGAFAVTFSVVFAYVADVTTPEERSKAYGLASATFAASLVISPALGNALMEMYGDTLVVALSTAIALLDVFFILVAVPESLSEKMRPASWGAPISWEQADPFLALRKVGTDKTVLMLCLTVLLSYLPEAGEYSCMFVYLKLKMGFNYVEVSVFIAIVGILSITVQVTLGSFMQVFGAKRTIIMGLALEIVQLLWYGFGSQKWMMWSAGVVAALGSITYPAISAFVSLYAAPESQGAVQGMITGMRGLCNGLGPAVFGVVFYLFNVDLNDDHDSHAKSSGSRATNVEKISQHVPGPPFVFGALCVFCAIIVSAFIPEGQTSTLEKKRASLDVQYEIEPGHKAPSSLAPLIRSDSLAQL

SEQ ID NO: 24190 - DNA, 9664 bp, DROSOPHILA
ctggcgtaaataattcgatatggccatctccagatcctggaaaccatactgattggccatgcccagcacatcgatggtggaatcctcgtccaatgtggacagcagcagtgtgcccgagtaaatgtagcgcagcagcaccttgaacgcttccagcggcacctcaagcggtatttggcgctgtgtggtctccgccatgccgccgtacagcagcgcccggaagtattcgctgcgtgccgcgagtatgacgcggtgggcgggtatgcgctcctcctcgacgatgaactccacgtccgcgtactgttcgttcatgcagaggcgcgccatgtccgctgagaagcgatcgcccagatcgaccacgtcggtgtagtcctgctccatggcgcccttcttgccgccgccggacatcttatggtgtccctggctgctcatccttctcttttttgtttttcttccgtgcgatgtgtatttatgtgtgtaagcagccagagggaacagttgacaattaacgtttcgtctcgcctgctgcgtcaatccatcgatgacagttagtgatatcgataatatcgatggcacaatagggattcttctattgcggcgaaaaactgttatatgtgcagtgtgaccgtaggtgtgtataccatttaacgcgtacaacaaccatatcgacagccgtctgctagcgagcacatgaaccacatggttgcatccgataacatttagcgaatacatgaaccaaatggtgtctgtctaatatgccaccactattagcgcgtttcgggttggtgtctctgcgcgctcactggtcacacacggtcagtctagccacagcagttagcgagtgcagtcaccacagtgcgagtgcttatcgataaaaccagcaagtcatcgatttttagaccgaagcgctctgtcaactgctgcgcacggtcactctacacaagtatttcgtaccgtttgtacgagaaaacagagaagagaaaaacacaagctcagcaacgcatcgatattcggcacagtcccaaaagcaaacgaagtgatagaagctgcgtttcttagccaattacctcttcattgcaatcatgaagttccaatacaaggaggagcacgccttcgagaagcgtcgcgccgagggcgacaagatccgtcgcaaatatccagaccgtgtgcccgtaagtactcaaaaatatatatataaatgcatataggtataaagagacgtgtgtgtgtgtgtatatatgcgtgcgagtgtgtgtgtatgtgcgagcttctgtgtatgcgtttgttttgcgtcgttttttttctcgctctttttttttgtgtttgcaccgaagaaaatcaatactgcgcatattgggtatttcgattgttattacaatattattgcactggcacatcaggtggctggggaaatttgtgcgatgggtattgcataaagtgcattttgcattactggtggggggaacaggcgacaagctctcaaaagaaattcaaacgaaaattctgccccctgcatacacacatacgcacgcatacacgcgcacacaggcacacagatgtcgacaggaaaaaacaaaagcaaaaaaagggagagaacaaagcagccgtttcacttgctcagctgttgtgatgttgttgttttcagtgctagatttcatctgtgccacctcttcctctcctctatcccaccctctggctacacagcaagaaaatcgcatatatctatctgtcatcataatttagttacaagcaaagttttgaccaccccgttttttttctgtgtgtgcaccaaccagttgttttcgattttaatttcgtttgtttgttggcaaaacgagcgagtactgcgcataaaaaaagtcactaatactcactaatacacacttatactagcgctgcttgttttgtttttcgcaaatacacaaagtgcgactggaattagtcatagatgcgctgctgaacacaaaacaaaaataataaaaaaaatggaaaacagaaaggttgaaaaaaacaaaaacatcttctgcttcttctttgttgtttttctgctatgtatgtatgcatttcaccacgttatcagcgaaaactcctttcacaaaaaccaaaacaaaaccaaacgaaacgaaacgacaaactgctgaaggtgccccaatcgcagcgaaaagtgcagttcttgttttcgattttgattcggactgcatatgcatatgtatatatgtacaaatatgtacatatgtgcgctatatatgcacccccgaaatattattgccagtgttattttagtgttttttttttttggcaagtgcagcagtgccaaatcacaaatcacataacagctgagcgaggggcaaggccagctggtcgctcggaccaccagcatatccatatatatccgaattctatagaatatacttagtacatacatacgtactagcacatctcatacttgtgccttgagttcggccaatgacgataacgaatttcgatagaacactagtgtatagaggggtggcattcgcgacaagcagtttttgcccatttcgtattcactatgttggcacccgcttcctgttccaaaaaaaaaaaattggacaaaccagtttgccaataatttggctaaggctaactaatgagcccctggctagaacggatcgtctagtctaggccagctagcaattattccagagccaaggaaatgcagtagattcgttacaaagctcacttcaatgaccaacttggtcgtcttggtgatcaatttggctaaaatgctgtaaaatgtgtatgtgtttttgcataatgaacaaaaaaaaacagatgatacaggtgaacttgaatgtaaacaggtgctagaaatcttaattatattacaaaacatataccccttgaaaaatgcattgaatttggcttaaaaataatatgtgaacaaaaacacacgtgtgtgtaattacacattccaacttacgaaattccaaaatgcattacgaaattactgactgaaattacgaaattactcattttcctgtctaaatataatatgagtcaggccaataacaatcaggtatagttgttcgtaaacaaattagttttcaattaatattaaggtattttgtacactagatagcaagcatcagaattcataagactatagtttatgttttcggcattatcatattccaaggtagcacgtattcgagcacacttgcttccagcaatgcaaatgccatttgtagccaaatatgtgagccttattgggcacgtaatcaggtgcgaaatgtgcgcacattaacatgcacaagtagcccgcaacaacaactcacctcctgtatttcttcttctatttaaacccaaaggtcatcgtcgagaaggctcccaaggcgcgcatcggtgatttggacaagaagaagtacctggtgccttccgacctgaccgtcggtcagttctacttcctcattcgcaagcgcatccacctgcgtcccgaggatgccctcttcttctttgtgaacaacgtcattccaccaacatcggctaccatgggctccctgtaccaggtaattaccacaatgcccattattattagccttgcaatcgaatcacatacgttcgatgtatttttataggaacatcacgaggaggactatttcctgtacattgcctactccgatgagaatgtttacggcatggccaaaattaactaactttgctccggtcgggatgcatcggaatgaagccccccccctatacagaaatctatatataaataaaatatattttgtgtttagcatgcaagcttacaatatggacggcgagttagctaaacgaattgaggaaaaccgcaggaaatgccacatgaaaagaacttgaaattgatctgatacgcagggcaacaaaaaaaatccacaaaaaccgaaaactacaaaaacaattgttatgtgaacattattttatatatatacattttccaaacgcgttagtatttcaattaaactctgctttgtgtcctacccattaacgaaacaaccaaccaaccaactttccccacaaaaaacagatctattcacaccctttctgggccatttaatttccattgctgtaattgatccgtgcgaatgctttgtactttactttgttactttgctaatatttcaatgaattcactatttttttttttattcacgatgcaacaaaattctgtgcatatttagtgtgtatggttacgaataggactctctcggttaagtgtacggtaattaatctattattaaataaacaaaaaccacaaaaatacacatgcaaagggtgtttgtttatttggattgttcttcgttttcagtttgcaatcacgtatatcacgcttagatgattcagcgataagtgacaggaagaagttattttatactgctttttcttttgttcaccgaacaatgagtccttatcttttaaaaatgaaatgagctttagcaatgagtgggtgtttttttttattctttgctattagtaacaaaagcatttatttattttaaattgaaggcgtaaaaggtagtacttatgataccattcgcaacgcaaaagtttaagtgtgcaaattaaattgaaaagaaatcactttgtttattgtttgcttatcttatcgcagcaaaggcactttgctagccattcaaaattgccgcccacaaacgtttttatgggcagcactgtcatcaaaacacagctggtcacaccatcaagtgctgcaaagcaatatctcaagtcagccataaggagagcatgtgctaaaaagggacagctccacacaataagtacgattaaattgcgatatatttttggtagttagtatttttgacgcatttggcggacgactgagcacgtttgaatttcgtggattttttagccaatttcaccatctggcaacactgttcgttggcctcgcagtttttcaccgaaaaggttttgtaaaaacaccgtgccaaactgtcagagaagcaggtaaactaaagtccaccttgtcggatcggccactgaaaagccggattaaacaaacaacggacacgttaccgaacagctcggaaaggtgcagaaaggaaacatcagatgaaaatctattagctgttgcgaattgtttgtttttgctgtgctattcgtgtttttgttgttgtgcatatgattgtgtctctgttgttgttggtggtggtgttgctgttgtaactcgtgacgacggaaattagtaacaaagtgaaaattgagagttcaaaaaagaagagaaccccgaaataactgttgtgtgggtgcgattgatttttatgctttgtcgtctggtttgttgttcttgctgtcagagggtggttgcaacggaaaagcaacccaccaccccctgggtttttgaactccagcttatgaaaaacagctgcagcgattgccacacaaaaattcaaatgtttaagtgagaaaagcgaaagagaagtgaacttagcgcttattgaattatggctaaacacgctgactagaccaaatcgaaagaacaaatgagtgctataataacaaaagtgccagaaagtgaaacaataacaacaacagcaacgacagcagtcgtgttattgtccactcagcttgtttttgttgttcgctttgtggccctgtttttcgcttctgttttgcgcttctgattctgaagtcgcctgcttcttgtgccgcctccccttcctcccaccatacatccctccctccctctctttctgaccgccgtctctcttttttacgcgcatgtggattcattttattggtgctcaagtatcgcatgataatctcacgctacgtccctcgtaattgttgttgtaatcgctgtcgttctgtcagcagaatgtctttattgttattgttgttgttgtgcttttccgcctaacacacactaacacgcgcacacacaggcacacttgccgaaaaattgaagccattctcgccgcaaatcaaattcaattgagggaaactatcaactaacccgcataaaagtgagaaaaaaaacatacagagaaacagccgacacttttatacacttccagttaaaaaaaaaaataaaacagtcagtaatataagttattaatataattacccaacaataagtttcattacaaaaatacagtttttatgttatattatttgagattatcatgacgagttcctacatttcttgaataattcggtgtatatgtttaatagcaatatctgctagttcttatcactactatagttttcatatttttctaagctgtgacacatacgtacataagtcgtatgtagcataatttttatattatttttaaagaccattatttcttagtttgccctgtgaaataatctgacaccttaactggggattacaaattagcctactatcagttgggaacttatccccttatcagtgctagtgaaaaccggctacctaagcgatctccaaattatcattacccgttgtggcacgcccgacgaagcaaccttagagtggaacgtatatagagagagagagagcttctacaccttacaccatcactcatttgaagcttatcagtttatcagtggcctacgacgatttgaaatttcagtttcatttccatttcctacatcgcgtcaccgtcgtgtgttcaaaattaataaattcttttcgaatcgccggcatttacatcactattattttgtattttcattgcaaaaaccgtgaaaaacacagccgcttgcaagccaaccgcttaaatgtcacagcattcgaaaaaggaaaccaccagcagcagcggtagccatgcggcccagagcaatcgtcacaacaacatcggcggcggcggcggaaacggcaatagcaacagcatcagcggtagcagcaacaacaagagccacaagcggcaggcggccaatggcagtctaaagtcgccactcctgacaatcaccaacatcaactcccacagccaaaaaggcgctttgaaatcgcccgtcagcaaagtcaagcagagcagcaacagcagcagtagcaacagtaacagcaaaaccctcagcgggagcagcatgcaggagaccggctcatccgccacatccttgctggccgctggcggcaaggcgaagaagaaccaaaaagacaagcagcgcgagcgggaacgcttggaacgcggccagctggtcctctggcgtcgtcccctgcagaccaccaagtactgcggcctcgagctgttcaccttgctgcgcacgtggagcaccaggtaggatcgaaagtagccccattttgaaaccatttaaccaacgctttcctcgcagattgctgcaacagcgtctcctgttggccactctgatagtattaagcatcgtatttagcgtaatttacaagatagacggtccccatcagttggccatcgagtttgtgcgccggaacacctggttctttgtctactggttgggtctgggcgtgctctcctcggtgggcttgggcaccggactgcacacgtttctgctctatctggggccgcacatagccagtgtcacgctggccgcctacgagtgcaattccctgcgattcccacagccaccgtatcccgatgagtaagtacatgtaggttctcttcctcattgcttgataactaactgcctgttcttgcttactcctacagtattatctgtcccgaggagccgtacgacaaacatgtgccaaatatctggtccattatgtccaaggtgcgcctggaggccttcctctggggagcgggcacagcgctgggcgaactgccaccgtactttatggccaaggcggctaggctgtccggctacgatccggaggacgccgaggagctggccgagttcgaggccctcaacgcgaagcgtcaccaaaagaacctcagtatgatggacaggggcaagctattcatggagcgcgttgtggagcgcgtcggattctttggcatcctggcctgtgcaagcgtgagtggtgaaaatcgctgagcggcgggcttactagattataattgacagaaacgatttacacttttgatttcactcgtaaagtaacaaatgcacatctagatattatttttagtaagcttcaaatgcgctttgctttaaagtaattagtttttagtttagtttgttgatgcgacggtcttaataacatttggtttcattcccccacagattcccaatcccctattcgacctggcgggtatcacctgcggtcacttcctggtgccattctggactttctttggcgccaccctgatcggcaaggcggtgatcaagatgcacatccagaagatctttgtgatcatcgcattcaacgagacgctaatcgagcgagccgtcgatctgttggccacgctgccagtgcttggccacaagctgcaggagccgttcaagtccttcctgaaaaaccaaaagcagcgtctgcatcgccagcagcgaggagcggccggtgcgacaaccggagctggagattcggggaatttgctgtcgcgcatcttcgagacattcgtgatcggcatggtgtgctactttgtggtgtccatcgttaactccttggcccagagctaccacaagaggcttcacaaaaagccggcgagcccagtagctgcgaccacgcccactcgccagtcgacgggggcgagcaagaaggcgggcaagcagaaagctttacgggactagaaaatcagtggatcagtcttctgttgatctttttccccaacccttggttttcgtttaaattattttgtatattgcggctttcgctcttagtcaaatgatgtatcttatgtgagtgtgtcggcgagagaaaaggagacggcgtggaagcctgaggaatttaccatgtagactagactagggaaaaaaacagaaatgaataagtaacgcgagtagcagcatcctattttagaatgtacaacaaacaataccttagcaattttccgtgtgagttcgtttaactaaagtaacgaaagtgagggagacgcagctagtcgcgactaatgaaaagcaaattgtgcaaaagacaaaccagccagagtaagcagagagcgctaaaaaagtaaaagataaataaataattattataataattataaaaggaaatatgtagacagaagcaaaaaaaaaaaaaaaaaaaataaataaattaaaaaaaagattgaacaagtgctgaaatataaatgaatatggatataaaaattaaaacttgatgaatttaaatgctattggcgggaaaacataaaaaatttaaatcatatacactgatgataaatcaactatatatggatatataatccataaatcatccatagtcatccaaagtaatacttttttccagctacaaaaaaaacgtgctgagcaagcagctaaaaaatccaagataatatcaattaactttagtgggagtaaggcccaaaaagtgaagataatccacaataagagccgggaaaaggggctcgaagttcgtttaacaacgaaatccgtggaattggaataagaaaatccgttatcaacacttggcccacagctcgaaatcaagctggcactcattaagccaaatagctgctagcctatggctacggttctattgcttgccccatcctctcatcccttcgcactcctcactctcagtctccggctcgaaggacaattgccgctgctggcacggatgatgagttcg

SEQ ID NO: 24191 - DNA, 983 bp, DROSOPHILA
tcgatattcggcacagtcccaaaagcaaacgaagtgatagaagctgcgtttcttagccaattacctcttcattgcaatcatgaagttccaatacaaggaggagcacgccttcgagaagcgtcgcgccgagggcgacaagatccgtcgcaaatatccagaccgtgtgccctattatctgtcccgaggagccgtacgacaaacatgtgccaaatatctggtccattatgtccaaggtgcgcctggaggccttcctctggggagcgggcacagcgctgggcgaactgccaccgtactttatggccaaggcggctaggctgtccggctacgatccggaggacgccgaggagctggccgagttcgaggccctcaacgcgaagcgtcaccaaaagaacctcagtatgatggacaggggcaagctattcatggagcgcgttgtggagcgcgtcggattctttggcatcctggcctgtgcaagcattcccaatcccctattcgacctggcgggtatcacctgcggtcacttcctggtgccattctggactttctttggcgccaccctgatcggcaaggcggtgatcaagatgcacatccagaagatctttgtgatcatcgcattcaacgagacgctaatcgagcgagccgtcgatctgttggccacgctgccagtgcttggccacaagctgcaggagccgttcaagtccttcctgaaaaaccaaaagcagcgtctgcatcgccagcagcgaggagcggccggtgcgacaaccggagctggagattcggggaatttgctgtcgcgcatcttcgagacattcgtgatcggcatggtgtgctactttgtggtgtccatcgttaactccttggcccagagctaccacaagaggcttcacaaaaagccggcgagcccagtagctgcgaccacgcccactcgccagtcgacgggggcgagcaagaaggcgggcaagcagaaagctttacgggactag

SEQ ID NO: 24192 - protein, 252 aa, DROSOPHILA
MSKVRLEAFLWGAGTALGELPPYFMAKAARLSGYDPEDAEELAEFEALNAKRHQKNLSMMDRGKLFMERVVERVGFFGILACASIPNPLFDLAGITCGHFLVPFWTFFGATLIGKAVIKMHIQKIFVIIAFNETLIERAVDLLATLPVLGHKLQEPFKSFLKNQKQRLHRQQRGAAGATTGAGDSGNLLSRIFETFVIGMVCYFVVSIVNSLAQSYHKRLHKKPASPVAATTPTRQSTGASKKAGKQKALRD

SEQ ID NO: 24193 - DNA, 5722 bp, DROSOPHILA
atatatacattttccaaacgcgttagtatttcaattaaactctgctttgtgtcctacccattaacgaaacaaccaaccaaccaactttccccacaaaaaacagatctattcacaccctttctgggccatttaatttccattgctgtaattgatccgtgcgaatgctttgtactttactttgttactttgctaatatttcaatgaattcactatttttttttttattcacgatgcaacaaaattctgtgcatatttagtgtgtatggttacgaataggactctctcggttaagtgtacggtaattaatctattattaaataaacaaaaaccacaaaaatacacatgcaaagggtgtttgtttatttggattgttcttcgttttcagtttgcaatcacgtatatcacgcttagatgattcagcgataagtgacaggaagaagttattttatactgctttttcttttgttcaccgaacaatgagtccttatcttttaaaaatgaaatgagctttagcaatgagtgggtgtttttttttattctttgctattagtaacaaaagcatttatttattttaaattgaaggcgtaaaaggtagtacttatgataccattcgcaacgcaaaagtttaagtgtgcaaattaaattgaaaagaaatcactttgtttattgtttgcttatcttatcgcagcaaaggcactttgctagccattcaaaattgccgcccacaaacgtttttatgggcagcactgtcatcaaaacacagctggtcacaccatcaagtgctgcaaagcaatatctcaagtcagccataaggagagcatgtgctaaaaagggacagctccacacaataagtacgattaaattgcgatatatttttggtagttagtatttttgacgcatttggcggacgactgagcacgtttgaatttcgtggattttttagccaatttcaccatctggcaacactgttcgttggcctcgcagtttttcaccgaaaaggttttgtaaaaacaccgtgccaaactgtcagagaagcaggtaaactaaagtccaccttgtcggatcggccactgaaaagccggattaaacaaacaacggacacgttaccgaacagctcggaaaggtgcagaaaggaaacatcagatgaaaatctattagctgttgcgaattgtttgtttttgctgtgctattcgtgtttttgttgttgtgcatatgattgtgtctctgttgttgttggtggtggtgttgctgttgtaactcgtgacgacggaaattagtaacaaagtgaaaattgagagttcaaaaaagaagagaaccccgaaataactgttgtgtgggtgcgattgatttttatgctttgtcgtctggtttgttgttcttgctgtcagagggtggttgcaacggaaaagcaacccaccaccccctgggtttttgaactccagcttatgaaaaacagctgcagcgattgccacacaaaaattcaaatgtttaagtgagaaaagcgaaagagaagtgaacttagcgcttattgaattatggctaaacacgctgactagaccaaatcgaaagaacaaatgagtgctataataacaaaagtgccagaaagtgaaacaataacaacaacagcaacgacagcagtcgtgttattgtccactcagcttgtttttgttgttcgctttgtggccctgtttttcgcttctgttttgcgcttctgattctgaagtcgcctgcttcttgtgccgcctccccttcctcccaccatacatccctccctccctctctttctgaccgccgtctctcttttttacgcgcatgtggattcattttattggtgctcaagtatcgcatgataatctcacgctacgtccctcgtaattgttgttgtaatcgctgtcgttctgtcagcagaatgtctttattgttattgttgttgttgtgcttttccgcctaacacacactaacacgcgcacacacaggcacacttgccgaaaaattgaagccattctcgccgcaaatcaaattcaattgagggaaactatcaactaacccgcataaaagtgagaaaaaaaacatacagagaaacagccgacacttttatacacttccagttaaaaaaaaaaataaaacagtcagtaatataagttattaatataattacccaacaataagtttcattacaaaaatacagtttttatgttatattatttgagattatcatgacgagttcctacatttcttgaataattcggtgtatatgtttaatagcaatatctgctagttcttatcactactatagttttcatatttttctaagctgtgacacatacgtacataagtcgtatgtagcataatttttatattatttttaaagaccattatttcttagtttgccctgtgaaataatctgacaccttaactggggattacaaattagcctactatcagttgggaacttatccccttatcagtgctagtgaaaaccggctacctaagcgatctccaaattatcattacccgttgtggcacgcccgacgaagcaaccttagagtggaacgtatatagagagagagagagcttctacaccttacaccatcactcatttgaagcttatcagtttatcagtggcctacgacgatttgaaatttcagtttcatttccatttcctacatcgcgtcaccgtcgtgtgttcaaaattaataaattcttttcgaatcgccggcatttacatcactattattttgtattttcattgcaaaaaccgtgaaaaacacagccgcttgcaagccaaccgcttaaatgtcacagcattcgaaaaaggaaaccaccagcagcagcggtagccatgcggcccagagcaatcgtcacaacaacatcggcggcggcggcggaaacggcaatagcaacagcatcagcggtagcagcaacaacaagagccacaagcggcaggcggccaatggcagtctaaagtcgccactcctgacaatcaccaacatcaactcccacagccaaaaaggcgctttgaaatcgcccgtcagcaaagtcaagcagagcagcaacagcagcagtagcaacagtaacagcaaaaccctcagcgggagcagcatgcaggagaccggctcatccgccacatccttgctggccgctggcggcaaggcgaagaagaaccaaaaagacaagcagcgcgagcgggaacgcttggaacgcggccagctggtcctctggcgtcgtcccctgcagaccaccaagtactgcggcctcgagctgttcaccttgctgcgcacgtggagcaccaggtaggatcgaaagtagccccattttgaaaccatttaaccaacgctttcctcgcagattgctgcaacagcgtctcctgttggccactctgatagtattaagcatcgtatttagcgtaatttacaagatagacggtccccatcagttggccatcgagtttgtgcgccggaacacctggttctttgtctactggttgggtctgggcgtgctctcctcggtgggcttgggcaccggactgcacacgtttctgctctatctggggccgcacatagccagtgtcacgctggccgcctacgagtgcaattccctgcgattcccacagccaccgtatcccgatgagtaagtacatgtaggttctcttcctcattgcttgataactaactgcctgttcttgcttactcctacagtattatctgtcccgaggagccgtacgacaaacatgtgccaaatatctggtccattatgtccaaggtgcgcctggaggccttcctctggggagcgggcacagcgctgggcgaactgccaccgtactttatggccaaggcggctaggctgtccggctacgatccggaggacgccgaggagctggccgagttcgaggccctcaacgcgaagcgtcaccaaaagaacctcagtatgatggacaggggcaagctattcatggagcgcgttgtggagcgcgtcggattctttggcatcctggcctgtgcaagcgtgagtggtgaaaatcgctgagcggcgggcttactagattataattgacagaaacgatttacacttttgatttcactcgtaaagtaacaaatgcacatctagatattatttttagtaagcttcaaatgcgctttgctttaaagtaattagtttttagtttagtttgttgatgcgacggtcttaataacatttggtttcattcccccacagattcccaatcccctattcgacctggcgggtatcacctgcggtcacttcctggtgccattctggactttctttggcgccaccctgatcggcaaggcggtgatcaagatgcacatccagaagatctttgtgatcatcgcattcaacgagacgctaatcgagcgagccgtcgatctgttggccacgctgccagtgcttggccacaagctgcaggagccgttcaagtccttcctgaaaaaccaaaagcagcgtctgcatcgccagcagcgaggagcggccggtgcgacaaccggagctggagattcggggaatttgctgtcgcgcatcttcgagacattcgtgatcggcatggtgtgctactttgtggtgtccatcgttaactccttggcccagagctaccacaagaggcttcacaaaaagccggcgagcccagtagctgcgaccacgcccactcgccagtcgacgggggcgagcaagaaggcgggcaagcagaaagctttacgggactagaaaatcagtggatcagtcttctgttgatctttttccccaacccttggttttcgtttaaattattttgtatattgcggctttcgctcttagtcaaatgatgtatcttatgtgagtgtgtcggcgagagaaaaggagacggcgtggaagcctgaggaatttaccatgtagactagactagggaaaaaaacagaaatgaataagtaacgcgagtagcagcatcctattttagaatgtacaacaaacaataccttagcaattttccgtgtgagttcgtttaactaaagtaacgaaagtgagggagacgcagctagtcgcgactaatgaaaagcaaattgtgcaaaagacaaaccagccagagtaagcagagagcgctaaaaaagtaaaagataaataaataattattataataattataaaaggaaatatgtagacagaagcaaaaaaaaaaaaaaaaaaaataaataaattaaaaaaaagattgaacaagtgctgaaatataaatgaatatggatataaaaattaaaacttgatgaatttaaatgctattggcgggaaaacataaaaaatttaaatcatatacactgatgataaatcaactatatatggatatataatccataaatcatccatagtcatccaaagtaatacttttttccagctacaaaaaaaacgtgctgagcaagcagctaaaaaatccaagataatatcaattaactttagtgggagtaaggcccaaaaagtgaagataatccacaataagagccgggaaaaggggctcgaagttcgtttaacaacgaaatccgtggaattggaataagaaaatccgttatcaacacttggcccacagctcgaaatcaagctggcactcattaagccaaatagctgctagcctatggctacggttctattgcttgccccatcctctcatcccttcgcactcctcactctcagtctccggctcgaaggacaattgccgctgctggcacggatgatgagttcg

SEQ ID NO: 24194 - DNA, 1654 bp, DROSOPHILA
ttttgtaaaaacaccgtgccaaactgtcagagaagcagccgcttgcaagccaaccgcttaaatgtcacagcattcgaaaaaggaaaccaccagcagcagcggtagccatgcggcccagagcaatcgtcacaacaacatcggcggcggcggcggaaacggcaatagcaacagcatcagcggtagcagcaacaacaagagccacaagcggcaggcggccaatggcagtctaaagtcgccactcctgacaatcaccaacatcaactcccacagccaaaaaggcgctttgaaatcgcccgtcagcaaagtcaagcagagcagcaacagcagcagtagcaacagtaacagcaaaaccctcagcgggagcagcatgcaggagaccggctcatccgccacatccttgctggccgctggcggcaaggcgaagaagaaccaaaaagacaagcagcgcgagcgggaacgcttggaacgcggccagctggtcctctggcgtcgtcccctgcagaccaccaagtactgcggcctcgagctgttcaccttgctgcgcacgtggagcaccagattgctgcaacagcgtctcctgttggccactctgatagtattaagcatcgtatttagcgtaatttacaagatagacggtccccatcagttggccatcgagtttgtgcgccggaacacctggttctttgtctactggttgggtctgggcgtgctctcctcggtgggcttgggcaccggactgcacacgtttctgctctatctggggccgcacatagccagtgtcacgctggccgcctacgagtgcaattccctgcgattcccacagccaccgtatcccgatgatattatctgtcccgaggagccgtacgacaaacatgtgccaaatatctggtccattatgtccaaggtgcgcctggaggccttcctctggggagcgggcacagcgctgggcgaactgccaccgtactttatggccaaggcggctaggctgtccggctacgatccggaggacgccgaggagctggccgagttcgaggccctcaacgcgaagcgtcaccaaaagaacctcagtatgatggacaggggcaagctattcatggagcgcgttgtggagcgcgtcggattctttggcatcctggcctgtgcaagcattcccaatcccctattcgacctggcgggtatcacctgcggtcacttcctggtgccattctggactttctttggcgccaccctgatcggcaaggcggtgatcaagatgcacatccagaagatctttgtgatcatcgcattcaacgagacgctaatcgagcgagccgtcgatctgttggccacgctgccagtgcttggccacaagctgcaggagccgttcaagtccttcctgaaaaaccaaaagcagcgtctgcatcgccagcagcgaggagcggccggtgcgacaaccggagctggagattcggggaatttgctgtcgcgcatcttcgagacattcgtgatcggcatggtgtgctactttgtggtgtccatcgttaactccttggcccagagctaccacaagaggcttcacaaaaagccggcgagcccagtagctgcgaccacgcccactcgccagtcgacgggggcgagcaagaaggcgggcaagcagaaagctttacgggactag

SEQ ID NO: 24195 - protein, 530 aa, DROSOPHILA
MSQHSKKETTSSSGSHAAQSNRHNNIGGGGGNGNSNSISGSSNNKSHKRQAANGSLKSPLLTITNINSHSQKGALKSPVSKVKQSSNSSSSNSNSKTLSGSSMQETGSSATSLLAAGGKAKKNQKDKQRERERLERGQLVLWRRPLQTTKYCGLELFTLLRTWSTRLLQQRLLLATLIVLSIVFSVIYKIDGPHQLAIEFVRRNTWFFVYWLGLGVLSSVGLGTGLHTFLLYLGPHIASVTLAAYECNSLRFPQPPYPDDIICPEEPYDKHVPNIWSIMSKVRLEAFLWGAGTALGELPPYFMAKAARLSGYDPEDAEELAEFEALNAKRHQKNLSMMDRGKLFMERVVERVGFFGILACASIPNPLFDLAGITCGHFLVPFWTFFGATLIGKAVIKMHIQKIFVIIAFNETLIERAVDLLATLPVLGHKLQEPFKSFLKNQKQRLHRQQRGAAGATTGAGDSGNLLSRIFETFVIGMVCYFVVSIVNSLAQSYHKRLHKKPASPVAATTPTRQSTGASKKAGKQKALRD

SEQ ID NO: 24196 - DNA, 4127 bp, DROSOPHILA
aaagaaacataatcttgtgtaataaatcaagtccatgaggctaacaaaagccccattcatttccactcttcgcaccctttagtcatatgttttaaacaaaaacgagttgattgactgcagaaatagatgaaatgtcaacactgccccccagcaaatgaccctggatgttataatttacgataactctcgggcgtgttagttcatatgaagctctttttgccagaaacctaaagccgaagcaactttttcggatggcaaggtgattgctcgcaccggtttttttttttttttttttttttttttttgtcttcgaagggggcctgccctcccagccggcttccgcctttgggggcacactcaattctatgctatgctccaacccaactgcgtagttcgcccaaccggtgccatgtagtatctgccgatgtatgtcatgctatatgatcgctcctcctatatgtatgttcgcagattcttggtctgctgaggcgcgagcaagccacacgcgctctccaactatttcgaccttgatgggactagcggcattatctatcaactcgcggttgttttgcttgttgtggcaatctgaatatattacatatagaaccggatcgcacgaatgttgtacataaatatgtacgtatgtacatacatatatgggaatggtgcagatacatgtgaatgaaggggctcgtctcatgcttgggatgtgtgtaacgtgcttttaattaaagctgtgaggaaaaccagtttttgatggtgctgtggattcgaaaaacatttccagatctaagcataatcgttgatagttttaatagaacataaccatatcactgaaggtcttagggtcatattaatcaagttgtcaagcgtgtgaagccattgaacatctaattatcttcagggcgcaactcacactattcacgttgctttgggaacctgagtgccggtaaacaaatcgaagcaagtctgtgccttaaatttctctgggcctttttattcaagagacttctctaaatcgatcaaaatttaagtgtgtaaatgcaatttatcagatctatcagatcagtgtgccagcgtcattcccctcatgtacgtataattagcggagattcaaaaggttcatgaaccgcggcttttctccggcggaagtgcttacacatgtaactgcagaggagtggggcggggaagtggctgccatcaagtggccaccttcggccgctggtggctcagttcactttgacggactgctccggacggacgtggtgcgataaaccctcggttccaacccgtatcttttgccgagtcccttatcgtgccaagttttcttatcggacattggggcaatcttatcgccagcaccagaaagtcgggtaaaaagtggtggaaagcacctagctcagtgtgactaaaattggtcggaattcaatgtgttttttcgcagctcttcgctgttatgctgcctcagtagggtaatgatttatcgattgattaccaagttgactaaaagattataagtgagagtgtttatgttattaagaccccatctaagaactattcgtggaaaagagcccgctggcacgtgtctaacctcaaatatcaaacgaattcaataagtgctactgacctaaactttcgaccaagaccggtgataaggagtgaccaaagagcactacaagaatgtactgggctctcaatatcgatctgtccagatcgatttctgactcatcgctccataccagaggccttggtattttcacttcccgtttgcaatttacgaccgatttgaaccgacaaaccgattagataaacccgtagcttggttgtgggctgtactttacagtgttaactctgcgctgacatacacacacgcacacacacatctgccaattaatcgccactaactcacccaagcaatagccacataaactactaaacgcaacgcctaacaacgagtgtaatcgcctaatcgcaagagcatccccatttcttctacgcacacagatcagtaacaggatcaagagcaaggtaaccgtccaacactacatgtcctaaaactaggaacggttctccagcccaaggacttatcgaggacactatccaatcccagtcaatcatgccgctcttcacaagaaaatcacccaagcaaggacccacctcggatgggggctcccagttcggcagtcgctcctccatgaactccgggtcctcccagggcagccacattagcaataacaacaacaacagcattccggagaaaacaaagcccccgctggtcttccactgccaactggcccacggcagtcccaccggtctaatccacgacttctccagcgttcgagagctgtaccagaagattgccgagtgctttgacatatccgagaaggacattctcttctgcaccctcaactcgcacaaggtggacatgacgcgtctgctgggcgggcagatcgggctggacgactttatattcgcccatcgcaaaggtcggcccaaggagatcgagattgtgaagtcgcaggatgccctcggactgacgatcaccgacaacggggccggctacgccttcataaagcggatcaaggaggactcgatcatcgatcgcatcgagcacatcagcgttggcgatcacatcgagaagctcaacggccagaatatggtgggcaagcggcactacgaggtggcgcgcatgctgaaggacattgccaccggggagaccttcaccctgcgcctggtggagccagtgcgaagcggcttccagggcatcggaccgcgcagccagtcaagggcgtcgggctcggccggaggaaagaactatggcagcggcaaggagacgctgcggttcaaggccaatggcaatgcccagatcgagccgcagttcgatgaggcgactgtggccggtatcgaggccattaataacctgctggagtccttcatgggcatcaacgacacggagctggcgtcccagatctgggacttgggcgaccaaaagtccaactcaatggacttcgccgaggccatcgacaactcggacctagagtcgttcggcttcacggatgacttcatcatcgagctgtggggtgccataacggatgcccggcgcaagtccacgaccagtcccaagtaattgggtaaccataccagacgcttttccaataaatgaggagtgctattatctactatttgagaacgttttgttttagagcctagttttatttaccacatatcatgctacaatcccatatacaaacatatgtcgtctgcctttgccaattgtttagttatttgtattcttcacggtaacctatttattatatatatattttttgcgttcagatgaacggggggatgtgccgaggcatccctactatgcatatatttttggtacaatttgtttgatgtacatacatacatacgtataactatacttctttagttttatcctttaaacgatacaaatatatttaaattatttaaatcggatgtgattttggttattttggttttttatttcgattgttattgctctctgttttggtaagtttgtttatttgctcgggcctttaggtattatttgactcataaataagaactattagtttttcgtaggcgttgttatcttttgttggcacacagatcgcatggcattcggaaaatattccacagtccccaaatgtgacgaattgtttggctgcttttctctttgcgatttttctgtttttctataatttgcttgtatagcgacggtcctagtatacatatttgggccatggatcatttgaaatgtcattagtatattctcaagcagacgacttcctgtacgaaagaacaatctagtcagtgtgaaaacatctgcagtgacgtagatcgcaccatcccacagtgacgctctattcgggttccagattggatcagatcatacatataacacggattcctttatttattacatgtgcaaagcttttgattgcgcataaacagctgctgtttggcgtgcgagcagctgataagcacagttattaaggcttgccaaacgagcgggagagagagattggattttgcacattacactgacaaaaatctatatatacagcggaggtcaactgtgcagttgcttttgaagaaat

SEQ ID NO: 24197 - DNA, 1215 bp, DROSOPHILA
tcaagagacttctctaaatcgatcaaaatttaagtgtgtaaatgcaatttatcagatctatcagatcagtgtgccagcgtcattcccctcatatcagtaacaggatcaagagcaaggtaaccgtccaacactacatgtcctaaaactaggaacggttctccagcccaaggacttatcgaggacactatccaatcccagtcaatcatgccgctcttcacaagaaaatcacccaagcaaggacccacctcggatgggggctcccagttcggcagtcgctcctccatgaactccgggtcctcccagggcagccacattagcaataacaacaacaacagcattccggagaaaacaaagcccccgctggtcttccactgccaactggcccacggcagtcccaccggtctaatccacgacttctccagcgttcgagagctgtaccagaagattgccgagtgctttgacatatccgagaaggacattctcttctgcaccctcaactcgcacaaggtggacatgacgcgtctgctgggcgggcagatcgggctggacgactttatattcgcccatcgcaaaggtcggcccaaggagatcgagattgtgaagtcgcaggatgccctcggactgacgatcaccgacaacggggccggctacgccttcataaagcggatcaaggaggactcgatcatcgatcgcatcgagcacatcagcgttggcgatcacatcgagaagctcaacggccagaatatggtgggcaagcggcactacgaggtggcgcgcatgctgaaggacattgccaccggggagaccttcaccctgcgcctggtggagccagtgcgaagcggcttccagggcatcggaccgcgcagccagtcaagggcgtcgggctcggccggaggaaagaactatggcagcggcaaggagacgctgcggttcaaggccaatggcaatgcccagatcgagccgcagttcgatgaggcgactgtggccggtatcgaggccattaataacctgctggagtccttcatgggcatcaacgacacggagctggcgtcccagatctgggacttgggcgaccaaaagtccaactcaatggacttcgccgaggccatcgacaactcggacctagagtcgttcggcttcacggatgacttcatcatcgagctgtggggtgccataacggatgcccggcgcaagtccacgaccagtcccaagtaa

SEQ ID NO: 24198 - protein, 336 aa, DROSOPHILA; identical to SEQ ID NO: 4959

SEQ ID NO: 24199 - DNA, 11303 bp, DROSOPHILA
ggaaaaccaggtttcagcttgccaccagtctcatatgtgtcagcggacagaaggacaaggatgtctgcgttggtgacggtgggtccatcttggtttgttcccctgacgcaatcttcgctagatatcaccaggtcgggatcgtggcctggggcgtcgattgcggcaggccaaacgtttcctcgaccttcaaaaatgtgtccatgttcaggaagtggattgatcgcaactttccaagcaactcggtggaaccgcttaggaactgtattcctatccacccaagaatttcgtcctataaaatgagatacatgttgctttaaatcaccaaacttagctaatgtaattacatatattgtatcaaatatatgtatttatgaaattaaattatcaaacggagtcgattttaaccacctgctgaacttcaggttaaattatttttaaattgaagcttaagtcttgggtataaatatttatcaactaaattgttattttttggtcgaggaatgtcataatattgggtgcaagagttttttctcttagactaccattctgctgattgaaagtataatatatatcattagtcaaatgcagtatgagatatttaccccaggaaataagcacatttgtttgatttgttcttgtgttcatttcatttcttcattttcattacagtgaccttattaagattttaattttttatccgtctacaattagtcttattgttgctggttttatattttcttaaccaaaatagtggaggctagtcaatgctatacaaacttgtcacgaaaacttaagttcctttaaatctggtaagtgcaccttaaccgccaaaatttcaaactcaccgaaaatgttaagccacaagtactcaataggcccgattgtcagcatcgatggcggcattcgatgtttccccaccgcgaacagagtggctggccacactggcgctcagctggcgctcagctggcgcagttgttgttattcttgcatttctacagcgcgaggtccgaattttcgagcgcagcgcggccacaattttccgggcgttagttaaccgagacgactagtttaattagcggaattgtgcgacgacgtcgtggttgaaattcaatttgaacgcccaggcggtagatcggtaaaatcgcgacatcaaagcacgagagtgagtgaaaagagaaccctggaaagtggtcaatgtgtgtgtatttggcgagcagtggcggagcactgaaaaaaccagttagctggcagtgaaagagattcaataacgtgttggtgggcaaaagaagaacaaattgtttcgagtgtgcgaggcgacgacgacgacatccaactggtccggtacgaagaagtccgctttcctcgctcattagcggcgctttcctcgggcccacgatctggaagtctggaaatcggcgatacctaaaaccgggccatagccaccactatcattatcaacaaattgatatacatatgcaattgcagcagcgcgtcatcagcacagcgcccatcgcctagcaggtgcgttccgtaccgtccgtcactttcgacattatattggtctgatcgggtttctctctctctctggtgcgtggtatcttctatgtatatactataactatgcatactatatatgctccgtaacaacacactgcattgtctttcgggaattgttaacaccccgccccggtggtggagcatctttggcatccattcagtcggttgcccattcatttgcctaacagactcttttctgcgccaaccgacgaacaagtaaagtgaaaggcggcggcacgcgttttcccatcttttgtattgaatttcgcttcggcagcgaggaaagcgaaatcgttcttagtcatcaggacgtgtggtgagaggaggagggtgggccaaatcaacatgcaaccgcctggcaacaggcaatgcgtcacaaaaaaacaaggaatttcaatttccaagctgggattactagttaactaaagcagactgtagtgcaggggaaggtggtgttaccggggtagaaattgaaggaaatcaaaggcgatcgataaaataataatatcgataaacaacatttgatgagacgaaagaaaagattcgtggttcaagttgttttactttcagccaggcatttttaaaaacttggatgcatttaaaaccggcaagacaggccaaaacgctgttgacccacggaccttatcgatttttgcagctgctgggcggctaatcattggttttgtggcgtgacaagtgtttcggcaccacacccactgtctgtatgtcagaggaaaaaagcgtaagcggaagtgatttcatagaccgaaactcaccccgaaaactgaaacgctgaaaggggcatttccgtgctttgtggccattgcctgccccaagtcgctagttcattttccgctattatgttgaggttaggactttccaaatccatgtgatttcccagggtgccggcttctgtgcgtcgtcgcaaaaatatgctgcacttcgggggtgcaaacagcatgcttttcgttttcgttgaagtttcacggccgaattgatttttccagcctagacattacaaaatgcctcgccgaagtggcgataataaagcgccttttcagttttgcagccagcacgcacatcggggcatttattaccgcttttccgttttccctcttacaaaactgtgaagttaatgcggccagcacgtgggtctacgcactgagttttccgttcctcagttttcatctggccaagcacttctcagctggccgccgaaaagaaaggggcaacgaaagacgcaaccatgaccaaagaaactcaaaactccaaacttgagcaatttgtaggcaaattaaggtgttaactaaccgtgaagttggtcagtgggaaacccatcgaagatgctctagcttaaagctcatacagagcaataaacaagtgtttctttgaagatcttcgatctgctcttataatcttagataagaaactagcaaagttgaacttaactgaggcagataagtatctctaggtttaacgagttatgatttctggcatatttctcgctgtgtattttcggcagacgagcagctcggaaattgtttgatcgattcgattccttcgtccgcttccgctccgccgctatcggctgttgccttttacccgcccattcgccacttgctaacagttgttttcgtacgtgagcagcgctcggataggcagatactccccgtcagatacacaagatagcttcctcttctgcctggatgcgatgcactgtgtccgctccgcgctctccgttctccagctcaccaagcggaagcaactccatttatgtaaattgcttgcgtgacatttcaatgcgacggggcgctttatgaaaagctggagcggcatggtccgagcgggatgagcggtggctgggaataatgggttgaagaatcgtgggtctggtctggtctggtagctagggctgccacgggctgctccgtcatgccaacagttggcaatcagtttaactgtgctttttatggccgtactttgcgctttttatgcgcactcattgccgcacatgtgcaatattactgcactaacgtttttgcaatcagtatcagatgtactcggaactggtgtgaatgaatctgcatgttttccatctgcgtgatgtttctactccgctttaattatccacagttcctcagtcgtttcatatcattaatacatgattgggcacagcgatcaatctttttgcacactaaatacttgtctttgcctacaatcagaagtaatagaaagatcggattttattgtttatcagatacaaaaactggcgcttatgtacatatatctacaattattgtttttttttgccacttccagttttaattatcccgaatttccgctccgatttcatcacccgtaatttgtgaactgatgaaaacaatacagccttcggattaacatattttggagaaacgttacaaagagataaaattcatatttgagtttagattgtcgggcggcgtaaacttggcccaaaacaaacattgccacggcttttcggctataattcgtttgcttaatttgctttttcgagctcgcagttcagcgaggtgaaacggttaaatgttttcaaaactgccccaatgttttcccttcgccatacgtagatacttagatacatatgtatatacatacttgacgttgcgtgtggtgctcattgttgtttggctgtgcattatgctaactagaccctaatgtcggtgcccgggtgttttgagtgctccacattagtagtttttgtggaatatgccccataaagggccattcgatatgtttcagccagggctgcgagttcattgcactggatcatcgaatcgtggagcaacgactctggttcgggaccatgccaaatgcaaaatgtcagcaatttatgaataatgtagtgagaaacacaggaatcgcagaaaacgtgatcggaaaatgccacaaaaacagtgcataaataataccaacatataattgggcagggcgaagcgacatttaagctttcgcttcgcccacagtccatctgaattatctgtggaaatagcaaattggatacttgtttatattagcagtgggtcgggtcttcgttcgccaactacaatcttcggtttgtttgtaatttagactaaccgctcgatgtcactgtttatttatgcattagcatcacgacacagggagatatttttatatattgtctttctaaggtttcaagctcgaataagcgattattacctacaacactgattaaaatgtcataaatataaaggcaaaacttaagtgatttatattagtatacataatatatgaatgtcaaaactgatggctgttccactggaaatcaatagaaatggggaaagtaaatctctcttcgaatacgccagatattattacatattcattttataattatattataaattttgcatttttcttaaccaaacggacaacaataaagtttaaactggattaataaaacgaacagctttaaactgaaatttcagtttgaatatgtttaacctatgctgagtatttttccagtgcagcgttttcttcgatttcattagatatggcaagctcaattttctgcttgtctcagtgcctttgcccacaaaatgttgacttttcgaattaagtttcaccgttagcaaagatcatgcggtctttcgctggattctcgcctttcggcagcgctgccggcgattttcgcattgagtcgaaaaaattgacctagtcaacgaaatggagatctccccaactgataactagtttgaagagcttttgcaagctttacaaaagcttttgcgctctctttgcaaagagaaaatgctcttaaaaatcaaaactattttctcttgcgctctctgcacctctagttttggcattggaatacactacttttggttttgtggatactacaaacaaacattgaaaataactataaccaacctttgggttcccaaggtttacgaacaatcaaaacctatactttggggatgactgttgagcacagatgtacgaagtggaatggcgatgggtacttaaatcaaggttcacctctagttgagggctcacctttcccctcatttccccctttagtaaaaataatattaagcagataattacgttgtttacaaacctacgaaaacaaaaaacaactcgggtgtttgacagtgcgctctaatgaataaaaacaagtgcagcgtcgattgcagcagaaaacagctcaattgataataacaactttatcgtgcattacgcaaatgaaaaatgtaataccattctctgatactttatgcctactttgtaatttttgatacaccctttaagcaaatacatacaatacagaaaacctgttaattgttggttgtgcaaaatgtatttttaaacatctccgtaaattattggcggcgaagttttgatgatttagacttcattattcacaaatttttcattggaaattccctaattgacttcacataaactacagtgtactttaattcaaaacagttgtttcaatacacaaattataaaatgatgattaggtatttttgagggaccaaaagtattattaacttcactaacaaagttgaaaggattttttcttaaggcgacactatatgcaaagtgatattgatcgaagtgagtgtagatgcttgaggaaagaaattcactaacaattttcgataaatagatataaagcttgttataaaccatcaaataattattttggctgccttcagattagggttatattatgaatatcgagttaagaaagacatagtgagggtatcagaaacttggcgacccgaaatgaagtggctatccgatgtcccatgcgcgtgtcgatcgtgcaatggtgtgcgtagatatttggtcacatacatatgtgtggctttactttgctgtaacaaaaacaagttaataaaacggcttttaaaaacagagttcaatcatgtgcttctgaaactaactaaaactcgcagtcgtagatactcttacaatccccacacttgtgtatatcgcccccatccaatccgttggggcaatcaaactcacataatgttgtttacacatttgttatttttaagtgtgcttttctgcaattcgaccagaggcatgtgcacttgttgttgcggcctgttgttgtttacagcaaactaaagctcctttacatatccaacccaccgttttccacattctcagcgtcgagccctccgacggcgaccaatggcagccgagtaaacaagctgcgggcaaaacaaaacatacataagcagccggcaacgcggaagcgaatttgtttacgtcttatccaaacggcaattaaatatcgagccatatctgtatctacgactatttactggttttatcggcaaacgctcaaactatgcaggcatacgcagcaggaatggcttagtccttagacttgtcaataaagtaaaaccttttttttaagatacaaataacaatagaagcatacagtatttgtatctgtatatgtatagtcagaagcatctgctgcacacgtgccaaaaagattcaaaaatgttacttcttgtgctggttttaagcgtttatacctacgccattttaccttccacttgatacattatcaatttcgttactatgtaaaaagaaacataatcttgtgtaataaatcaagtccatgaggctaacaaaagccccattcatttccactcttcgcaccctttagtcatatgttttaaacaaaaacgagttgattgactgcagaaatagatgaaatgtcaacactgccccccagcaaatgaccctggatgttataatttacgataactctcgggcgtgttagttcatatgaagctctttttgccagaaacctaaagccgaagcaactttttcggatggcaaggtgattgctcgcaccggtttttttttttttttttttttttttttttgtcttcgaagggggcctgccctcccagccggcttccgcctttgggggcacactcaattctatgctatgctccaacccaactgcgtagttcgcccaaccggtgccatgtagtatctgccgatgtatgtcatgctatatgatcgctcctcctatatgtatgttcgcagattcttggtctgctgaggcgcgagcaagccacacgcgctctccaactatttcgaccttgatgggactagcggcattatctatcaactcgcggttgttttgcttgttgtggcaatctgaatatattacatatagaaccggatcgcacgaatgttgtacataaatatgtacgtatgtacatacatatatgggaatggtgcagatacatgtgaatgaaggggctcgtctcatgcttgggatgtgtgtaacgtgcttttaattaaagctgtgaggaaaaccagtttttgatggtgctgtggattcgaaaaacatttccagatctaagcataatcgttgatagttttaatagaacataaccatatcactgaaggtcttagggtcatattaatcaagttgtcaagcgtgtgaagccattgaacatctaattatcttcagggcgcaactcacactattcacgttgctttgggaacctgagtgccggtaaacaaatcgaagcaagtctgtgccttaaatttctctgggcctttttattcaagagacttctctaaatcgatcaaaatttaagtgtgtaaatgcaatttatcagatctatcagatcagtgtgccagcgtcattcccctcatgtacgtataattagcggagattcaaaaggttcatgaaccgcggcttttctccggcggaagtgcttacacatgtaactgcagaggagtggggcggggaagtggctgccatcaagtggccaccttcggccgctggtggctcagttcactttgacggactgctccggacggacgtggtgcgataaaccctcggttccaacccgtatcttttgccgagtcccttatcgtgccaagttttcttatcggacattggggcaatcttatcgccagcaccagaaagtcgggtaaaaagtggtggaaagcacctagctcagtgtgactaaaattggtcggaattcaatgtgttttttcgcagctcttcgctgttatgctgcctcagtagggtaatgatttatcgattgattaccaagttgactaaaagattataagtgagagtgtttatgttattaagaccccatctaagaactattcgtggaaaagagcccgctggcacgtgtctaacctcaaatatcaaacgaattcaataagtgctactgacctaaactttcgaccaagaccggtgataaggagtgaccaaagagcactacaagaatgtactgggctctcaatatcgatctgtccagatcgatttctgactcatcgctccataccagaggccttggtattttcacttcccgtttgcaatttacgaccgatttgaaccgacaaaccgattagataaacccgtagcttggttgtgggctgtactttacagtgttaactctgcgctgacatacacacacgcacacacacatctgccaattaatcgccactaactcacccaagcaatagccacataaactactaaacgcaacgcctaacaacgagtgtaatcgcctaatcgcaagagcatccccatttcttctacgcacacagatcagtaacaggatcaagagcaaggtaaccgtccaacactacatgtcctaaaactaggaacggttctccagcccaaggacttatcgaggacactatccaatcccagtcaatcatgccgctcttcacaagaaaatcacccaagcaaggacccacctcggatgggggctcccagttcggcagtcgctcctccatgaactccgggtcctcccagggcagccacattagcaataacaacaacaacagcattccggagaaaacaaagcccccgctggtcttccactgccaactggcccacggcagtcccaccggtctaatccacgacttctccagcgttcgagagctgtaccagaagattgccgagtgctttgacatatccgagaaggacattctcttctgcaccctcaactcgcacaaggtggacatgacgcgtctgctgggcgggcagatcgggctggacgactttatattcgcccatcgcaaaggtcggcccaaggagatcgagattgtgaagtcgcaggatgccctcggactgacgatcaccgacaacggggccggctacgccttcataaagcggatcaaggaggactcgatcatcgatcgcatcgagcacatcagcgttggcgatcacatcgagaagctcaacggccagaatatggtgggcaagcggcactacgaggtggcgcgcatgctgaaggacattgccaccggggagaccttcaccctgcgcctggtggagccagtgcgaagcggcttccagggcatcggaccgcgcagccagtcaagggcgtcgggctcggccggaggaaagaactatggcagcggcaaggagacgctgcggttcaaggccaatggcaatgcccagatcgagccgcagttcgatgaggcgactgtggccggtatcgaggccattaataacctgctggagtccttcatgggcatcaacgacacggagctggcgtcccagatctgggacttgggcgaccaaaagtccaactcaatggacttcgccgaggccatcgacaactcggacctagagtcgttcggcttcacggatgacttcatcatcgagctgtggggtgccataacggatgcccggcgcaagtccacgaccagtcccaagtaattgggtaaccataccagacgcttttccaataaatgaggagtgctattatctactatttgagaacgttttgttttagagcctagttttatttaccacatatcatgctacaatcccatatacaaacatatgtcgtctgcctttgccaattgtttagttatttgtattcttcacggtaacctatttattatatatatattttttgcgttcagatgaacggggggatgtgccgaggcatccctactatgcatatatttttggtacaatttgtttgatgtacatacatacatacgtataactatacttctttagttttatcctttaaacgatacaaatatatttaaattatttaaatcggatgtgattttggttattttggttttttatttcgattgttattgctctctgttttggtaagtttgtttatttgctcgggcctttaggtattatttgactcataaataagaactattagtttttcgtaggcgttgttatcttttgttggcacacagatcgcatggcattcggaaaatattccacagtccccaaatgtgacgaattgtttggctgcttttctctttgcgatttttctgtttttctataatttgcttgtatagcgacggtcctagtatacatatttgggccatggatcatttgaaatgtcattagtatattctcaagcagacgacttcctgtacgaaagaacaatctagtcagtgtgaaaacatctgcagtgacgtagatcgcaccatcccacagtgacgctctattcgggttccagattggatcagatcatacatataacacggattcctttatttattacatgtgcaaagcttttgattgcgcataaacagctgctgtttggcgtgcgagcagctgataagcacagttattaaggcttgccaaacgagcgggagagagagattggattttgcacattacactgacaaaaatctatatatacagcggaggtcaactgtgcagttgcttttgaagaaat

SEQ ID NO: 24200 - DNA, 1644 bp, DROSOPHILA
cgaggtccgaattttcgagcgcagcgcggccacaattttccgggcgttagttaaccgagacgactagtttaattagcggaattgtgcgacgacgtcgtggttgaaattcaatttgaacgcccaggcggtagatcggtaaaatcgcgacatcaaagcacgagagtgagtgaaaagagaaccctggaaagtggtcaatgtgtgtgtatttggcgagcagtggcggagcactgaaaaaaccagttagctggcagtgaaagagattcaataacgtgttggtgggcaaaagaagaacaaattgtttcgagtgtgcgaggcgacgacgacgacatccaactggtccggtacgaagaagtccgctttcctcgctcattagcggcgctttcctcgggcccacgatctggaagtctggaaatcggcgatacctaaaaccgggccatagccaccactatcattatcaacaaattgatatacatatgcaattgcagcagcgcgtcatcagcacagcgcccatcgcctagcagatcagtaacaggatcaagagcaaggtaaccgtccaacactacatgtcctaaaactaggaacggttctccagcccaaggacttatcgaggacactatccaatcccagtcaatcatgccgctcttcacaagaaaatcacccaagcaaggacccacctcggatgggggctcccagttcggcagtcgctcctccatgaactccgggtcctcccagggcagccacattagcaataacaacaacaacagcattccggagaaaacaaagcccccgctggtcttccactgccaactggcccacggcagtcccaccggtctaatccacgacttctccagcgttcgagagctgtaccagaagattgccgagtgctttgacatatccgagaaggacattctcttctgcaccctcaactcgcacaaggtggacatgacgcgtctgctgggcgggcagatcgggctggacgactttatattcgcccatcgcaaaggtcggcccaaggagatcgagattgtgaagtcgcaggatgccctcggactgacgatcaccgacaacggggccggctacgccttcataaagcggatcaaggaggactcgatcatcgatcgcatcgagcacatcagcgttggcgatcacatcgagaagctcaacggccagaatatggtgggcaagcggcactacgaggtggcgcgcatgctgaaggacattgccaccggggagaccttcaccctgcgcctggtggagccagtgcgaagcggcttccagggcatcggaccgcgcagccagtcaagggcgtcgggctcggccggaggaaagaactatggcagcggcaaggagacgctgcggttcaaggccaatggcaatgcccagatcgagccgcagttcgatgaggcgactgtggccggtatcgaggccattaataacctgctggagtccttcatgggcatcaacgacacggagctggcgtcccagatctgggacttgggcgaccaaaagtccaactcaatggacttcgccgaggccatcgacaactcggacctagagtcgttcggcttcacggatgacttcatcatcgagctgtggggtgccataacggatgcccggcgcaagtccacgaccagtcccaagtaa

SEQ ID NO: 24201 - protein, 336 aa, DROSOPHILA; identical to SEQ ID NO: 4959

SEQ ID NO: 24202 - DNA, 14119 bp, DROSOPHILA
ttcgacccctcggttttgcatggccaaacaaacagtagactatacgagtatgtttatattgcatatctcttgagttcttttgagtttcgctgacggctgcgctcttcactagcccattttgtttgttttttaataatattcataataataacagtgactcacgacgcactgtagataacgctgctcgatcccgaaaaacgggtcgaattttggctatcgcttgctggaaagcctttctattggaagtctatgtatagcacacgattcatagtcctttggcagcctggccaaagttttccatttccaattggcgctgaatcatcaaaacaaatcgcgtgttgccaggccaacgaaaaaccgcaatgcccgaaacgcctttagttttagctaagagttaatgtatgcatcatatcctatcatattaatgtttacactagtgttgcataagttgatttgtagtgtctctgttcgttcatatcatatttatcatatatatttggttattctttagttatcttatatgctacttgctagatctggtaaagtgaaaaatgaaaataattcctgaaactcaactatgaaataatttataaatataatcttattgcaaatacatatactgatttgtatagtttattttattgtaaagtaaaccagtctgatttattaatacacaatttatcactgtaacagactgaggtttgcattcacgaatatcatttatcactttaccagaggcggaaaatagctctcttatttattataatagccatatactacatacatgcatagtgtacgtcttgcatttgcttatgctcgtttttagttttgttcgatttttgatttttatctcttccccgtttgaaaacgttacttgttcgcccatcatcgacatcatcaatcaaacaccacccaacaaccgacccaccaacaacaacacccaaactgaaaccgaaaccgaacccgaatccaaactcgaaacccaaaccttcatgtgcgtagcatgggagggcggactcttatcgagtcgccacggttatagccaccgatgacgacaatcgcacagccgatggccagtacaaggtaaatcgaattttcctcactcacatcacacaccgccatatacactcgtatctatcatccactctatttatgtttttcatttctaataccgacccctttcgattttaagcgctttactaacccacttctttcccatcgatttcccttttcccggtctataattgcacatattatttattatatttgctagacttgggcatgcttccaatgacattttccgagtgcagttgacatttagaaagcactggcgaaatgtttacagcggctataaatagccataattcgctatgtataacgatggccaataataatgtcataaatatggccatttttgaatatctcggagtttattttcgaatctccattcattaaagaatatattattgttcaaggaaatatggccttgtactaataccaagcagttttttgtcttttgctcgattttaaaagttttccaaatgaacaggagttcaactagttgttgtttttttccatttgtttttccttgattgcatggcaaccccaacaatgacgtcagagagcaaaaaatcactgcccgtgcgtcttgaaaaaaagagaacacttatagacactgttaaagatagaatgccagacactagacagctgctaagactatatatataatataacttttgaatccacatatattttatttagaattctctttcttttccttcttattttttttatttggccaattcaaaggctttcgaggtcagcgaatgcatagtaaatctatatatttttggttgcactgtaggaaaagttacttttcattcatttttttcgtatttaatttttttttagttcctttgttttgtatacgtagcatatgtgtaggaacaaatgtttgtataattgcttgatgttttgttttgtgcacctcaattcatttacgtgctcttctcatttcgatcgggagcgtcatttagcgcgcattttgcatgccttagattgcgattactagagctttacgtatcacagcggtcgttttgaatattctcacgctcgaactcatttcggaatgggttcgcccaagtctataaccacatccccgtgcacaggttcggaaaatcacttgacaagtagtaaatttaagtcgggtaagtagttaacaacgggtaccggtacttaacttatctctaactgacccctaactcttaatggtaaacggaacagttgtacaattttgagggtttcttcagtgcaaacctatcgtaaactcttctctatccacttcctctgtaaccaatcccaaaacacactggtaatattgaatcctgtacgccttttttgaaaggcctaaccaaggcatgaagtaaatcgaattttgtgtcggctaatgggtctcgctgcagtgcatcattaacttccgccactaacgatattatccctctcaactcaacagtcaagacgcaagatgccggccaaagttaataaaaaggagaatttagatgatctcaaacaggagttggatatcgattttcataaaatctctcctgaggaattgtatcagcgctttcagacacatcccgaaaatgtaagtgcagcatttgagtaaatggtatcccattcgacatgtgaacttatacgtttttgatcttccgcagggtctaagtcacgccaaggccaaggaaaacttggagcgcgatggtcccaatgcgctgacgccacccaagcagacgcccgaatgggtgaagttctgtaagaacctgttcggtggcttcgccatgttgctgtggatcggtgctattctctgctttgtggcctattctatccaggccagcaccagcgaggagccggccgacgataatttgtatctgggtattgtactttccgctgtcgtcatcgtgacgggcattttctcatactatcaggtatgtgtccctcaaatctgagcagctaaagatcggcttactaactgtggtgtgtgttccgcaggaatcgaaaagttctaagatcatggaatcgttcaagaacatggtaccccagttcgccaccgtcatccgcgagggcgagaaactcacgctgcgcgctgaggatctcgttctgggcgatgtcgttgaggtgaagttcggcgaccgtatccccgctgatatccgcatcatcgaggcgcgcaacttcaaggtggacaactcctcgctgaccggcgagtcggagccgcagtcccgcggtgccgagttcacccatgagaatccgctggagaccaagaatctggccttcttctccaccaacgccgtcgagggcactgccaagggtgtggtcatcagctgtggcgatcacaccgtcatgggccgcattgctggccttgcctccggtctagacaccggcgagacgcccattgccaaggagatccaccatttcatccaccttattaccggcgtggccgtgttcctgggcgtcaccttcttcgtgattgccttcatcctgggctaccactggctggacgctgtcatctttttgatcggtatcatcgtcgccaacgtgcccgagggtctgctggccaccgtaactgtgtgcctgacccttaccgccaagcgtatggcctcaaagaactgtctggtgaagaatctggaggccgtggagacccttggctccacatcgaccatctgctccgataagaccggcaccctcacccagaaccgaatgacggtcgcccacatgtggttcgataatcagatcatcgaggccgacacaactgaggatcagtcgggtgttcaatacgatagaaccagccctggattcaaggcgctctctcgcattgccactctctgtaaccgtgccgagttcaagggaggccaagatggcgtcccaatcctcaagaaagaagtcagtggagatgcctccgaggctgctctgctcaagtgcatggaactggctctgggcgatgtgatgaacattcgcaagcgtaataagaagattgccgaggtgcccttcaactccaccaacaaataccaagtgtccatccacgaaaccgaggataccaacgatccccgctacttgctcgtaatgaagggagcccccgaacgtatcttggagcgctgctctaccatttttatcaacggcaaggagaaggttctggacgaggagatgaaggaggcgttcaacaatgcctacatggaactcggtggactgggtgagcgcgtgctcggtttctgtgactttatgctgccatccgacaagtatcccaacggctttaagttcaacaccgacgacatcaacttccccatcgataatctgcgtttcgtcggccttatgtccatgattgatcccccacgtgctgccgtgcccgatgccgttgccaagtgccgatcggccggcatcaaggtcatcatggtcaccggcgatcacccgatcactgccaaggccatcgccaagtctgtcggtattatatccgagggcaacgagaccgtcgaggacattgcccagcgcctcaacatacccgtctctgaagtgaatccccgcgaggccaaggccgccgtcgtccatggcgctgagcttcgtgatgtgtccagcgaccagctggatgaaatcctccgctaccacaccgagatcgtcttcgcccgtacctcgccccagcagaaattgatcattgtcgagggttgccagcgcatgggagctattgtggccgtgactggtgatggtgtcaacgattctcccgctctgaagaaagccgatatcggtgttgccatgggtatagccggttccgatgtgtccaagcaggtaagaaatcagattattatgataaaagtgggaccggacaaaaaatatcaccaaaattggccttccattaggcagtaattataattttaaagcagcataaaattaatttgaaaatgagtgtgatatttttttcttgtccacgcattaaccattccatattaacatttaaaaggattttgttgaatacgcgtttaatgtttttagtatgggaaaatacggtataattttcctttctgcatgaactcatgttttcggtttatgacactcctatagtaagtgagagatggttcaatgtggatttgatgttgtttttgcctaccaaaatgcctaaataaattatctaaatgatcctgtgtaggctgctgacatgattttgctggacgacaactttgcctccattgtgactggtgtggaggagggtcgcctgatcttcgacaacctgaaaaagtccatcgcctacaccctgacctccaacattcccgaaatctcgcccttcctggccttcatcctctgcgatataccactgccactgggaaccgtgacgattctttgcatcgatctgggcactgacatggtaagtttagacctctgccccaaacccaagctccatcgaagattaaagttaaagttgctattaagtcagtatcattcgagcaagttatatagttatacaagttgtagcccatcccagttaatagttaagaactagcctttttaacaccaactctgaacgtaaattgtgcggctgactgcactgccgatcagattcctgccatatcactggcctacgagggacccgaggctgacatcatgaagcgccggccgcgcaatccggagatcgataacctagtcaacgagaggtaaacgcgctagcctccgctccgatttagatccagcagctccagctagaaaacaacgcagtgctaggccatcgagtagtttaagtgctcttaatcacgtcacccaactctagctaaccccacagatctaggccaaaatcgaactgaattgaatttatggattgtaaaccgttgctaatgtaactacctgccgtaatccaatacctaggtgccagccatttcattggcctacgagcatgccgaagccgatattatgaagcgtccaccacgtgaccccttcaacgataaattagtgaactcaaggtgccaatcaagtcaatttataccccacactaaaacacacccacacacacacaccacacacacccactcgccaactcactaacctcaacctttaaaaggataaatccagactgaagtaaagaaaagcgcaaatcaagagaaaaaccatataactatagcatatgtcttatgtgtatgtggctggattgtattagaataagttggcctaaacgaaggcagcgtaaacatctaacaaagccgttgactcgtttatggcttactaactacccaactaactcttaagaatgttatcactcgaacatgcccaccacaccagctttcctctcagttaactcatctctgtagcatatgtccattcggtggcagatccctcgtcatgcatataccatctatacatttatacatagcatctgttctgtacatttcaagtacaataagtccatttcccatttttattgagtttccacccagagagttttatataaaaatcatacatacgctcatataaccgctcccacatgtacaattcaatcattccgactttgaatatcttgcccaaacgaatatcgacttcatctgccatactctaatgctctaaatgttaatatgtgtgcgtcgtatattgttaatctctcacaaataaataattcagatacatatcgctcacgattttcgttttgtggtgtaactaacactgagttaaccgtaagattcacccctcgacgttatatgaattggacaaattgattggcatttgtaatggattttaagtttgtacaatttggtaaaatttcaatatgaaaattagcatttgcacacgattttttatgaactaacccaaccgaaaataatggtttttatttcataatttgactcgagaacttacattagcttatgtttaactctgtttgtcactccacacatcaagcattttgcccaataagtctctgcagcttaagtttgatttaagaggggggtttaagttatgcaatctagtctgtaagatattacatatatacccttatgaaccagcgtcgcccccccagctcagcggatttctcagggttttgcagagttcaaggagaggagtttatgtttccataatttatcgtatttaatttcatttattttttccacttcaaccaactaccaaccgataacccaccaccacaaacgtttgcacgtttaggtgccagccatttccttagcttatgagacggctgaatccgatattatgaaacgccagccgaggaaccccttccaagataaactggtcaacgaaaggtaaagtttcgctccgtgctgatctcgaatcaattacaacatttaccagaacaaccaacaaacaaatttcaatcaatcaaccaaccaaccaaccagataacagcaagaaccgaatttctattctgtaacgtaaatgacacatatccgaactcaagtcaagattttgcatcttctgctactctatgaaccaccaaataattcctttttgtcacgcaatgaaaagtaaattgaataccattgaactgaacttgtactttggccggccaaagtccttaaagcaagctaaaatcagagtacgctttctttctatcctacaagtcgaagataatgaaatcattttactctacttttaacctatattatccgctatatctctgtctttctatatactaactaaaatatttttaaatagcttaagtacttcttggttgaatgttgattatttggattaattccacagatgttttccatgttttatgttaaatgtttcatttggtagcttttctttgaatttctgttcactgctctcttatttagttgaatattctcaagatttttctagtctctgatatttaagtttagatagtataaagtaaatttcaaatcgattagtaattttgattttacatacataactataacactgtgagtgaatcaaggtgtgttcttagtgaattcgttaagttttttcttataagctattcctgaacacactttaattcggacttgaaggtccaaaggataccattttggataatttttagaaagatctttaaaaaatacttaaagtatattttccttttgtatttcttcatatgtacggcatttcgtaagatttttaatttgtttttgcaataatgcaatatatccaattattgtacgctgataaatgtaattgtaattataactacatatacatacatagctactattgattatataacccaaaagaaaattttcatcctattaagttttaactaaagaagacaaaaggaagaacgactttttcggataccattttctcaaatatttttgcacttaaaatatttagaaactttatattggattaggagtacatgtaaatcttttccttatagccatgaagtcagttagtttgcctttcacttttctgcttaactttggtaaactttcgctctctctctctctctctctatcactttctctctatatctacaacgattcttaaggtgttatgaaattcaattttggggcttaagcatttttcccaagatacctgaatttatgttttccagtttcggaaacattcgtacttcttttgtttgtactccttaataacttggtttaatttttttagatttatgttctactgtagaagctctacagatatttgttttggtttttcgtataaagatccttttatttgtggtgcgaaggtaagtggtgatcaacttgatacctgaagactgaggctctagctcacttctgggctatgttttcgtagaataaacaataatttgttaccatgtcaatacagatcttttacttagttcttagccctatgctagagcaggcctattgttaatttagtgagtctgtataatctatgacatatgtacgtttctactgatgctacactcatgatacggtagacgaatcttttgtctcgacatcaattcattcacgaatctccacttactaaggtcaattcgaatcattcagcacattctatcaatcaatgccctgtatttttctctaccaactctcagtcagtcattcattgaaacgtctcgttttgagttgtagttgaacgacactcacacaaatctcccccgaactcaatctgaaatccagactgaaattgtcctctagtaataataatacatatataatgatttagcgcaatttaagctctaatccattcttgtacaccctatatctgtgcatttactattacctactacttactatatatcgattttactattactgggtgctctatgctctttttgccctagattagttttagcttcgtaagtacgtgggagctaacaaaaaaaaaaaaaatgaaaaacaccttaacatgcaacaaaaaataccccatgatggtactacttgacacagactcccggcctcccctcagatctctatctatctcttacgatctactagcgattattaattagcgtataaagaacaagtatttattactcgcaagcatatttatataaaacttttaaacaaatattttatatatatttgtaaactttaaccagattttcctttgtatttccctacattctttcgactcttgttatgtctttcttttgattatcaaacaaccaactaacaattgcaacttgcacaaataccgataaccgaacaatcaataaccattaattgccatataccgcaagattccggccatttcactcgcttacgagcaagccgagagcgatattatgaagcgtcagccgagagatccgtatcgcgacaacttggtgaaccgcaggtcaggaaaactaaacgctaaggtcttataaaaaaaaaaaaaaccaaaaaccaaactccaatatccaagtgttaaccgtcttttagttgattagttatggaatagaaaatgaacaaacatgcaaccatcattatttacgttaccaactttgaactttgtttgatgttctgtggtcgcgtttcttgcatcataatttgaccgaacaagtagatcaaccgatcatcaatcagactaaaatgcaatcaatcgaatgataaattccaaatttcacccagaaacttttgcgactgtttgttcgtttgctgatgcgttcatgcgtttttccttgtttcaattttaattccacacttatgaacgtacaaaaatacatttattccacagttttgtgttttacatagttttcttttgttccaatttctatgtaacctacttataagttgctttctgaaactctcaatgtggaatgaaaatatcttttaaatattctaaaatcaaaaaatttctaaaatgtaccaatctctaaagatttcgttttgattttaaacctactttacttgatttcttatggaataactccttttatgtatccctcacttaaatccctaaatctaagtgttacatttgtggtgtgttactcgcacaacaaacttcaatccttacacacacttattgtgtatgttcaaactattgaggaacaacattcgtattgaatctaaaagtgtgttttgcaaactgtagtgccactatgaaaaaagcccaacagctgcttctaaaaaatttggcgaagttagttcaaagaaaaacgctcgctcgctcaaacgctcacctgcataaacaataaacaaaaacaaagtacacgacccatacaacaaacaatcgaatataaggtggatctatttccacaagcccttagacaagcaaaagactgaacccaacaatcataaaaacacaaaacccacaaaaaacgaagcttctgccgttactcttagatcagttagtacgttacttgtagatgagtttgttcgagccaactacaaaacgaaaatcgcttcagttgtgttctagatacaccatatgattgttatataccaaatatatacatacctagactcgttccgaaatctggttccaagtttccaagtcgtggtaagtctgaatgtgagggagggtgtcctgataaacataggtaatacttgagaatctcacaacaatggcaacggataatgatttgttatgagttccttgtgtgtaatacttttacgtatttattactcttaagtttgtgttaacgtgtaagtttatgattgagttattgttttatgttttatgtgatttcgatcgaaacttccttgaacgtaagtaaacgaaaggatgtagagctgcactcgcctgtcgtagtaatagtggcacgcttaaatgtcctgcatgttccgatatgtatgtcctgtatttagaccgcatgttcaactagcactaacaataactttgcttttcacatccacatccaatgcgaaatgtatgaaagccaaacaatacaatgaaattcaaacaattctgcgccatcacgctttctatcgagtgtagactgtacgatttgctttaacgcgctcttgaaattaaaacgagatttgcccagacactttccacgctacatagagtaatgtcttaataccactaaatctaaacgataaacatccatttgcttaaacaatccataaaagagcttcaaggtaaagtggcactaacaccaatctaattgactaaccccgagtacgatttgctactcggatcgaggactgaacggacatttgcggtccttgggcagggtttttgtttgatttcctccttaagtgttttgtgtttgctttgagtgttattcttccgttctatttttctgtgtgccaacgtttatggctttatttcaagcattcgttgatcatttcttgagtaccccgaacgacctatcttacgataaacaaaaatcctagccaagccgcgcatgttcctgttttcttcagtccgatgcccgaaactttaccgctagccaaactgtaacgagaagtgtcttgcgtcctgaaaaacaaaaccaaaacccacacaaaagaaaaagtcttgcctgcctttgagagttacctaacgagatctgcttctttctcccaacttccgacttggtcccgcccatttaactaacccaggttgatttcgatggcctacggacagatcggcatgatccaggccgccgccggcttctttgtgtacttcgtcatcatggctgagaacggcttcttgcccaagaaactgtttggcattcgtaagatgtgggactcaaaggctgttaacgatctaactgattcctacggtcaagaatgggtaagtccaaactccaattcgatcttaaacacacttcatattaactctgaattcgtactttaacgataatgtaaacagccaaggatgagttagatactagtgaccaaaactaaccacaattggagccattctaattaatttatcctatactcccatagacctaccgcgaccgcaagaccttggagtatacctgccacacggccttcttcatctcgatcgtggttgtgcaatgggccgatctgatcatctgcaagacgcgtcgtaactcgatcttccagcagggcatgcgcaactgggctttgaactttggcctcgtctttgaaaccgtgctggccgcgttcctctcatactgcccgggcatggagaagggtctgcgcatgtaccccctgaagtaagtggtcctttaaaattagaatatatcattaattaaccttgtaaataaccttccttacgaatactatagactcgtctggtggttcccggctattccatttgcgctggccatcttcatctatgacgagacccgtcgtttctacttgcgccgcaaccccggaggctggttggagcaggagacctactattaaacacccacactgctacactcccacacacacagccacatgcccacacacgaatgcacaccacaacaagagcaaccaggaacacccgcaaacaacacctacaaaccatggagagcaacaaatagaaatgtttatgaaccacaaaacccacaaaagcaacacaaccacagtaatagcaacagcagcagcaacggcaacaacaacagcaacagctacgtctacaacaagctacagcaagaacatattacaatatattttatttttttaatttaattatttaaagtaaacgaggataaacaaaaatgcaagcgataattattttaaacgttaagtaaatttaaattataaattaaagctaaaaataagatttaaataaagtataaatgaaaataaaacaaacaacaaaaacgaacaacaatttcgatgaaacaccaatcacatccagacaagaacaacaacaaaatcaaccagtaactaagcaaaacagtaacaagaacatgtttttagtaaaattattaacgtaacgagaactggatgaggcgatttttatcgccacaataacaagatcccagaaagctaacacacacacacgcactcacaaacacactcacaaatacacacacacacacaccgatacacaacgcatgacgagacaaagtatataagaagtttagagaaattataaaacgaagtaaataaaaagtaaaatgaggaaagaaaacaatgaaaacccctagcgtagttaccaagtaagccgtgaaaagtaaagcccaataaaaaccacaacaacaacaaccaaaacaaaagaacagaaattaatttgcaaaacttgaaacttgtgtgtgtaaacgcagcttagcgcagaagaacgaaatatatatataaacagaagaaaaaccacaagaaatgtgaacacgacgaatataattgtttatatatatacacacatatattatatggaaaaaatttgattatataaatggagctatacaacaatacaccaaaaaccaaaattgaaaccataacgaaatcgaccgatctgcacttggcactacgccgagttccggataaaggtctccgagcaatgtttggagacctgccggtctagaatttgttaaaatctaatgaaaaaaccaactaaatgtttaataataaacccccttaaaccaattgacatgcaatattatgctttgtgtgcatttaagcccaaaagaaccgatgccgagattcggtgggattaagtcccccgatgtcgatatcgagattcagatacagataccattaccgatacctaggcccagaaggaaaagataaaaccaaataaaactaaaaaccaaattcaatacgaaacaaaagaaaacaaaaggaaaaagcgcccacaaaataaatgtttgtaagtttta

SEQ ID NO: 24203 - DNA, 3504 bp, DROSOPHILA
agcatgggagggcggactcttatcgagtcgccacggttatagccaccgatgacgacaatcgcacagccgatggccagtacaagtcaagacgcaagatgccggccaaagttaataaaaaggagaatttagatgatctcaaacaggagttggatatcgattttcataaaatctctcctgaggaattgtatcagcgctttcagacacatcccgaaaatggtctaagtcacgccaaggccaaggaaaacttggagcgcgatggtcccaatgcgctgacgccacccaagcagacgcccgaatgggtgaagttctgtaagaacctgttcggtggcttcgccatgttgctgtggatcggtgctattctctgctttgtggcctattctatccaggccagcaccagcgaggagccggccgacgataatttgtatctgggtattgtactttccgctgtcgtcatcgtgacgggcattttctcatactatcaggaatcgaaaagttctaagatcatggaatcgttcaagaacatggtaccccagttcgccaccgtcatccgcgagggcgagaaactcacgctgcgcgctgaggatctcgttctgggcgatgtcgttgaggtgaagttcggcgaccgtatccccgctgatatccgcatcatcgaggcgcgcaacttcaaggtggacaactcctcgctgaccggcgagtcggagccgcagtcccgcggtgccgagttcacccatgagaatccgctggagaccaagaatctggccttcttctccaccaacgccgtcgagggcactgccaagggtgtggtcatcagctgtggcgatcacaccgtcatgggccgcattgctggccttgcctccggtctagacaccggcgagacgcccattgccaaggagatccaccatttcatccaccttattaccggcgtggccgtgttcctgggcgtcaccttcttcgtgattgccttcatcctgggctaccactggctggacgctgtcatctttttgatcggtatcatcgtcgccaacgtgcccgagggtctgctggccaccgtaactgtgtgcctgacccttaccgccaagcgtatggcctcaaagaactgtctggtgaagaatctggaggccgtggagacccttggctccacatcgaccatctgctccgataagaccggcaccctcacccagaaccgaatgacggtcgcccacatgtggttcgataatcagatcatcgaggccgacacaactgaggatcagtcgggtgttcaatacgatagaaccagccctggattcaaggcgctctctcgcattgccactctctgtaaccgtgccgagttcaagggaggccaagatggcgtcccaatcctcaagaaagaagtcagtggagatgcctccgaggctgctctgctcaagtgcatggaactggctctgggcgatgtgatgaacattcgcaagcgtaataagaagattgccgaggtgcccttcaactccaccaacaaataccaagtgtccatccacgaaaccgaggataccaacgatccccgctacttgctcgtaatgaagggagcccccgaacgtatcttggagcgctgctctaccatttttatcaacggcaaggagaaggttctggacgaggagatgaaggaggcgttcaacaatgcctacatggaactcggtggactgggtgagcgcgtgctcggtttctgtgactttatgctgccatccgacaagtatcccaacggctttaagttcaacaccgacgacatcaacttccccatcgataatctgcgtttcgtcggccttatgtccatgattgatcccccacgtgctgccgtgcccgatgccgttgccaagtgccgatcggccggcatcaaggtcatcatggtcaccggcgatcacccgatcactgccaaggccatcgccaagtctgtcggtattatatccgagggcaacgagaccgtcgaggacattgcccagcgcctcaacatacccgtctctgaagtgaatccccgcgaggccaaggccgccgtcgtccatggcgctgagcttcgtgatgtgtccagcgaccagctggatgaaatcctccgctaccacaccgagatcgtcttcgcccgtacctcgccccagcagaaattgatcattgtcgagggttgccagcgcatgggagctattgtggccgtgactggtgatggtgtcaacgattctcccgctctgaagaaagccgatatcggtgttgccatgggtatagccggttccgatgtgtccaagcaggctgctgacatgattttgctggacgacaactttgcctccattgtgactggtgtggaggagggtcgcctgatcttcgacaacctgaaaaagtccatcgcctacaccctgacctccaacattcccgaaatctcgcccttcctggccttcatcctctgcgatataccactgccactgggaaccgtgacgattctttgcatcgatctgggcactgacatggtgccagccatttcattggcctacgagcatgccgaagccgatattatgaagcgtccaccacgtgaccccttcaacgataaattagtgaactcaaggttgatttcgatggcctacggacagatcggcatgatccaggccgccgccggcttctttgtgtacttcgtcatcatggctgagaacggcttcttgcccaagaaactgtttggcattcgtaagatgtgggactcaaaggctgttaacgatctaactgattcctacggtcaagaatggacctaccgcgaccgcaagaccttggagtatacctgccacacggccttcttcatctcgatcgtggttgtgcaatgggccgatctgatcatctgcaagacgcgtcgtaactcgatcttccagcagggcatgcgcaactgggctttgaactttggcctcgtctttgaaaccgtgctggccgcgttcctctcatactgcccgggcatggagaagggtctgcgcatgtaccccctgaaactcgtctggtggttcccggctattccatttgcgctggccatcttcatctatgacgagacccgtcgtttctacttgcgccgcaaccccggaggctggttggagcaggagacctactattaaacacccacactgctacactcccacacacacagccacatgcccacacacgaatgcacaccacaacaagagcaaccaggaacacccgcaaacaacacctacaaaccatggagagcaacaaatagaaatgtttatgaaccacaaaacccacaaaagcaacacaaccacagtaatagcaacagcagcagcaacggcaacaacaacagcaacagctacgtctacaacaagctacagcaagaacatattacaatatattttatttttttaatttaattatttaaagtaaacgaggataaacaaaaatgcaagcgataattattttaaacgttaagtaaatttaaattataaattaaagctaaaaataagatttaaataaagtataaatgaaaataaaacaaacaac

SEQ ID NO: 24204 - protein, 1002 aa, DROSOPHILA; identical to SEQ ID NO: 11877

SEQ ID NO: 24205 - DNA, 8615 bp, DROSOPHILA
ttttggagacttggggaccaagcgaaaagtctccacgaaccgcagccctattgcctgtttgtgtgcgtgtgtgtgtgagcaagagcgttcctttcgagagaggaggatttgccgagttgtgtgtgcacgaagtagaagaagcagcgctggcagcgacgccgactgcgctgccttggcgctcgggaacttggagcccagttgccgatcggatcgccagaggatcgccgctcactcagtgtattggtgtcaagcaagacggacgaaatattgccgacgacgcgccgctgccagaaagagagtttcttccgctcacgcgcgcccccctctctacatatacatatgtttcttgctctcgcgctgagttgtgaaaatttccacaagttaaaattaaatgaaaaaagtgcaaaggaagcaggcgaaatagcgaatagtaatttcggtttaacaactgcgggcagtgcactagtaaccctttaaatgtgatgaaagagtggagaaactattggtgtttccaacgaataagtttaaacttctaatacaaactgaataaggtgcttataatgtttatttaacatacatatagtgatagtttcagaagaacataaattcaaacttaaaatacaatacgtacaaatatgtaatcgtatacaaaacagtgacgaggagcgaaaatggaaggctgtatagtaatttaggaccttgtatatgcgatatctgcgatataatccccccaaccgaagaatccgctctgtctcgctcgctcagtatatccgtctccttttaaaggcgtacacgtacccaaagggggtgtaaagcagagcgtatgtgtccgtgtcccctgtaaagtgatctctccgcaggcaaccgcccacccctaaaacatccgctcttatcaggcgcagtgtgcgtgcgtgtatgtgtgcgcctggggagggggtgtgagtgagcagcggatgtcggcagagcagtcggcttcctgcgtcgaggactttgacttgttcagtctctcgccagtctttctcgagtgaggacgtgtcaactaaaattgatcctctctcccgcactcgctcttactttatttcacacacaacggtaaaaaaaataaaaaaataaaaaaactcaacaactagtggcagaaaaacaatacaattccatttaaaagccagacataagtgagaaatacacatacatattagtgcgatcgcgcaggcgaaaaaagcttttcccgctaagcttttctagtaactgtttggcggtgccagtgtgtgtttgtgtgtgtgctgatctctcccgctctctccccacatcgaatggtttctcaattgatttgaacaagtgcataaaaacaataacaaatgcaaacaaacgaagagtgcaaagcatagacagcaaaatagaagcgtggaaaacataaagcaatctaaagaaaccacatgcatgtgtatgggtgccaggaagacgaaatgggaatttcgtgggcgagtgggaatgattttcaattaagtgtacaaagcaactgaaactgccgtagcgataagataagaccggctgcggcaaatatttagcaagtggaggaagcaagaggaagcgtggtttcaagacaaggatttttttgttggaattgcgatcaccgaaagtgagataacggggacacgaaaaaaagcgccacgaatattccattccgtgactttcctctgatggaattaaggctggtgcgtgtatgtgtgtgtttgtgtcgtgatcgctccagtttccagttggcaggcctgtaaagttttccagtcaacctcgtccatttgtttctctcctaattccacaccctttggcaagtttccaagtcattcacgctgttgctgtcattccagtcgcgggctctctgtcccacacacgcacacattcatgcatatacgcacacagccgttgcagtgcgtgtgcgtggctttgtcgatgtttcttttgcctgtctccccatttgaaacacatttgaaatttcctcatttacttttcctcatcggggcctgcataatgtgctcgtctctgaccctttggggtcgactcttaaattaaactcaattgaaagtcgacagcgcgccagcagagctatttccagctgcaggactctgcggtttgcgttgggaaaaggcgaaagtacacaaaatgctgaggccaagaatttaacttggataataagtttagaccccttgatttcaaaccacagtttagttattttgtaatgtttccctcgaaaaaaaaataggaacactgttgatgtacataaatatgtacagaaagtctctattttttaatacttaaaggcgtacatttaacctttggattttccttgatcgcagcacgccctggaatatatgttttagcagctgtcaggccccaaggagtaagaatccgaacccaggacaacgaaaggacctttgatgccccacttgcatgaggacatagatcgcgatcgcacacactcggacatcgcttagtgacgcaaccacagcctcccaatgaagatggcatctcaacgcttctgcctgcggtggaacaaccaccagagcaaccttctgtccgtcttcgaccagctgttgcacgcagaaaccttcacagatgtgacgctggccgtcgaggggcaacacctgaaggcacacaaggtgagtggatgtagctgtataattaatagtgccgaaataaaaaaataattttccaaaaagactaatttaattttaaacaataaaataaaattcattaattatcaaaaagcaatgtaagatttagatagaaacctattttttttattatcattactttactttaactaagcttattgattcatcacagatggtgctatccgcctgcagtccctactttaataccctctttgtaagtcatccggaaaagcatccgattgtcatacttaaggatgtgccctactcggacatgaagtcgttgctagactttatgtacaggggcgaggtctcagtggaccaggagcgactcactgcattcctgcgcgtggccgagagcctgcgcatcaagggcctcaccgaggtcaacgacgacaagccctcgccggcagcagcagctgcaggagcgggtgcgacgggctctgagagcacagccactacaccccagctgcagcgcatccaaccgtatttggtgccccagcggaatcgctcgcaggccggcggtctgctggccagtgccgccaatgccggaaatacacccaccctgccggtgcagccatcgctgctcagctcggccctgatgcccaagcgaaagaggggcagaccccggaagctatctggcagctcgaatggcacggggaacgactacgacgactttgatcgcgagaacatgatgaacgactcctccgacctgggcaacggcaaaatgtgcaacgagtcctactccggcaatgacgatggctccgacgacaatcagccgaacgcaggacacacggatgatctaaatgtaagtctggttttaaaaatttctaaaaggtggtggcaaaagaagcaccgatgcactgcaactacatttcgaagttcgaagcgttcgctaaaaatatttcgtgtaactaattcattttccataattcccacccgcaggaaagtcgcgattctctgccctcgaaacgatcaaagaactccaaggatcaccgcgtggtgagccatcatgaagacaacagcacttccggtgagtcctctttaccaatacattcccgcatagacagcgcgaagcattacctagttctaagatcatttgcctagtcctaagacaatgcaccatcaaccattattaagtcgactctcatgtgcaccctgcaaagacatataccgaaatccaactgaatccaatacagagccaggctgaagtcacataaccacattcgaccaatctcatctgcgaatatcggaaaagctaaaagggattttacgcatttcaagtagtagaaatctaatagcaaaaactcgcgtcggtttctcccccgcttagtgaaaatgttaatgtaaatgttaaagaaaatgtgcgaaaataatacgaaaattgttaagtgaattcgcaacgctcgaggtatcttccgtccgtcggcaggtgagtgtccccaacaaccagctaatgcagttgatgcccaagaaatgcaaatccaccagctgacgaagagattattgtgaagttgagaatcgggttgagctcacagggattcatggccgacgtgataagaatgatcaagaaacatttagctaaaaaattgtccaaatttaccgcgcctccaaatgtcaagagtagcaagataactccagaaactgaaacaaattcgccacctctcatgaccatcactcacaacgaaatgctgatacctgttgtccatttccgatcatctcctcgaaacaatgcaaaaattaacaaacaacaacaggaatatgatcaactgaaaactgtcaatgaaaacagcaaaaaaaaaaaaaaactttcgaacacgcaacgcgttgaaaatggcttgaaatccctatagcttttccgatccgatttgaaactctttctctcactcgctcgcgccatgtgttttgcctttctctcgcatacatcctgcacacacaaatctacacccatatcacatcatactatactatacttatacgccaaacatttgtaaacttatttatgagtgcagattcatagacattaaaagagatttgcattaccaaatgaatatttaattcatattggtctttacactttacactttgaagtaataagatcaaaaacttgcagatgattgtggcgtataaaagtagtatcggccagtgaaagtatagagttaacctatatttttacaatttttagacggaaacgacagcgatggcgaaggtctggacacatcatatatggaacctcaacttatgctggacgaatatgacgagcccgtagagttcaagtacaacccgctcaccgacaacagctcacccacgcaggaccacacggatggtagtcacctcaacgagcaggcgcgccaacaagccttcctcatcgctgcccagagaaaacaccaggtggaaacagcagcagcggcggcggccagcggaatcaaacttaacattatcggaatggcggctggtggagcgcaggtgaaaagcatggtcagcatacccaaactaacgcccattggcaaggtcaacgccgcctccacgccattggtctcgcctgccggctccttttccacagccacggtcaagccgcgcgtccagaagcggcccaaactgggcaaacagaacggcgatgtaaaaccggctgtgtttagcagccaggaatacctcgacatttacaacagcaacgatggattcaagttgaaggctgctggtctgagcggaagcacgccgaacctgagtgctggattaggaactccctctgtcaaaaccaagctgaatcttagcagcaacgttggcgagggcgaggcggagggctcagtgagggactactgcaccaaagagggcgagcatacgtaccgatgcaaagtctgctcccgcgtctacacgcacattagtaacttctgccgtcactatgttacctcccacaagcgaaatgtgaaagtgtacccctgtcccttctgcttcaaagagtttacgcgcaaggacaatatgacggcgcacgtgaaaatcatccacaagatcgaaaatccctcgacggcgttggccacagtcgcggcagcgaatctagcaggccagccactgggagtttcgggagcctcgacgcctccgccgccggatctgagtggtcagaactcaaatcagtcgctgccagccaccagcaatgcgctatccacctcctcctcgtcgtcgacgtcctcgtccagcggatccctgggtccgttgacgacctccgcaccgccagcaccagcagctgcggcgcagtaatctctgggcacctcacaccaagcccaaaaaagcacacactcaaagaaatagtgaggttgaggcactcgcgaacgattggaggaagcatgttgcagcgccaggcgctcttcgggatttagttgttgttggggaggggagttaaagtaaactttttgttgattttgtttttagttttttacttggcttcgatggagctgcagaaatctccaagccagcagacgtttttatgttgtgcaatttaccttttcagttacaattacacttattttctaaaccccctttcaaagacccgatcagaacggaaagctaatctaatcctagcaactacccttaagatttacgattattatttatccccgatcgccgacaacgtgtcgatcgttttttattagcgcgtagtcaaagaccgaaaatcaagtagttgctttggctgacactttacaaacccatccactaggggttgcctttttattggacaccagagcggccttatatgcgaagtgtatccgggcaagagttacactaaaaaccgaaactaaacctgcacttttagataattaaactatatatacacgcggatatgttatacataatgatataaataatatatataaacattgaatggtatgtctagctgtagttctattaattaatttatcaatatcactatgttcgatatgctaatgttaattctataaaattattacaagccgaaatctgaaaacagaagcaggataatcaatgtaatgttaatcttgcgagagggagcgcagatctaccttgttgccttcaaatgaagctagttaaaagttaatcccgggtctgggtcaaggtcgttgggcacccagcaccacacccagaatacccagcacgtccacaccctcaaaaaccaacccggtcaccggtcacccacaccgttccccgtaacatccgagacccggcgaaagattgaaaatgtttcgtcgggatcgttgataaagtgtaactacagatagtaacagcaaccatagttgtaatgatataacgctaatattaatgagcataaagtaaacctaatttatctatcaaacgatttatgttgtatatcggaggcttaaattatcgccaaagaaaatgaaaatcaaaaacaaaaacaaaagcaaaagcaaaacaaaatgcagttgaaatccaacagtaacaacagagcagtcgcagcagaccacaaaatattgttgttaatgcgaaacgatctccaaacaaaataaagaacttgaaaagtagacaacaagtaattcctcagtcaagtaaaacgttcaaatttgttgcaattcgagaactaagagaaaactacgaaaaagattcagaaaattacaactgcaaaaaacgtacagaaaaccaattgaaacaaaattaagcgcaatcaaataataaacaagctgcgtacgctaacttattaaataattttgtttttaattctttatttagtggtagctagtgcaatttagttagtaagccgccgtctcccaaacaccgactaaccaatatcgcaaatatatatttccacccaatcgaaccaatcttccaaacatctcttttggcgttaattttaaacaatcaatcaaacaggtcatgcatatttatttgtatgtgtttgtttgtactatattttactttatttttagtctacttttttatatgaatacatttacatatatttttgcattcaacaactataaaccttcagcaattttctcgctttcaaacaaaaatgtccaaactcgaaacctgaacgaggaatatagctacatatatagagtcatgctttgatgcccaaagaaaatgaaagataagaatcgtaatgcaaggcaaacttccatgtgaaaatgagaaaattgtctggaaattgttggtaacatggtttccgtttaaattagctaattacgaaacacactttacgatatatcatacgatacgttaaacataattactaaatagtgaatcacacgcaatattaatcaagcagatcctttatattatcgtttaaaactgaccaacagaagaaaaataaaatacacaatgcaaaaaacactcaaaacaaaatcagttctgaaacacaaaattgattgttttaattcatttgtttgggattgggcaaattccagtcaaggagctgctttcctatttaaactgtctttaatgggtccggaaatataattcatattttaaatatctttgattacagttactcctactaaggccactccagagctctcccagcggctcttcggctcctcttcgacgacaatctcagcaacggctccaggcggcagcagcactggtccttcggaaacgatttccctgctggagatcagcgatgaaagggagtccgccccggttcacctgcctactattttgggcctgaagatacgcgccattaacactacgacgcctgcgcagcaaggatccccccagacgcctacgaaatccaagccgaagatacggcaggcgacaggaagcaataacagcaactctctgctcaagcaacagctgcgaggtggagccaaggatcctgaggtgccgcctgccaccaggatcacgggggcagtgacccccaatgctgcccttaatgccgaggaacagtccaaggagatgccgaagaaaaaccaggacgaggtcaacgcctgcattggtctgcactcgctggcaaatgccgccgag

SEQ ID NO: 24206 - DNA, 3880 bp, DROSOPHILA
cagtctctcgccagtctttctcgagtgaggacgtgtcaactaaaattgatcctctctcccgcactcgctcttactttatttcacacacaacgcacgccctggaatatatgttttagcagctgtcaggccccaaggagtaagaatccgaacccaggacaacgaaaggacctttgatgccccacttgcatgaggacatagatcgcgatcgcacacactcggacatcgcttagtgacgcaaccacagcctcccaatgaagatggcatctcaacgcttctgcctgcggtggaacaaccaccagagcaaccttctgtccgtcttcgaccagctgttgcacgcagaaaccttcacagatgtgacgctggccgtcgaggggcaacacctgaaggcacacaagatggtgctatccgcctgcagtccctactttaataccctctttgtaagtcatccggaaaagcatccgattgtcatacttaaggatgtgccctactcggacatgaagtcgttgctagactttatgtacaggggcgaggtctcagtggaccaggagcgactcactgcattcctgcgcgtggccgagagcctgcgcatcaagggcctcaccgaggtcaacgacgacaagccctcgccggcagcagcagctgcaggagcgggtgcgacgggctctgagagcacagccactacaccccagctgcagcgcatccaaccgtatttggtgccccagcggaatcgctcgcaggccggcggtctgctggccagtgccgccaatgccggaaatacacccaccctgccggtgcagccatcgctgctcagctcggccctgatgcccaagcgaaagaggggcagaccccggaagctatctggcagctcgaatggcacggggaacgactacgacgactttgatcgcgagaacatgatgaacgactcctccgacctgggcaacggcaaaatgtgcaacgagtcctactccggcaatgacgatggctccgacgacaatcagccgaacgcaggacacacggatgatctaaatgaaagtcgcgattctctgccctcgaaacgatcaaagaactccaaggatcaccgcgtggtgagccatcatgaagacaacagcacttccgacggaaacgacagcgatggcgaaggtctggacacatcatatatggaacctcaacttatgctggacgaatatgacgagcccgtagagttcaagtacaacccgctcaccgacaacagctcacccacgcaggaccacacggatggtagtcacctcaacgagcaggcgcgccaacaagccttcctcatcgctgcccagagaaaacaccaggtggaaacagcagcagcggcggcggccagcggaatcaaacttaacattatcggaatggcggctggtggagcgcaggtgaaaagcatggtcagcatacccaaactaacgcccattggcaaggtcaacgccgcctccacgccattggtctcgcctgccggctccttttccacagccacggtcaagccgcgcgtccagaagcggcccaaactgggcaaacagaacggcgatgtaaaaccggctgtgtttagcagccaggaatacctcgacatttacaacagcaacgatggattcaagttgaaggctgctggtctgagcggaagcacgccgaacctgagtgctggattaggaactccctctgtcaaaaccaagctgaatcttagcagcaacgttggcgagggcgaggcggagggctcagtgagggactactgcaccaaagagggcgagcatacgtaccgatgcaaagtctgctcccgcgtctacacgcacattagtaacttctgccgtcactatgttacctcccacaagcgaaatgtgaaagtgtacccctgtcccttctgcttcaaagagtttacgcgcaaggacaatatgacggcgcacgtgaaaatcatccacaagatcgaaaatccctcgacggcgttggccacagtcgcggcagcgaatctagcaggccagccactgggagtttcgggagcctcgacgcctccgccgccggatctgagtggtcagaactcaaatcagtcgctgccagccaccagcaatgcgctatccacctcctcctcgtcgtcgacgtcctcgtccagcggatccctgggtccgttgacgacctccgcaccgccagcaccagcagctgcggcgcagtaatctctgggcacctcacaccaagcccaaaaaagcacacactcaaagaaatagtgaggttgaggcactcgcgaacgattggaggaagcatgttgcagcgccaggcgctcttcgggatttagttgttgttggggaggggagttaaagtaaactttttgttgattttgtttttagttttttacttggcttcgatggagctgcagaaatctccaagccagcagacgtttttatgttgtgcaatttaccttttcagttacaattacacttattttctaaaccccctttcaaagacccgatcagaacggaaagctaatctaatcctagcaactacccttaagatttacgattattatttatccccgatcgccgacaacgtgtcgatcgttttttattagcgcgtagtcaaagaccgaaaatcaagtagttgctttggctgacactttacaaacccatccactaggggttgcctttttattggacaccagagcggccttatatgcgaagtgtatccgggcaagagttacactaaaaaccgaaactaaacctgcacttttagataattaaactatatatacacgcggatatgttatacataatgatataaataatatatataaacattgaatggtatgtctagctgtagttctattaattaatttatcaatatcactatgttcgatatgctaatgttaattctataaaattattacaagccgaaatctgaaaacagaagcaggataatcaatgtaatgttaatcttgcgagagggagcgcagatctaccttgttgccttcaaatgaagctagttaaaagttaatcccgggtctgggtcaaggtcgttgggcacccagcaccacacccagaatacccagcacgtccacaccctcaaaaaccaacccggtcaccggtcacccacaccgttccccgtaacatccgagacccggcgaaagattgaaaatgtttcgtcgggatcgttgataaagtgtaactacagatagtaacagcaaccatagttgtaatgatataacgctaatattaatgagcataaagtaaacctaatttatctatcaaacgatttatgttgtatatcggaggcttaaattatcgccaaagaaaatgaaaatcaaaaacaaaaacaaaagcaaaagcaaaacaaaatgcagttgaaatccaacagtaacaacagagcagtcgcagcagaccacaaaatattgttgttaatgcgaaacgatctccaaacaaaataaagaacttgaaaagtagacaacaagtaattcctcagtcaagtaaaacgttcaaatttgttgcaattcgagaactaagagaaaactacgaaaaagattcagaaaattacaactgcaaaaaacgtacagaaaaccaattgaaacaaaattaagcgcaatcaaataataaacaagctgcgtacgctaacttattaaataattttgtttttaattctttatttagtggtagctagtgcaatttagttagtaagccgccgtctcccaaacaccgactaaccaatatcgcaaatatatatttccacccaatcgaaccaatcttccaaacatctcttttggcgttaattttaaacaatcaatcaaacaggtcatgcatatttatttgtatgtgtttgtttgtactatattttactttatttttagtctacttttttatatgaatacatttacatatatttt

SEQ ID NO: 24207 - protein, 643 aa, DROSOPHILA
MKMASQRFCLRWNNHQSNLLSVFDQLLHAETFTDVTLAVEGQHLKAHKMVLSACSPYFNTLFVSHPEKHPIVILKDVPYSDMKSLLDFMYRGEVSVDQERLTAFLRVAESLRIKGLTEVNDDKPSPAAAAAGAGATGSESTATTPQLQRIQPYLVPQRNRSQAGGLLASAANAGNTPTLPVQPSLLSSALMPKRKRGRPRKLSGSSNGTGNDYDDFDRENMMNDSSDLGNGKMCNESYSGNDDGSDDNQPNAGHTDDLNESRDSLPSKRSKNSKDHRVVSHHEDNSTSDGNDSDGEGLDTSYMEPQLMLDEYDEPVEFKYNPLTDNSSPTQDHTDGSHLNEQARQQAFLIAAQRKHQVETAAAAAASGIKLNIIGMAAGGAQVKSMVSIPKLTPIGKVNAASTPLVSPAGSFSTATVKPRVQKRPKLGKQNGDVKPAVFSSQEYLDIYNSNDGFKLKAAGLSGSTPNLSAGLGTPSVKTKLNLSSNVGEGEAEGSVRDYCTKEGEHTYRCKVCSRVYTHISNFCRHYVTSHKRNVKVYPCPFCFKEFTRKDNMTAHVKIIHKIENPSTALATVAAANLAGQPLGVSGASTPPPPDLSGQNSNQSLPATSNALSTSSSSSTSSSSGSLGPLTTSAPPAPAAAAQ

SEQ ID NO: 24208 - DNA, 11612 bp, DROSOPHILA
ttttggagacttggggaccaagcgaaaagtctccacgaaccgcagccctattgcctgtttgtgtgcgtgtgtgtgtgagcaagagcgttcctttcgagagaggaggatttgccgagttgtgtgtgcacgaagtagaagaagcagcgctggcagcgacgccgactgcgctgccttggcgctcgggaacttggagcccagttgccgatcggatcgccagaggatcgccgctcactcagtgtattggtgtcaagcaagacggacgaaatattgccgacgacgcgccgctgccagaaagagagtttcttccgctcacgcgcgcccccctctctacatatacatatgtttcttgctctcgcgctgagttgtgaaaatttccacaagttaaaattaaatgaaaaaagtgcaaaggaagcaggcgaaatagcgaatagtaatttcggtttaacaactgcgggcagtgcactagtaaccctttaaatgtgatgaaagagtggagaaactattggtgtttccaacgaataagtttaaacttctaatacaaactgaataaggtgcttataatgtttatttaacatacatatagtgatagtttcagaagaacataaattcaaacttaaaatacaatacgtacaaatatgtaatcgtatacaaaacagtgacgaggagcgaaaatggaaggctgtatagtaatttaggaccttgtatatgcgatatctgcgatataatccccccaaccgaagaatccgctctgtctcgctcgctcagtatatccgtctccttttaaaggcgtacacgtacccaaagggggtgtaaagcagagcgtatgtgtccgtgtcccctgtaaagtgatctctccgcaggcaaccgcccacccctaaaacatccgctcttatcaggcgcagtgtgcgtgcgtgtatgtgtgcgcctggggagggggtgtgagtgagcagcggatgtcggcagagcagtcggcttcctgcgtcgaggactttgacttgttcagtctctcgccagtctttctcgagtgaggacgtgtcaactaaaattgatcctctctcccgcactcgctcttactttatttcacacacaacggtaaaaaaaataaaaaaataaaaaaactcaacaactagtggcagaaaaacaatacaattccatttaaaagccagacataagtgagaaatacacatacatattagtgcgatcgcgcaggcgaaaaaagcttttcccgctaagcttttctagtaactgtttggcggtgccagtgtgtgtttgtgtgtgtgctgatctctcccgctctctccccacatcgaatggtttctcaattgatttgaacaagtgcataaaaacaataacaaatgcaaacaaacgaagagtgcaaagcatagacagcaaaatagaagcgtggaaaacataaagcaatctaaagaaaccacatgcatgtgtatgggtgccaggaagacgaaatgggaatttcgtgggcgagtgggaatgattttcaattaagtgtacaaagcaactgaaactgccgtagcgataagataagaccggctgcggcaaatatttagcaagtggaggaagcaagaggaagcgtggtttcaagacaaggatttttttgttggaattgcgatcaccgaaagtgagataacggggacacgaaaaaaagcgccacgaatattccattccgtgactttcctctgatggaattaaggctggtgcgtgtatgtgtgtgtttgtgtcgtgatcgctccagtttccagttggcaggcctgtaaagttttccagtcaacctcgtccatttgtttctctcctaattccacaccctttggcaagtttccaagtcattcacgctgttgctgtcattccagtcgcgggctctctgtcccacacacgcacacattcatgcatatacgcacacagccgttgcagtgcgtgtgcgtggctttgtcgatgtttcttttgcctgtctccccatttgaaacacatttgaaatttcctcatttacttttcctcatcggggcctgcataatgtgctcgtctctgaccctttggggtcgactcttaaattaaactcaattgaaagtcgacagcgcgccagcagagctatttccagctgcaggactctgcggtttgcgttgggaaaaggcgaaagtacacaaaatgctgaggccaagaatttaacttggataataagtttagaccccttgatttcaaaccacagtttagttattttgtaatgtttccctcgaaaaaaaaataggaacactgttgatgtacataaatatgtacagaaagtctctattttttaatacttaaaggcgtacatttaacctttggattttccttgatcgcagcacgccctggaatatatgttttagcagctgtcaggccccaaggagtaagaatccgaacccaggacaacgaaaggacctttgatgccccacttgcatgaggacatagatcgcgatcgcacacactcggacatcgcttagtgacgcaaccacagcctcccaatgaagatggcatctcaacgcttctgcctgcggtggaacaaccaccagagcaaccttctgtccgtcttcgaccagctgttgcacgcagaaaccttcacagatgtgacgctggccgtcgaggggcaacacctgaaggcacacaaggtgagtggatgtagctgtataattaatagtgccgaaataaaaaaataattttccaaaaagactaatttaattttaaacaataaaataaaattcattaattatcaaaaagcaatgtaagatttagatagaaacctattttttttattatcattactttactttaactaagcttattgattcatcacagatggtgctatccgcctgcagtccctactttaataccctctttgtaagtcatccggaaaagcatccgattgtcatacttaaggatgtgccctactcggacatgaagtcgttgctagactttatgtacaggggcgaggtctcagtggaccaggagcgactcactgcattcctgcgcgtggccgagagcctgcgcatcaagggcctcaccgaggtcaacgacgacaagccctcgccggcagcagcagctgcaggagcgggtgcgacgggctctgagagcacagccactacaccccagctgcagcgcatccaaccgtatttggtgccccagcggaatcgctcgcaggccggcggtctgctggccagtgccgccaatgccggaaatacacccaccctgccggtgcagccatcgctgctcagctcggccctgatgcccaagcgaaagaggggcagaccccggaagctatctggcagctcgaatggcacggggaacgactacgacgactttgatcgcgagaacatgatgaacgactcctccgacctgggcaacggcaaaatgtgcaacgagtcctactccggcaatgacgatggctccgacgacaatcagccgaacgcaggacacacggatgatctaaatgtaagtctggttttaaaaatttctaaaaggtggtggcaaaagaagcaccgatgcactgcaactacatttcgaagttcgaagcgttcgctaaaaatatttcgtgtaactaattcattttccataattcccacccgcaggaaagtcgcgattctctgccctcgaaacgatcaaagaactccaaggatcaccgcgtggtgagccatcatgaagacaacagcacttccggtgagtcctctttaccaatacattcccgcatagacagcgcgaagcattacctagttctaagatcatttgcctagtcctaagacaatgcaccatcaaccattattaagtcgactctcatgtgcaccctgcaaagacatataccgaaatccaactgaatccaatacagagccaggctgaagtcacataaccacattcgaccaatctcatctgcgaatatcggaaaagctaaaagggattttacgcatttcaagtagtagaaatctaatagcaaaaactcgcgtcggtttctcccccgcttagtgaaaatgttaatgtaaatgttaaagaaaatgtgcgaaaataatacgaaaattgttaagtgaattcgcaacgctcgaggtatcttccgtccgtcggcaggtgagtgtccccaacaaccagctaatgcagttgatgcccaagaaatgcaaatccaccagctgacgaagagattattgtgaagttgagaatcgggttgagctcacagggattcatggccgacgtgataagaatgatcaagaaacatttagctaaaaaattgtccaaatttaccgcgcctccaaatgtcaagagtagcaagataactccagaaactgaaacaaattcgccacctctcatgaccatcactcacaacgaaatgctgatacctgttgtccatttccgatcatctcctcgaaacaatgcaaaaattaacaaacaacaacaggaatatgatcaactgaaaactgtcaatgaaaacagcaaaaaaaaaaaaaaactttcgaacacgcaacgcgttgaaaatggcttgaaatccctatagcttttccgatccgatttgaaactctttctctcactcgctcgcgccatgtgttttgcctttctctcgcatacatcctgcacacacaaatctacacccatatcacatcatactatactatacttatacgccaaacatttgtaaacttatttatgagtgcagattcatagacattaaaagagatttgcattaccaaatgaatatttaattcatattggtctttacactttacactttgaagtaataagatcaaaaacttgcagatgattgtggcgtataaaagtagtatcggccagtgaaagtatagagttaacctatatttttacaatttttagacggaaacgacagcgatggcgaaggtctggacacatcatatatggaacctcaacttatgctggacgaatatgacgagcccgtagagttcaagtacaacccgctcaccgacaacagctcacccacgcaggaccacacggatggtagtcacctcaacgagcaggcgcgccaacaagccttcctcatcgctgcccagagaaaacaccaggtggaaacagcagcagcggcggcggccagcggaatcaaacttaacattatcggaatggcggctggtggagcgcaggtgaaaagcatggtcagcatacccaaactaacgcccattggcaaggtcaacgccgcctccacgccattggtctcgcctgccggctccttttccacagccacggtcaagccgcgcgtccagaagcggcccaaactgggcaaacagaacggcgatgtaaaaccggctgtgtttagcagccaggaatacctcgacatttacaacagcaacgatggattcaagttgaaggctgctggtctgagcggaagcacgccgaacctgagtgctggattaggaactccctctgtcaaaaccaagctgaatcttagcagcaacgttggcgagggcgaggcggagggctcagtgagggactactgcaccaaagagggcgagcatacgtaccgatgcaaagtctgctcccgcgtctacacgcacattagtaacttctgccgtcactatgttacctcccacaagcgaaatgtgaaagtgtacccctgtcccttctgcttcaaagagtttacgcgcaaggacaatatgacggcgcacgtgaaaatcatccacaagatcgaaaatccctcgacggcgttggccacagtcgcggcagcgaatctagcaggccagccactgggagtttcgggagcctcgacgcctccgccgccggatctgagtggtcagaactcaaatcagtcgctgccagccaccagcaatgcgctatccacctcctcctcgtcgtcgacgtcctcgtccagcggatccctgggtccgttgacgacctccgcaccgccagcaccagcagctgcggcgcagtaatctctgggcacctcacaccaagcccaaaaaagcacacactcaaagaaatagtgaggttgaggcactcgcgaacgattggaggaagcatgttgcagcgccaggcgctcttcgggatttagttgttgttggggaggggagttaaagtaaactttttgttgattttgtttttagttttttacttggcttcgatggagctgcagaaatctccaagccagcagacgtttttatgttgtgcaatttaccttttcagttacaattacacttattttctaaaccccctttcaaagacccgatcagaacggaaagctaatctaatcctagcaactacccttaagatttacgattattatttatccccgatcgccgacaacgtgtcgatcgttttttattagcgcgtagtcaaagaccgaaaatcaagtagttgctttggctgacactttacaaacccatccactaggggttgcctttttattggacaccagagcggccttatatgcgaagtgtatccgggcaagagttacactaaaaaccgaaactaaacctgcacttttagataattaaactatatatacacgcggatatgttatacataatgatataaataatatatataaacattgaatggtatgtctagctgtagttctattaattaatttatcaatatcactatgttcgatatgctaatgttaattctataaaattattacaagccgaaatctgaaaacagaagcaggataatcaatgtaatgttaatcttgcgagagggagcgcagatctaccttgttgccttcaaatgaagctagttaaaagttaatcccgggtctgggtcaaggtcgttgggcacccagcaccacacccagaatacccagcacgtccacaccctcaaaaaccaacccggtcaccggtcacccacaccgttccccgtaacatccgagacccggcgaaagattgaaaatgtttcgtcgggatcgttgataaagtgtaactacagatagtaacagcaaccatagttgtaatgatataacgctaatattaatgagcataaagtaaacctaatttatctatcaaacgatttatgttgtatatcggaggcttaaattatcgccaaagaaaatgaaaatcaaaaacaaaaacaaaagcaaaagcaaaacaaaatgcagttgaaatccaacagtaacaacagagcagtcgcagcagaccacaaaatattgttgttaatgcgaaacgatctccaaacaaaataaagaacttgaaaagtagacaacaagtaattcctcagtcaagtaaaacgttcaaatttgttgcaattcgagaactaagagaaaactacgaaaaagattcagaaaattacaactgcaaaaaacgtacagaaaaccaattgaaacaaaattaagcgcaatcaaataataaacaagctgcgtacgctaacttattaaataattttgtttttaattctttatttagtggtagctagtgcaatttagttagtaagccgccgtctcccaaacaccgactaaccaatatcgcaaatatatatttccacccaatcgaaccaatcttccaaacatctcttttggcgttaattttaaacaatcaatcaaacaggtcatgcatatttatttgtatgtgtttgtttgtactatattttactttatttttagtctacttttttatatgaatacatttacatatatttttgcattcaacaactataaaccttcagcaattttctcgctttcaaacaaaaatgtccaaactcgaaacctgaacgaggaatatagctacatatatagagtcatgctttgatgcccaaagaaaatgaaagataagaatcgtaatgcaaggcaaacttccatgtgaaaatgagaaaattgtctggaaattgttggtaacatggtttccgtttaaattagctaattacgaaacacactttacgatatatcatacgatacgttaaacataattactaaatagtgaatcacacgcaatattaatcaagcagatcctttatattatcgtttaaaactgaccaacagaagaaaaataaaatacacaatgcaaaaaacactcaaaacaaaatcagttctgaaacacaaaattgattgttttaattcatttgtttgggattgggcaaattccagtcaaggagctgctttcctatttaaactgtctttaatgggtccggaaatataattcatattttaaatatctttgattacagttactcctactaaggccactccagagctctcccagcggctcttcggctcctcttcgacgacaatctcagcaacggctccaggcggcagcagcactggtccttcggaaacgatttccctgctggagatcagcgatgaaagggagtccgccccggttcacctgcctactattttgggcctgaagatacgcgccattaacactacgacgcctgcgcagcaaggatccccccagacgcctacgaaatccaagccgaagatacggcaggcgacaggaagcaataacagcaactctctgctcaagcaacagctgcgaggtggagccaaggatcctgaggtgccgcctgccaccaggatcacgggggcagtgacccccaatgctgcccttaatgccgaggaacagtccaaggagatgccgaagaaaaaccaggacgaggtcaacgcctgcattggtctgcactcgctggcaaatgccgccgagcagcaggctgctcaggtggccagcactgggaacctgcaccaccagctactgcttcacatggcagcaaacaactccatgctgaacaccaccgattactaccaacagcagcagcaggagtctccctcgagtgctggccagtttatggatgacgacctggagctgctgtctcttaatgatcagcaggataaaagcgatgaacccgatcatgaaatggtcacgctggctgatgagaacgctggtttgcctggttaccagggcaacgaggcggaagccacacctgcgcaggaagattcgcctgctgcggagacagcaacggcaccaccacccgcgcctagaagtggaaagaagggagctaagcgtccgattcaacggcggagagttcgacgcaaggcccagtcgacgctggatgatcaagcggaacacctgacagagatgtccgtgcgggggctggatctcttccggtatgcgagcgtcgtggagggcgtctaccgctgtaccgagtgcgccaaggagaacatgcagaagacattcaagaacaagtacagcttccaacgtcacgcctttctctaccacgagggcaagcatcgcaaggtgttcccatgtcccgtgtgctccaaagagttctcgcgaccagataaaatgaagaaccacctcaagatgacacacgagaactttacgccgccgaaggacattggcgccttcagccccctgaaatacttgatcagtgcagcggctgcaggggatatgcacgctacgatctaccagcaacagcaagatcattaccaccgccagttggccgagcaactggagcagcaaaacgcctcctttgacagccgggacagttcgcttatcctgcccgacgtgaagatggagcatgcggaagaccaggatgcggaacaggaggcggaactgagcgatggtggctatgacgcctccaatccagcagcagcagcagccgccatgttgagcctgcaacaagacgtaatcatcaaggatgagatacagatctctccgtcgccctcgcccaccccgcccgcttcctgcgctgtggcggagggcaagtccttggctttggcctctaccgcacaaaccgcaacgtaaagactttgaaggaccagagttacggaaggactacgaacgcacaacaacgtttaccttaagcagcgagctctgaactgtagaatacatcatagcaacataagcaatcgtggcactcaaacgcaacacaccagactcaaaacgatttttagttaatgtaaacccgtaagcaatattaattctaacacttgctccgtccagaacgccttttttaagcaacactagtatttaatttacctaggacataagttttgcccaattgagcaacgcaattgagcagttcagtgaactttaatgactttcggctttaattataaacaattcgactggccgcttactggatccgcacacgatccgtaaggcaagcaactttagaacttttcatttctctttgtgattttgttaaacctttttatatagacctttgttttttattttttgttgtacatagctatattttgtttaatactcaaagtccgtagtataattttgttcatttccttggcaacaagttggaatcaaatgtattggctaattgtgcaatcttcaaaacgtgttggtggcttcggaggaacgcgacaacgctgttctgcggccccacgaaatgttgtaaacttaattaactactaaggccacttaactaggatctaggtgtagtcataaggcattggatcaatgttccagcgtacaacaaaacggacttccagtgaagagacaactgatatttatacggaatcccaatctggtattatgtattatgatttttacagtttacttaacgcaacaaatacgacttaagacttgtgcgctcaatgactagaaattatagttgcgattttaggataactattcatggaaaaaccacaaacgagtttttaataaagaaaattttactgattaattatttttaaaagcgtttgaaacatatttcattaattctgataaaatcacaaatcgatacacttaaaaacccccacagccaatcacaataattgaataatgaacgtgtacatattttattccttaaagttttattcgattggtgtagcttcatccgtttactgattatttgctcttcggtaccagaaacgtgcccgaaagtcgtcggagcaggtgaggaaagcaggaccattgggcgaatgcgtaatatagcggacaggtccgttgtgtccaagcgagttaagggtcaggcggcagccgttacgggagttccacgagcaaagcgaagtggtggcctcgtcggggaaaagcacgtaatcctctgtgtggttgaatacagcctctgtctggtgctcctgcttgccggtggttccagcgcccgtgtacgtctgaatgggacgactggtacacagctcccacagataaaccagtgaatccataccggaagataggaggtactaaaatgaataagttaaaatcttgcacagccactacccatagtgtcccattacctttccattccgcgtaaactccagtgagcatattgccgctccgccatgcgcctcggcaatggtgttgatgcaccgcccgctgatcccatcccatattttgatgtcaccatcatagctgcctgtggcgtagagtttccccgtgggcgaatatttcacgcaagtaactccagccttgtgctgctgcgagggaatggcactcacgaagcattgggtggtggccacatcgtagacccgcaagacgttatgttccgttccgatggctacgtagtcaccagtaggatgaaaagacaggcacagcaccggctcgcagtcggtgaacaccttgtgggccttctttaccgaaggcttggcaatgtcaaacaacttaacagtgccatcgcgcgaggcggaggccaggatgtgctccttgggatggaactccaggtaagacacttcatcagtgtgatca

SEQ ID NO: 24209 - DNA, 3589 bp, DROSOPHILA
cagtctctcgccagtctttctcgagtgaggacgtgtcaactaaaattgatcctctctcccgcactcgctcttactttatttcacacacaacgcacgccctggaatatatgttttagcagctgtcaggccccaaggagtaagaatccgaacccaggacaacgaaaggacctttgatgccccacttgcatgaggacatagatcgcgatcgcacacactcggacatcgcttagtgacgcaaccacagcctcccaatgaagatggcatctcaacgcttctgcctgcggtggaacaaccaccagagcaaccttctgtccgtcttcgaccagctgttgcacgcagaaaccttcacagatgtgacgctggccgtcgaggggcaacacctgaaggcacacaagatggtgctatccgcctgcagtccctactttaataccctctttgtaagtcatccggaaaagcatccgattgtcatacttaaggatgtgccctactcggacatgaagtcgttgctagactttatgtacaggggcgaggtctcagtggaccaggagcgactcactgcattcctgcgcgtggccgagagcctgcgcatcaagggcctcaccgaggtcaacgacgacaagccctcgccggcagcagcagctgcaggagcgggtgcgacgggctctgagagcacagccactacaccccagctgcagcgcatccaaccgtatttggtgccccagcggaatcgctcgcaggccggcggtctgctggccagtgccgccaatgccggaaatacacccaccctgccggtgcagccatcgctgctcagctcggccctgatgcccaagcgaaagaggggcagaccccggaagctatctggcagctcgaatggcacggggaacgactacgacgactttgatcgcgagaacatgatgaacgactcctccgacctgggcaacggcaaaatgtgcaacgagtcctactccggcaatgacgatggctccgacgacaatcagccgaacgcaggacacacggatgatctaaatgaaagtcgcgattctctgccctcgaaacgatcaaagaactccaaggatcaccgcgtggtgagccatcatgaagacaacagcacttccgttactcctactaaggccactccagagctctcccagcggctcttcggctcctcttcgacgacaatctcagcaacggctccaggcggcagcagcactggtccttcggaaacgatttccctgctggagatcagcgatgaaagggagtccgccccggttcacctgcctactattttgggcctgaagatacgcgccattaacactacgacgcctgcgcagcaaggatccccccagacgcctacgaaatccaagccgaagatacggcaggcgacaggaagcaataacagcaactctctgctcaagcaacagctgcgaggtggagccaaggatcctgaggtgccgcctgccaccaggatcacgggggcagtgacccccaatgctgcccttaatgccgaggaacagtccaaggagatgccgaagaaaaaccaggacgaggtcaacgcctgcattggtctgcactcgctggcaaatgccgccgagcagcaggctgctcaggtggccagcactgggaacctgcaccaccagctactgcttcacatggcagcaaacaactccatgctgaacaccaccgattactaccaacagcagcagcaggagtctccctcgagtgctggccagtttatggatgacgacctggagctgctgtctcttaatgatcagcaggataaaagcgatgaacccgatcatgaaatggtcacgctggctgatgagaacgctggtttgcctggttaccagggcaacgaggcggaagccacacctgcgcaggaagattcgcctgctgcggagacagcaacggcaccaccacccgcgcctagaagtggaaagaagggagctaagcgtccgattcaacggcggagagttcgacgcaaggcccagtcgacgctggatgatcaagcggaacacctgacagagatgtccgtgcgggggctggatctcttccggtatgcgagcgtcgtggagggcgtctaccgctgtaccgagtgcgccaaggagaacatgcagaagacattcaagaacaagtacagcttccaacgtcacgcctttctctaccacgagggcaagcatcgcaaggtgttcccatgtcccgtgtgctccaaagagttctcgcgaccagataaaatgaagaaccacctcaagatgacacacgagaactttacgccgccgaaggacattggcgccttcagccccctgaaatacttgatcagtgcagcggctgcaggggatatgcacgctacgatctaccagcaacagcaagatcattaccaccgccagttggccgagcaactggagcagcaaaacgcctcctttgacagccgggacagttcgcttatcctgcccgacgtgaagatggagcatgcggaagaccaggatgcggaacaggaggcggaactgagcgatggtggctatgacgcctccaatccagcagcagcagcagccgccatgttgagcctgcaacaagacgtaatcatcaaggatgagatacagatctctccgtcgccctcgcccaccccgcccgcttcctgcgctgtggcggagggcaagtccttggctttggcctctaccgcacaaaccgcaacgtaaagactttgaaggaccagagttacggaaggactacgaacgcacaacaacgtttaccttaagcagcgagctctgaactgtagaatacatcatagcaacataagcaatcgtggcactcaaacgcaacacaccagactcaaaacgatttttagttaatgtaaacccgtaagcaatattaattctaacacttgctccgtccagaacgccttttttaagcaacactagtatttaatttacctaggacataagttttgcccaattgagcaacgcaattgagcagttcagtgaactttaatgactttcggctttaattataaacaattcgactggccgcttactggatccgcacacgatccgtaaggcaagcaactttagaacttttcatttctctttgtgattttgttaaacctttttatatagacctttgttttttattttttgttgtacatagctatattttgtttaatactcaaagtccgtagtataattttgttcatttccttggcaacaagttggaatcaaatgtattggctaattgtgcaatcttcaaaacgtgttggtggcttcggaggaacgcgacaacgctgttctgcggccccacgaaatgttgtaaacttaattaactactaaggccacttaactaggatctaggtgtagtcataaggcattggatcaatgttccagcgtacaacaaaacggacttccagtgaagagacaactgatatttatacggaatcccaatctggtattatgtattatgatttttacagtttacttaacgcaacaaatacgacttaagacttgtgcgctcaatgactagaaattatagttgcgattttaggataactattcatggaaaaaccacaaacgagtttttaataaagaaaattttactgatt

SEQ ID NO: 24210 - protein, 813 aa, DROSOPHILA; identical to SEQ ID NO: 2610

SEQ ID NO: 24211 - DNA, 9369 bp, DROSOPHILA
gaacaaattataaaagagcgagggaactgtgctcaaagctcgttgcttaggatccgatccccaatggctgttgagtcaatccacttgtagaatttacagcccgcttacgtaatccctctcctaaaaaaaaaaacctcagaaaaacgctcctgccaaccagccagcacaaagccatgcagtgaaacacccattaattttgttgttgtgaataattacatatttttatgatcctcgtcatattttttgtgaagtgcctttttgagccaaactttgttatttcgatttatgttgtgaatgttttacaaatgtctaaggtttgtaaaaaaaaagattcaacatttaaacttcagtcaatttatttgagtatccactgtacatcccaccacgccttctttactggctctcgcttttccacatgctttccgatatttcagaggtccggaaaaccccagcaaagctgcagcccaaccccaaatggtttcaataaagagcccagcccagaagttgcccttacaacaacaaaacctacaatgcacttctacagcggcgggaaaatgcgggggatacaacaaatcatcaactgttgcacacccgaaccgttgctgctgttgttgttgtcggtggcttcctagctttttttcagcgtgtttttctttttaaccccgttttgctggaaattaaaaattcaaaaagtcaaaggcgcaagctagagagcaacagcagctctcttgctctagcgttcgggctctctcatttttggagacttggggaccaagcgaaaagtctccacgaaccgcagccctattgcctgtttgtgtgcgtgtgtgtgtgagcaagagcgttcctttcgagagaggaggatttgccgagttgtgtgtgcacgaagtagaagaagcagcgctggcagcgacgccgactgcgctgccttggcgctcgggaacttggagcccagttgccgatcggatcgccagaggatcgccgctcactcagtgtattggtgtcaagcaagacggacgaaatattgccgacgacgcgccgctgccagaaagagagtttcttccgctcacgcgcgcccccctctctacatatacatatgtttcttgctctcgcgctgagttgtgaaaatttccacaagttaaaattaaatgaaaaaagtgcaaaggaagcaggcgaaatagcgaatagtaatttcggtttaacaactgcgggcagtgcactagtaaccctttaaatgtgatgaaagagtggagaaactattggtgtttccaacgaataagtttaaacttctaatacaaactgaataaggtgcttataatgtttatttaacatacatatagtgatagtttcagaagaacataaattcaaacttaaaatacaatacgtacaaatatgtaatcgtatacaaaacagtgacgaggagcgaaaatggaaggctgtatagtaatttaggaccttgtatatgcgatatctgcgatataatccccccaaccgaagaatccgctctgtctcgctcgctcagtatatccgtctccttttaaaggcgtacacgtacccaaagggggtgtaaagcagagcgtatgtgtccgtgtcccctgtaaagtgatctctccgcaggcaaccgcccacccctaaaacatccgctcttatcaggcgcagtgtgcgtgcgtgtatgtgtgcgcctggggagggggtgtgagtgagcagcggatgtcggcagagcagtcggcttcctgcgtcgaggactttgacttgttcagtctctcgccagtctttctcgagtgaggacgtgtcaactaaaattgatcctctctcccgcactcgctcttactttatttcacacacaacggtaaaaaaaataaaaaaataaaaaaactcaacaactagtggcagaaaaacaatacaattccatttaaaagccagacataagtgagaaatacacatacatattagtgcgatcgcgcaggcgaaaaaagcttttcccgctaagcttttctagtaactgtttggcggtgccagtgtgtgtttgtgtgtgtgctgatctctcccgctctctccccacatcgaatggtttctcaattgatttgaacaagtgcataaaaacaataacaaatgcaaacaaacgaagagtgcaaagcatagacagcaaaatagaagcgtggaaaacataaagcaatctaaagaaaccacatgcatgtgtatgggtgccaggaagacgaaatgggaatttcgtgggcgagtgggaatgattttcaattaagtgtacaaagcaactgaaactgccgtagcgataagataagaccggctgcggcaaatatttagcaagtggaggaagcaagaggaagcgtggtttcaagacaaggatttttttgttggaattgcgatcaccgaaagtgagataacggggacacgaaaaaaagcgccacgaatattccattccgtgactttcctctgatggaattaaggctggtgcgtgtatgtgtgtgtttgtgtcgtgatcgctccagtttccagttggcaggcctgtaaagttttccagtcaacctcgtccatttgtttctctcctaattccacaccctttggcaagtttccaagtcattcacgctgttgctgtcattccagtcgcgggctctctgtcccacacacgcacacattcatgcatatacgcacacagccgttgcagtgcgtgtgcgtggctttgtcgatgtttcttttgcctgtctccccatttgaaacacatttgaaatttcctcatttacttttcctcatcggggcctgcataatgtgctcgtctctgaccctttggggtcgactcttaaattaaactcaattgaaagtcgacagcgcgccagcagagctatttccagctgcaggactctgcggtttgcgttgggaaaaggcgaaagtacacaaaatgctgaggccaagaatttaacttggataataagtttagaccccttgatttcaaaccacagtttagttattttgtaatgtttccctcgaaaaaaaaataggaacactgttgatgtacataaatatgtacagaaagtctctattttttaatacttaaaggcgtacatttaacctttggattttccttgatcgcagcacgccctggaatatatgttttagcagctgtcaggccccaaggagtaagaatccgaacccaggacaacgaaaggacctttgatgccccacttgcatgaggacatagatcgcgatcgcacacactcggacatcgcttagtgacgcaaccacagcctcccaatgaagatggcatctcaacgcttctgcctgcggtggaacaaccaccagagcaaccttctgtccgtcttcgaccagctgttgcacgcagaaaccttcacagatgtgacgctggccgtcgaggggcaacacctgaaggcacacaaggtgagtggatgtagctgtataattaatagtgccgaaataaaaaaataattttccaaaaagactaatttaattttaaacaataaaataaaattcattaattatcaaaaagcaatgtaagatttagatagaaacctattttttttattatcattactttactttaactaagcttattgattcatcacagatggtgctatccgcctgcagtccctactttaataccctctttgtaagtcatccggaaaagcatccgattgtcatacttaaggatgtgccctactcggacatgaagtcgttgctagactttatgtacaggggcgaggtctcagtggaccaggagcgactcactgcattcctgcgcgtggccgagagcctgcgcatcaagggcctcaccgaggtcaacgacgacaagccctcgccggcagcagcagctgcaggagcgggtgcgacgggctctgagagcacagccactacaccccagctgcagcgcatccaaccgtatttggtgccccagcggaatcgctcgcaggccggcggtctgctggccagtgccgccaatgccggaaatacacccaccctgccggtgcagccatcgctgctcagctcggccctgatgcccaagcgaaagaggggcagaccccggaagctatctggcagctcgaatggcacggggaacgactacgacgactttgatcgcgagaacatgatgaacgactcctccgacctgggcaacggcaaaatgtgcaacgagtcctactccggcaatgacgatggctccgacgacaatcagccgaacgcaggacacacggatgatctaaatgtaagtctggttttaaaaatttctaaaaggtggtggcaaaagaagcaccgatgcactgcaactacatttcgaagttcgaagcgttcgctaaaaatatttcgtgtaactaattcattttccataattcccacccgcaggaaagtcgcgattctctgccctcgaaacgatcaaagaactccaaggatcaccgcgtggtgagccatcatgaagacaacagcacttccggtgagtcctctttaccaatacattcccgcatagacagcgcgaagcattacctagttctaagatcatttgcctagtcctaagacaatgcaccatcaaccattattaagtcgactctcatgtgcaccctgcaaagacatataccgaaatccaactgaatccaatacagagccaggctgaagtcacataaccacattcgaccaatctcatctgcgaatatcggaaaagctaaaagggattttacgcatttcaagtagtagaaatctaatagcaaaaactcgcgtcggtttctcccccgcttagtgaaaatgttaatgtaaatgttaaagaaaatgtgcgaaaataatacgaaaattgttaagtgaattcgcaacgctcgaggtatcttccgtccgtcggcaggtgagtgtccccaacaaccagctaatgcagttgatgcccaagaaatgcaaatccaccagctgacgaagagattattgtgaagttgagaatcgggttgagctcacagggattcatggccgacgtgataagaatgatcaagaaacatttagctaaaaaattgtccaaatttaccgcgcctccaaatgtcaagagtagcaagataactccagaaactgaaacaaattcgccacctctcatgaccatcactcacaacgaaatgctgatacctgttgtccatttccgatcatctcctcgaaacaatgcaaaaattaacaaacaacaacaggaatatgatcaactgaaaactgtcaatgaaaacagcaaaaaaaaaaaaaaactttcgaacacgcaacgcgttgaaaatggcttgaaatccctatagcttttccgatccgatttgaaactctttctctcactcgctcgcgccatgtgttttgcctttctctcgcatacatcctgcacacacaaatctacacccatatcacatcatactatactatacttatacgccaaacatttgtaaacttatttatgagtgcagattcatagacattaaaagagatttgcattaccaaatgaatatttaattcatattggtctttacactttacactttgaagtaataagatcaaaaacttgcagatgattgtggcgtataaaagtagtatcggccagtgaaagtatagagttaacctatatttttacaatttttagacggaaacgacagcgatggcgaaggtctggacacatcatatatggaacctcaacttatgctggacgaatatgacgagcccgtagagttcaagtacaacccgctcaccgacaacagctcacccacgcaggaccacacggatggtagtcacctcaacgagcaggcgcgccaacaagccttcctcatcgctgcccagagaaaacaccaggtggaaacagcagcagcggcggcggccagcggaatcaaacttaacattatcggaatggcggctggtggagcgcaggtgaaaagcatggtcagcatacccaaactaacgcccattggcaaggtcaacgccgcctccacgccattggtctcgcctgccggctccttttccacagccacggtcaagccgcgcgtccagaagcggcccaaactgggcaaacagaacggcgatgtaaaaccggctgtgtttagcagccaggaatacctcgacatttacaacagcaacgatggattcaagttgaaggctgctggtctgagcggaagcacgccgaacctgagtgctggattaggaactccctctgtcaaaaccaagctgaatcttagcagcaacgttggcgagggcgaggcggagggctcagtgagggactactgcaccaaagagggcgagcatacgtaccgatgcaaagtctgctcccgcgtctacacgcacattagtaacttctgccgtcactatgttacctcccacaagcgaaatgtgaaagtgtacccctgtcccttctgcttcaaagagtttacgcgcaaggacaatatgacggcgcacgtgaaaatcatccacaagatcgaaaatccctcgacggcgttggccacagtcgcggcagcgaatctagcaggccagccactgggagtttcgggagcctcgacgcctccgccgccggatctgagtggtcagaactcaaatcagtcgctgccagccaccagcaatgcgctatccacctcctcctcgtcgtcgacgtcctcgtccagcggatccctgggtccgttgacgacctccgcaccgccagcaccagcagctgcggcgcagtaatctctgggcacctcacaccaagcccaaaaaagcacacactcaaagaaatagtgaggttgaggcactcgcgaacgattggaggaagcatgttgcagcgccaggcgctcttcgggatttagttgttgttggggaggggagttaaagtaaactttttgttgattttgtttttagttttttacttggcttcgatggagctgcagaaatctccaagccagcagacgtttttatgttgtgcaatttaccttttcagttacaattacacttattttctaaaccccctttcaaagacccgatcagaacggaaagctaatctaatcctagcaactacccttaagatttacgattattatttatccccgatcgccgacaacgtgtcgatcgttttttattagcgcgtagtcaaagaccgaaaatcaagtagttgctttggctgacactttacaaacccatccactaggggttgcctttttattggacaccagagcggccttatatgcgaagtgtatccgggcaagagttacactaaaaaccgaaactaaacctgcacttttagataattaaactatatatacacgcggatatgttatacataatgatataaataatatatataaacattgaatggtatgtctagctgtagttctattaattaatttatcaatatcactatgttcgatatgctaatgttaattctataaaattattacaagccgaaatctgaaaacagaagcaggataatcaatgtaatgttaatcttgcgagagggagcgcagatctaccttgttgccttcaaatgaagctagttaaaagttaatcccgggtctgggtcaaggtcgttgggcacccagcaccacacccagaatacccagcacgtccacaccctcaaaaaccaacccggtcaccggtcacccacaccgttccccgtaacatccgagacccggcgaaagattgaaaatgtttcgtcgggatcgttgataaagtgtaactacagatagtaacagcaaccatagttgtaatgatataacgctaatattaatgagcataaagtaaacctaatttatctatcaaacgatttatgttgtatatcggaggcttaaattatcgccaaagaaaatgaaaatcaaaaacaaaaacaaaagcaaaagcaaaacaaaatgcagttgaaatccaacagtaacaacagagcagtcgcagcagaccacaaaatattgttgttaatgcgaaacgatctccaaacaaaataaagaacttgaaaagtagacaacaagtaattcctcagtcaagtaaaacgttcaaatttgttgcaattcgagaactaagagaaaactacgaaaaagattcagaaaattacaactgcaaaaaacgtacagaaaaccaattgaaacaaaattaagcgcaatcaaataataaacaagctgcgtacgctaacttattaaataattttgtttttaattctttatttagtggtagctagtgcaatttagttagtaagccgccgtctcccaaacaccgactaaccaatatcgcaaatatatatttccacccaatcgaaccaatcttccaaacatctcttttggcgttaattttaaacaatcaatcaaacaggtcatgcatatttatttgtatgtgtttgtttgtactatattttactttatttttagtctacttttttatatgaatacatttacatatatttttgcattcaacaactataaaccttcagcaattttctcgctttcaaacaaaaatgtccaaactcgaaacctgaacgaggaatatagctacatatatagagtcatgctttgatgcccaaagaaaatgaaagataagaatcgtaatgcaaggcaaacttccatgtgaaaatgagaaaattgtctggaaattgttggtaacatggtttccgtttaaattagctaattacgaaacacactttacgatatatcatacgatacgttaaacataattactaaatagtgaatcacacgcaatattaatcaagcagatcctttatattatcgtttaaaactgaccaacagaagaaaaataaaatacacaatgcaaaaaacactcaaaacaaaatcagttctgaaacacaaaattgattgttttaattcatttgtttgggattgggcaaattccagtcaaggagctgctttcctatttaaactgtctttaatgggtccggaaatataattcatattttaaatatctttgattacagttactcctactaaggccactccagagctctcccagcggctcttcggctcctcttcgacgacaatctcagcaacggctccaggcggcagcagcactggtccttcggaaacgatttccctgctggagatcagcgatgaaagggagtccgccccggttcacctgcctactattttgggcctgaagatacgcgccattaacactacgacgcctgcgcagcaaggatccccccagacgcctacgaaatccaagccgaagatacggcaggcgacaggaagcaataacagcaactctctgctcaagcaacagctgcgaggtggagccaaggatcctgaggtgccgcctgccaccaggatcacgggggcagtgacccccaatgctgcccttaatgccgaggaacagtccaaggagatgccgaagaaaaaccaggacgaggtcaacgcctgcattggtctgcactcgctggcaaatgccgccgag

SEQ ID NO: 24212 - DNA, 4102 bp, DROSOPHILA
tcaagcaagacggacgaaatattgccgacgacgcgccgctgccagaaagagagtttcttccgctcacgcgcgcccccctctctacatatacatatgtttcttgctctcgcgctgagttgtgaaaatttccacaagttaaaattaaatgaaaaaagtgcaaaggaagcaggcgaaatagcgaatagtaatttcggtttaacaactgcgggcagtgcactagtaaccctttaaatgtgatgaaagagtggagaaactattggtgtttccaacgaataagtttaaacttctaatacaaactgaataagcacgccctggaatatatgttttagcagctgtcaggccccaaggagtaagaatccgaacccaggacaacgaaaggacctttgatgccccacttgcatgaggacatagatcgcgatcgcacacactcggacatcgcttagtgacgcaaccacagcctcccaatgaagatggcatctcaacgcttctgcctgcggtggaacaaccaccagagcaaccttctgtccgtcttcgaccagctgttgcacgcagaaaccttcacagatgtgacgctggccgtcgaggggcaacacctgaaggcacacaaggtgagtggaatggtgctatccgcctgcagtccctactttaataccctctttgtaagtcatccggaaaagcatccgattgtcatacttaaggatgtgccctactcggacatgaagtcgttgctagactttatgtacaggggcgaggtctcagtggaccaggagcgactcactgcattcctgcgcgtggccgagagcctgcgcatcaagggcctcaccgaggtcaacgacgacaagccctcgccggcagcagcagctgcaggagcgggtgcgacgggctctgagagcacagccactacaccccagctgcagcgcatccaaccgtatttggtgccccagcggaatcgctcgcaggccggcggtctgctggccagtgccgccaatgccggaaatacacccaccctgccggtgcagccatcgctgctcagctcggccctgatgcccaagcgaaagaggggcagaccccggaagctatctggcagctcgaatggcacggggaacgactacgacgactttgatcgcgagaacatgatgaacgactcctccgacctgggcaacggcaaaatgtgcaacgagtcctactccggcaatgacgatggctccgacgacaatcagccgaacgcaggacacacggatgatctaaatgaaagtcgcgattctctgccctcgaaacgatcaaagaactccaaggatcaccgcgtggtgagccatcatgaagacaacagcacttccgacggaaacgacagcgatggcgaaggtctggacacatcatatatggaacctcaacttatgctggacgaatatgacgagcccgtagagttcaagtacaacccgctcaccgacaacagctcacccacgcaggaccacacggatggtagtcacctcaacgagcaggcgcgccaacaagccttcctcatcgctgcccagagaaaacaccaggtggaaacagcagcagcggcggcggccagcggaatcaaacttaacattatcggaatggcggctggtggagcgcaggtgaaaagcatggtcagcatacccaaactaacgcccattggcaaggtcaacgccgcctccacgccattggtctcgcctgccggctccttttccacagccacggtcaagccgcgcgtccagaagcggcccaaactgggcaaacagaacggcgatgtaaaaccggctgtgtttagcagccaggaatacctcgacatttacaacagcaacgatggattcaagttgaaggctgctggtctgagcggaagcacgccgaacctgagtgctggattaggaactccctctgtcaaaaccaagctgaatcttagcagcaacgttggcgagggcgaggcggagggctcagtgagggactactgcaccaaagagggcgagcatacgtaccgatgcaaagtctgctcccgcgtctacacgcacattagtaacttctgccgtcactatgttacctcccacaagcgaaatgtgaaagtgtacccctgtcccttctgcttcaaagagtttacgcgcaaggacaatatgacggcgcacgtgaaaatcatccacaagatcgaaaatccctcgacggcgttggccacagtcgcggcagcgaatctagcaggccagccactgggagtttcgggagcctcgacgcctccgccgccggatctgagtggtcagaactcaaatcagtcgctgccagccaccagcaatgcgctatccacctcctcctcgtcgtcgacgtcctcgtccagcggatccctgggtccgttgacgacctccgcaccgccagcaccagcagctgcggcgcagtaatctctgggcacctcacaccaagcccaaaaaagcacacactcaaagaaatagtgaggttgaggcactcgcgaacgattggaggaagcatgttgcagcgccaggcgctcttcgggatttagttgttgttggggaggggagttaaagtaaactttttgttgattttgtttttagttttttacttggcttcgatggagctgcagaaatctccaagccagcagacgtttttatgttgtgcaatttaccttttcagttacaattacacttattttctaaaccccctttcaaagacccgatcagaacggaaagctaatctaatcctagcaactacccttaagatttacgattattatttatccccgatcgccgacaacgtgtcgatcgttttttattagcgcgtagtcaaagaccgaaaatcaagtagttgctttggctgacactttacaaacccatccactaggggttgcctttttattggacaccagagcggccttatatgcgaagtgtatccgggcaagagttacactaaaaaccgaaactaaacctgcacttttagataattaaactatatatacacgcggatatgttatacataatgatataaataatatatataaacattgaatggtatgtctagctgtagttctattaattaatttatcaatatcactatgttcgatatgctaatgttaattctataaaattattacaagccgaaatctgaaaacagaagcaggataatcaatgtaatgttaatcttgcgagagggagcgcagatctaccttgttgccttcaaatgaagctagttaaaagttaatcccgggtctgggtcaaggtcgttgggcacccagcaccacacccagaatacccagcacgtccacaccctcaaaaaccaacccggtcaccggtcacccacaccgttccccgtaacatccgagacccggcgaaagattgaaaatgtttcgtcgggatcgttgataaagtgtaactacagatagtaacagcaaccatagttgtaatgatataacgctaatattaatgagcataaagtaaacctaatttatctatcaaacgatttatgttgtatatcggaggcttaaattatcgccaaagaaaatgaaaatcaaaaacaaaaacaaaagcaaaagcaaaacaaaatgcagttgaaatccaacagtaacaacagagcagtcgcagcagaccacaaaatattgttgttaatgcgaaacgatctccaaacaaaataaagaacttgaaaagtagacaacaagtaattcctcagtcaagtaaaacgttcaaatttgttgcaattcgagaactaagagaaaactacgaaaaagattcagaaaattacaactgcaaaaaacgtacagaaaaccaattgaaacaaaattaagcgcaatcaaataataaacaagctgcgtacgctaacttattaaataattttgtttttaattctttatttagtggtagctagtgcaatttagttagtaagccgccgtctcccaaacaccgactaaccaatatcgcaaatatatatttccacccaatcgaaccaatcttccaaacatctcttttggcgttaattttaaacaatcaatcaaacaggtcatgcatatttatttgtatgtgtttgtttgtactatattttactttatttttagtctacttttttatatgaatacatttacatatatttt

SEQ ID NO: 24213 - protein, 644 aa, DROSOPHILA
MASQRFCLRWNNHQSNLLSVFDQLLHAETFTDVTLAVEGQHLKAHKVSGMVLSACSPYFNTLFVSHPEKHPIVILKDVPYSDMKSLLDFMYRGEVSVDQERLTAFLRVAESLRIKGLTEVNDDKPSPAAAAAGAGATGSESTATTPQLQRIQPYLVPQRNRSQAGGLLASAANAGNTPTLPVQPSLLSSALMPKRKRGRPRKLSGSSNGTGNDYDDFDRENMMNDSSDLGNGKMCNESYSGNDDGSDDNQPNAGHTDDLNESRDSLPSKRSKNSKDHRVVSHHEDNSTSDGNDSDGEGLDTSYMEPQLMLDEYDEPVEFKYNPLTDNSSPTQDHTDGSHLNEQARQQAFLIAAQRKHQVETAAAAAASGIKLNIIGMAAGGAQVKSMVSIPKLTPIGKVNAASTPLVSPAGSFSTATVKPRVQKRPKLGKQNGDVKPAVFSSQEYLDIYNSNDGFKLKAAGLSGSTPNLSAGLGTPSVKTKLNLSSNVGEGEAEGSVRDYCTKEGEHTYRCKVCSRVYTHISNFCRHYVTSHKRNVKVYPCPFCFKEFTRKDNMTAHVKIIHKIENPSTALATVAAANLAGQPLGVSGASTPPPPDLSGQNSNQSLPATSNALSTSSSSSTSSSSGSLGPLTTSAPPAPAAAAQ

SEQ ID NO: 24214 - DNA, 6045 bp, DROSOPHILA
aggacatgggttaatgtcactcaagtggctcgatcgggcgaaactttgagtgcctggagtgcggctccctgtttatttgcttactcggagaaaaccttgtgccgcagaggcaaatgttgatagagcactaaccgaatttgtaatttaattattatgttaaggaacctgcaagggcatttaagccaacgcccagcccatacgccccaaaaaaaaagaaggaaaaacgaactcaacccacacacgaactgggcgagtaagcgcacatggccacacaatcagatatatgtacatatatatatatgtatatgtatgttctcatatatgctccacgtacacgggaagtcaataaacccggcgtgaaggcaactcgcacccacagtttctcgaaaacgaagccgaatcataacatgccaatggaaacaatcaggaactatgcaaatgagccagctaagagtttttgtttttgccaattactatagcaattatgatttcaattaagtccaaaagattacactcttaagtcacctggttaggtgtcgaaaggtatgctacatcacagttgtaggaagtttttgattaattggtttagactttaaacaaaattagagcttgttgaacattttattatttccgtattcaatttgcttgtttaaaaaaaagtacatttatcatttgtggctccattcaagcatggctttggcgctggcaaacccaatttcggactccacagactccgccgctttatgagtaatgggtgaaatgagccgagcactcgggacctaacagcacggacgagttaattaactttgaacctgaaatttttggccgagtggctgggcaacatggaaaccgcattaggcgacccacaactaacgatgctcattaggattaggtgcccactcgttcccagaccaaccattttcgacgccttttacgaattttcatagaagcagtcgcttaaataattccacaccttgctcttgaaaatcataaaaaccaaatgcatcacagttacatcacaaatgtattgtcctttgaaattagaattcgtattaagtaggagcttgattctaccatttcacttaaaaggaattatccttgaacctttaggcatacttttgcaattaatattcaatgtaaccatttatttcccttgcagattaaaagctggctggagcagttccaagaccagtgagccgctgcgtcccgaggagcaggaggccatcatctcggtgatccggcgcaacgaggagattgaggtggccgagcggcaacgggttggccgcctggtggagcgcgtcgagaagatcaagcagcatgccgtggagcggggacccaattgctgtcgcctgtgcggcgacaccttcggtatcctgcggccgcagcgcatcctgtgcgaggactgccgccagtcggtgtgcaccaagtgcagcgtggacattaacatccgctaccacaccagcgagcggtcccgcgaaatctggctgtgtcgcatctgctccgagacgcgcgagatgtggaagaagtccggagcgtggttcttcaagggtctgcccaagtacgatatgccgcgcagcgccagtgccacgcccattcccaacccgggacccggatccatggcaggtgggtggctccaattctgggagggggttttccctgcgaatgtggagcgaaagataacgggcactgccagttgttgagacgtgctaggaatttaaaccctttgtaaccattcctcaaagttaagctggaatctcaccgaaaccttcagatatgcagggataataacattagtttgccaaatagaatcatgcaaatgactcagatattaaatgccgcatgaatactacatttaaagtcactcgcacagcttggtttcatttttacaccactgtgctttttttttttagtaaattgaaggaaatgtttttttaactacctactttttatgttgtccgcagtcaaggtgaaacaattaattggatacagtcagagagcggttttcaaggccagttgaagtatatgcatacaacacacatacatatatgcaacagtttttattacccattttatattttaatccctcgaatggcataatccctcgaagggattttgattaagaccaatatttccgaatgaaactttaagccgaaaagcatatgtacataggtgcagcataaattatttaaatttctttaaacacatatgtatgaaacaaaaaaaaaaaaacacaaatgttcttgaatgccaaacaagtgaaatattgaattttgaacacccacggaacccacaaatggctttaaaaaacagctaaacaattgttttcgaatttcgtttcaggaacatcatgaaacgtttccatttccatagtccaattcccaataaatcgttatagacgcttctttatggtaaccataatcagagcttcagccggatgggttaatataaagagccaataagtgtagttcgttcagagtcattaaccaatttaaattctactccaaatcggtgcgccataaatgacaatgaaattaataaagacacaagaattcttctcgagttccactgatgtttctccaattccagctcaaattcatcagtcgtcgatagatataatcttttattcagagcaacaccactaattaccttcgagttatcaacgactatcgctattatcatcgtccgcccatcgcaataatcggtcttctatctagtctatcgcttatcgaaaagatcgcagtctgtcaatcggaatctgatagccacagtctgtcaggcggtttccctaatgtttgatgatcagttttaggtgcatttcgattgctatcgataccgatacagcgcagtcataatcggcaatcaaatcaccgtacgactatcgctattatcgcacgaaacagagtatcggaattgcacatcggcctattgtaaaggtattgcctcattcaaatccaaattcaaaacgagttagagcacttgtgttatcgagaaaatcgacaagccatcgattgacgtctattcgctaatcgctcattttgtatctgttatcgcaggcgacacgcgggccgttcaaagctgtcatgcgacgccaacacgaccggcgcgggtgaagaagctaacgatccgggtgaacgacagcagctccagcagcagcgggcactcggagccggaggatgaggtggacaccggagtaggaataggcgtcggcgttgtcggtggtggcatggccaagggcattgcttccactcgtttgcaacgggaggatagcttccggctgagggcatacggctccatacgcagctttatcgacggcggcgagcggaagttgtccaactccttcttcttcaaccgccagcaaagtcaacggccatcggagtgcccggaatacgacagcgtcagcatgtcgaagctgaggcgggagagcagcttcctgcggcgcggctccgtcagctcctcctggtcgattagcgatagttccggctccggatcgaacaactccggcaactcacaaacgcagtcgcagtaccagcagcaccagcaacagctacagcagcactgtcgcgatcccctgctcggctggctggagattgccattagctatcgtgaggccttccacagcctcgactgcaccatggtgcgtgcgcgggatctgcccgccatggatgcggccggattggcggacccgtactgcaagctcaacatcattacgccggaggcgcacaccaagtacacgcgatggcagcgcacaaagacggtgcacaagacccgcaatccggagttcaacgaaacgctgcagttcgtcggcgtggagcccgaggagctgggtaactcgctgatttacgtggcccttttcgacgacgacaagtacggccacgactttctcggcgcggccaaggtctgcctttccacggtgagtttacctgcactgcagaaaaagaaatactgtatatatttttacaattttaaacttacctaattttagagccctgaaaagctaattaagcaatttctatattaagcataatcctttgagcttaatctgcatataaattgaaagcgcaattctagcacatactagttttttttttccgtgtacaactcgacatccgttaggaagcgtaattgcttataaggccttccggcaaattctgctaaccaagtgaatttatgcacaaacgttttggcacaaaggaagtcggttaatttagtaaagctaagtagattctacagttggctgcttttcgttggctttcaacttttttggctaaagcaactactaattggatttcaaaatatttaaactagcaactaaagacgcaagtctttaatgctgaaaaagggggttatgtaaatggccgttttaaaagggtttaaccatttggtaaatatctagacacgattaaatgtttttgggagacccttttaatatttgtagttcctaatattaaatgcgattcctttccaggtgcacagcacgtcgcagtaccggatttcggtgccactcggcgtggaggaccagtacagcaacgcggcggagatggcccagaactggcccaatggcaagatgcttctctcgctctgctacaacaccaagcgaagggcgttggtggtgaatgtgaaacagtgcatcaacctgatggccatggacaacaacggcagctccgatcccttcgtcaagatgtgagttctgggcaattccaggcaattcccttatgattacagagattaccttatccaatagccaactcaagccggatgcgcacaagaacaagaagcacaagaccagcgtcaaatggcgcacgctcaatcccatctacaacgaggagttctacttcgaggcaagtccgcacgacctcaacaaggagatgctcatcctgaccgtgtgggacaaggatctcggcaagagcaacgacttcctgggcagcctgcaattgggcgcccaaagcaaaggcgaacgcctgcagcagtggctcgactgcatccgattgcccgatcacttccacgagaaatggcattgcctcgcccccgacaatcccgcccactgagtagccccatccgatcccaacgccaaccgatccccagtccaatcgattcgatcttatctctaccgatatggatgtttttcctgtaggacacatttgaacgaactgatttctcagcgcagtcaaggaaatatgaaccatatcttttacgttaagtagttcaggaacatattaatgctaatgcttttttcatttctataacttttttaactttaaacagttaataattgaatactttgtaattttaaagatataaactgcatgctttgctagatcgaatcaacactaattggtagctcaaaggacgatttgcattagactaagctgagaaatcaggtcgtggaaatgaggctttagctccaaatatacacatatatatatatacttacatatacatacatatatattatatacatatatttttgataagcctgaatgggtgtgagcaagcaagaagaagctaaaaagagcgagaaatattgtgtgtttttgagtgaatgctttccaaaaatctcgtacgtaaccccaattttctatgtctatactttggctcttatcggcatttttgtacactgtatatagcttgtttaagtgtccttaccaagggttaaccaacatcaaaatcttttcgattcattgctaaattcaatctttaatcaaacgtatacttatgtacttcaatatatcgaaatatatacatctatattctcaaaagataactaaacatctgatttattttattaaatgctccctgaactgtatactatcctattgaccagagctttttgttcctttagcaaagcttttggcgaaaaacaaacttgcgcataccaaatcggccaacagccagaatcccagtgtccacaattgataacaacgaccgaaaacatattacattattgggcgagctgataaggtctatacccctttcatagagtgcagataaggttgacctccgaggtattaaattaaaagccgcttggagatacttttcagttagttt

SEQ ID NO: 24215 - DNA, 1896 bp, DROSOPHILA
atgcatcacagttacatcacaaatgtattgtcctttgaaattagaattcgtattaaattaaaagctggctggagcagttccaagaccagtgagccgctgcgtcccgaggagcaggaggccatcatctcggtgatccggcgcaacgaggagattgaggtggccgagcggcaacgggttggccgcctggtggagcgcgtcgagaagatcaagcagcatgccgtggagcggggacccaattgctgtcgcctgtgcggcgacaccttcggtatcctgcggccgcagcgcatcctgtgcgaggactgccgccagtcggtgtgcaccaagtgcagcgtggacattaacatccgctaccacaccagcgagcggtcccgcgaaatctggctgtgtcgcatctgctccgagacgcgcgagatgtggaagaagtccggagcgtggttcttcaagggtctgcccaagtacgatatgccgcgcagcgccagtgccacgcccattcccaacccgggacccggatccatggcaggcgacacgcgggccgttcaaagctgtcatgcgacgccaacacgaccggcgcgggtgaagaagctaacgatccgggtgaacgacagcagctccagcagcagcgggcactcggagccggaggatgaggtggacaccggagtaggaataggcgtcggcgttgtcggtggtggcatggccaagggcattgcttccactcgtttgcaacgggaggatagcttccggctgagggcatacggctccatacgcagctttatcgacggcggcgagcggaagttgtccaactccttcttcttcaaccgccagcaaagtcaacggccatcggagtgcccggaatacgacagcgtcagcatgtcgaagctgaggcgggagagcagcttcctgcggcgcggctccgtcagctcctcctggtcgattagcgatagttccggctccggatcgaacaactccggcaactcacaaacgcagtcgcagtaccagcagcaccagcaacagctacagcagcactgtcgcgatcccctgctcggctggctggagattgccattagctatcgtgaggccttccacagcctcgactgcaccatggtgcgtgcgcgggatctgcccgccatggatgcggccggattggcggacccgtactgcaagctcaacatcattacgccggaggcgcacaccaagtacacgcgatggcagcgcacaaagacggtgcacaagacccgcaatccggagttcaacgaaacgctgcagttcgtcggcgtggagcccgaggagctgggtaactcgctgatttacgtggcccttttcgacgacgacaagtacggccacgactttctcggcgcggccaaggtctgcctttccacggtgcacagcacgtcgcagtaccggatttcggtgccactcggcgtggaggaccagtacagcaacgcggcggagatggcccagaactggcccaatggcaagatgcttctctcgctctgctacaacaccaagcgaagggcgttggtggtgaatgtgaaacagtgcatcaacctgatggccatggacaacaacggcagctccgatcccttcgtcaagatccaactcaagccggatgcgcacaagaacaagaagcacaagaccagcgtcaaatggcgcacgctcaatcccatctacaacgaggagttctacttcgaggcaagtccgcacgacctcaacaaggagatgctcatcctgaccgtgtgggacaaggatctcggcaagagcaacgacttcctgggcagcctgcaattgggcgcccaaagcaaaggcgaacgcctgcagcagtggctcgactgcatccgattgcccgatcacttccacgagaaatggcattgcctcgcccccgacaatcccgcccactga

SEQ ID NO: 24216 - protein, 631 aa, DROSOPHILA
MHHSYITNVLSFEIRIRIKLKAGWSSSKTSEPLRPEEQEAIISVIRRNEEIEVAERQRVGRLVERVEKIKQHAVERGPNCCRLCGDTFGILRPQRILCEDCRQSVCTKCSVDINIRYHTSERSREIWLCRICSETREMWKKSGAWFFKGLPKYDMPRSASATPIPNPGPGSMAGDTRAVQSCHATPTRPARVKKLTIRVNDSSSSSSGHSEPEDEVDTGVGIGVGVVGGGMAKGIASTRLQREDSFRLRAYGSIRSFIDGGERKLSNSFFFNRQQSQRPSECPEYDSVSMSKLRRESSFLRRGSVSSSWSISDSSGSGSNNSGNSQTQSQYQQHQQQLQQHCRDPLLGWLEIAISYREAFHSLDCTMVRARDLPAMDAAGLADPYCKLNIITPEAHTKYTRWQRTKTVHKTRNPEFNETLQFVGVEPEELGNSLIYVALFDDDKYGHDFLGAAKVCLSTVHSTSQYRISVPLGVEDQYSNAAEMAQNWPNGKMLLSLCYNTKRRALVVNVKQCINLMAMDNNGSSDPFVKIQLKPDAHKNKKHKTSVKWRTLNPIYNEEFYFEASPHDLNKEMLILTVWDKDLGKSNDFLGSLQLGAQSKGERLQQWLDCIRLPDHFHEKWHCLAPDNPAH

SEQ ID NO: 24217 - DNA, 3969 bp, DROSOPHILA
ctccgaaacaggatcgccatctgaccaatgttaagcccgctgtaacgcgaagcagcagcaatggtgagatgaacgtgctcctccaacgggccaaagatgccctcggcctgagaacaccaaacccacttctggatagcagcagcagcagttccagtatggagctgccctccatgggtgccggcagatcgcccagtacaaagttccagcaatccatggccaggatgcagatgctctttggcggcgcagaggccgtaaaacctacaatgcccgccaaaacaggaagacctgtgagtgcacccaccgcagcatcggaaccggggttgtgtgcacatttggtgctcccgaaacgcccccacacggctcccactcttcacacaatcaacgaaaatgaaccagctgttcatcatttggatgtctccacttccagttcttcgcaaagcactttgcccgggagatcgtcgggcgaagctttcgaggatttggtcatgagcgccgtggcggatggagcccggcggcggaatgcggaatctagcacggaggtttcgtacagccaggcgttctggaaacgcataaacctgtaaaaaaaatctagaataggtgcttaatatgttcaaactgattaagtatatatctatttaggttccaaaactctctttatagagcaacaaaatagtaataatacaattaataaaactcattgttttttggccaaaattgtgcgcatttattaatttttaaagacctatttcgaattttactactcttttttcacttgtgtatgtatacttttgatagattttgtgggcctgattgtgcgcttagtttatcaattttttaagacctgctgggaccatctattatatatattgtatataatcattaaatagtttatttttgcaatagacatatacttattcttttgtcaccttacttccgaaaaaaaatgctagctcttcgtttctttggcattattgattacgagtatgtggttgcgggtatcttagacggcggtgccattgatgagatcgtagggatccctcacctgacccattccaaatagactggcatgggatcgccgtcgctcccgctcgatctcgtccaggtcgaatgcatcgctcacaaaactggacctacgctgttgatcgtcgaatgcgtagccgcgctggaatttcggtggtccggagaccgaagccgttgtcccaggtgctccacttccggatgttggagctgggtaaatgggctgcggatgctgttgatagccattcgagtagttcgacggcgaggagggaatcgccgtgggccactgcacttgactcttgggcgccaccacctggggcagtgtcaacgtggaggacacgaagcgattctgctgctgattcagcatcagctgggagaaacgctgctgactggagcccaatggatagccctgggaagccagcgaatcggacgactgtcgcagaaagcagcgcggcaaggtgcgactctggccgagatcagccggctgtggcagggacattcgcatgcccggatagccacccgttccggggaagctgagatccgtgtgcagggacagattcgagttcagtctgcgcagcggctgtcccatggagtccacgcacatggacgtgcgacgcggcaccaccaattgggcatggtctggaaagaaagtatacttttctattaaacagaagttttaataatcgtaatgaaatgatactcgaatgaaaacaatctattgtaacaatcaaaaactgcccagaataaaacctcacctcccaccacatagagatgttcctcctccatgcggttgaactgcctgaaaccgtggtcatcgccatccgcgtcatcgtcgtcatcgcgatgcggatcatccggaacttcctcccgcttggcctgatcctcctgctcctcctcctccgcctcatccccgccactgatgtagtagatgttctttggcttgctgcgcataccagctcgccgacagaactcctggaatagctcatccttggtcttccggaggccacgcttcaggccacaaagacgcgactgatctgccatctgcgagttggaggatgggggattgttggagatcttcgtgttcgtattagtggccatgttccgctgctgctttcgtttcatttgagcggagggcggagctggagccgaagatgaagctggatatatttccgtggccgtagatacggatcgggtgagtggaaattcctgaggcaagtcggcgaacagggcgggggcaggtaatgggtcggcagcggaagggagaaggggtgcgggaacatgggtggaggacacggacgtatccgtgcaaagctcattcaacgacttggcgaagctgcgcgagtgcagattacacttggacacagctggcttttcgaagtaaaaactaaaacgaaaaggttaaatacaatagcttatgaatggcattcatcaatatacatacatacatatacatatgtatttattatacattaaaaaagaaaagaacgtctcttcttgtctatctatcttatggtacctattaaatacctagtcgaagagaggaagatagtcaaagcaaaaaagcgattttttgtagcaagcataaatcgaatgatttagcatgtacatagaaggcggctctttcatactgacggacagacggatggacacatggacgaacatcgacaccatgtggcattcatgtgcaatcaaaaaaatagtagcttttgaattcattttagctaagtaacgggtatctggtagtcgaggcaaccgactatcgagttatctcttattttcatcataacttaacagtaattgtccaaattaaaattcgctaaacacctaattgcttaccgcctctccaggtcattatgcagatagagatttaagttcgatccggcattcggatgcttgcgacatgctcctggtagtgtttgcgtctgtccggaatggccaatctgtccggtcattccagggtgtcctcgtcccgcatcgtagacctgatggagtcgggaattgccactcctcaggattccatgtggtggctgcgccgtcggatgcggttggtgcgtcgggtggtgactctggtgaccctgttgaccttgacccgcgctactaagtccttcctggctggctgtggtgatgccgggctgcttgtaccgcttgtaggaatcactcaacggatgctggccctcctttaacttggcgtggatgtttgccacactaaaacagggcaagcgctggagggaaatgtacgtatggaaataaagtatgtgaagaacacagagagcgcagcagaagatgcagctaatcccgaaggacgcatccggcgacgcttgcatttaagttggtacgtttctgcagtcaagcgcgagaattacgaatcacgaggtgggctattcctaaggggattgtaccaccgggtgcaccaccaacacaaatgcgacgactgtcacagatgcaactttaaagtaatgccatcgaaaagttgttcaacaattgcttttaacaacaaaagtcataatataaaatgaagttaaaataataatggcaatatatccaagcgttatgaattgtttaagactagctcagttactcacactgtagtagctaacctcctgcaaattgatgaagaggaatatattcaagaccccaacgaattccgtgacaatgaatccaaagacgaagaggaagaagctctggccataggagaccttgatgagggctggctgaagggtggaccggggtcttaacttcgatccgatttccgccttcagtattgatatataggcaatcaatccaatcagcatcactagacctacaggatgattacgcaatttcggtgtcattattatgcttagaccctttcaaatttttcaaaactcaccactaacaatgaaaagaattcccgcgctaaaataatacagattgttttgatgcgagcaagtggggattagaaaaactatgaag

SEQ ID NO: 24218 - DNA, 1401 bp, DROSOPHILA
atgaccggacagattggccattccggacagacgcaaacactaccaggagcatgtcgcaagcatccgaatgccggatcgaacttaaatctctatctgcataatgacctggagaggcgtttttacttcgaaaagccagctgtgtccaagtgtaatctgcactcgcgcagcttcgccaagtcgttgaatgagctttgcacggatacgtccgtgtcctccacccatgttcccgcaccccttctcccttccgctgccgacccattacctgcccccgccctgttcgccgacttgcctcaggaatttccactcacccgatccgtatctacggccacggaaatatatccagcttcatcttcggctccagctccgccctccgctcaaatgaaacgaaagcagcagcggaacatggccactaatacgaacacgaagatctccaacaatcccccatcctccaactcgcagatggcagatcagtcgcgtctttgtggcctgaagcgtggcctccggaagaccaaggatgagctattccaggagttctgtcggcgagctggtatgcgcagcaagccaaagaacatctactacatcagtggcggggatgaggcggaggaggaggagcaggaggatcaggccaagcgggaggaagttccggatgatccgcatcgcgatgacgacgatgacgcggatggcgatgaccacggtttcaggcagttcaaccgcatggaggaggaacatctctatgtggtgggagaccatgcccaattggtggtgccgcgtcgcacgtccatgtgcgtggactccatgggacagccgctgcgcagactgaactcgaatctgtccctgcacacggatctcagcttccccggaacgggtggctatccgggcatgcgaatgtccctgccacagccggctgatctcggccagagtcgcaccttgccgcgctgctttctgcgacagtcgtccgattcgctggcttcccagggctatccattgggctccagtcagcagcgtttctcccagctgatgctgaatcagcagcagaatcgcttcgtgtcctccacgttgacactgccccaggtggtggcgcccaagagtcaagtgcagtggcccacggcgattccctcctcgccgtcgaactactcgaatggctatcaacagcatccgcagcccatttacccagctccaacatccggaagtggagcacctgggacaacggcttcggtctccggaccaccgaaattccagcgcggctacgcattcgacgatcaacagcgtaggtccagttttgtgagcgatgcattcgacctggacgagatcgagcgggagcgacggcgatcccatgccagtctatttggaatgggtcaggtgagggatccctacgatctcatcaatggcaccgccgtctaa

SEQ ID NO: 24219 - protein, 466 aa, DROSOPHILA
MTGQIGHSGQTQTLPGACRKHPNAGSNLNLYLHNDLERRFYFEKPAVSKCNLHSRSFAKSLNELCTDTSVSSTHVPAPLLPSAADPLPAPALFADLPQEFPLTRSVSTATEIYPASSSAPAPPSAQMKRKQQRNMATNTNTKISNNPPSSNSQMADQSRLCGLKRGLRKTKDELFQEFCRRAGMRSKPKNIYYISGGDEAEEEEQEDQAKREEVPDDPHRDDDDDADGDDHGFRQFNRMEEEHLYVVGDHAQLVVPRRTSMCVDSMGQPLRRLNSNLSLHTDLSFPGTGGYPGMRMSLPQPADLGQSRTLPRCFLRQSSDSLASQGYPLGSSQQRFSQLMLNQQQNRFVSSTLTLPQVVAPKSQVQWPTAIPSSPSNYSNGYQQHPQPIYPAPTSGSGAPGTTASVSGPPKFQRGYAFDDQQRRSSFVSDAFDLDEIERERRRSHASLFGMGQVRDPYDLINGTAV

SEQ ID NO: 24220 - DNA, 2962 bp, DROSOPHILA
cgtcagcagtagccgcagtatataactacaatcgcagaaaaacagcagcagcagcccatcctcaacatcagcgaccaatgcaacatcatggtgcaataagatcagcaaatgttgcagcaaattttgctaaatgagccgccgcgttttttcggtttgtttgctttttgtttagtttcgtagggcagagaatcaattgtacaactcataccacaacaaaactaacatcctcaaaatttcaatcaaattcaaaaacaaacaaaaaattgtataaaatttccatcaagcctggccgtcgtcaaaaaattgcataattgtggaatttttattgtatgaaccaacaaaccaaacacgaaaacataaataaatttcaattacactgcaatttagatggcgccggtatacaatttactttaatgattattaccattttttatttatttattcttgaaagcattgttacccgttgtgcgttaagcaaacccataactctaagttactcgatttaaagatcattaaaaacgtaaacctataccaataaccacaccaccactttgtcccatttatgcatcatccgaaatcgagaaccatagccatcgggcgaaaagaaatgaaagcaaagcagagcaaacaaacagaagaacgaaatcatgtaaatcacagcaaacaaacatacaaaaaaaaactgtaaaagatgcaaaaatatacaacaaacgcaagatggcaacaaaggaaagtaaaaaaaaaaactttaaaaacgtattggaaaaaataaaaaaattgaaaaacactttttggtattgtttatttgtgtaaattctaaactaaagtgtagtttataaatgtttacttaaatcgctatcgaatatattattttatatatttattctaatttttattatttatttattggggatctacgttaagtgagcaaatcattgagtctgcaatataaataaattcttaagctaatttacatatgcggtattggcatggtgaggtgctacaggtttgtggtcaaggatgtgaccgtggaaatgctcagtcgctccagacgacccaagaccagtagttcatctatggagcgcttggcgtagaacttttggtcctcgttcagccgcaggaaggcgtgagcccaggctttggcataggattccgcttcggaaatggcattggcatcgaactgggcgacactttccgttggcttgggttcgattgcctcaccgccagcatcggatgtagtatgttggatgtcacataggtccagctcgatgggcacctgatcttccgcctccacaatctcaatctcgtcttccggctcctctggttcagtcgacaagttctcctcggagaagagcttcagcaggggtctggagtgggaggattccaattcacgttttgatttcagctgcaggataatctaaattatgtagtttcagcttgacttgtatgggtataaaagtgcagtacttacagtctgctcctcctccaaagaagcctcaatctcatcatccagatcgctgtactgggtctccggatccatggtgacctcatagaactgctcacactgcgtagaataggatgtcggccgcctggtcttcggtttctggacgcgcggcgacggttggctagctggtggcgcgggatcatggtcgtaggagtgactgccgtcggtgagatggccgttctgcttgatataccgtacgtggcacttgtggatgcgcagattggaggtggtgccgccggtgctctgcatcacacgcttgcagcccatgcagaagtatcgccatttcaacttggtgccgtccggacgagcgatttcccggtagacgttccaaacggaactgcgcttgttcttcttcaccagccgatattcaccggagttgatcttcataaggatgtccagctgcgcctccatgcacttctcctcctcgggggcgtgtatgaaaaacatatttcgcctcgcaatccttatggtcatagtaaaaaaaattaaaaacacagagctccgaaccaggtggcatcaccggtgagttggttgcgatgttcgattacaatcgatatcgacattctatgtaataccatgtatcgaatttaatttaataggaaaagaaaaaatattaaccacacaattaaaaaaataaaatacatataatgtcatctacaacaaatattctaaaaccaatcaaattaatagttatttcactacttttcgtttcaaatttcagatatacatggtttatatataaataaattatataaacggcgaagatattacgacttcattttattaaatcttaaacatatctgctgaattgtaataaaacgcaatgaatcacaaatcattttatacttattcgtatttgaaataaaaaattgagtgactgccgaaatgagatatttaaactttctgttacatgatttttttaaaaattcgttgaatgtgatgccttttaagtttacgttaataacggtggaaatgaactttattgtgcaatcactcaaatcgcgaacaggtatttatgcatgtgcgccgcctttgggattagatagaagatccatgaagtccttatgaaacgacgacatctctcgcacgaaaaatttcatcagtttgcattttttcctctctatgaccagcttttcctcctctatttccataattctggcagctctttgacgcttagcaattttcatgtcctcggtcttggaattctgttgatcgagctcgtcttcatagttttcctgggaatgaactgtggacgactcttcgatttccctgattatgttatccttcagaatacgcagttcatccacgtcttcttgtgcttcatccgcatattcgttcatatcgaagctatccccttctccagggtgtactttttgggaccttaagtagttcctatctatcaatggttcgtcaagttgactgccaaatgaattgtgttcgctggtcgtattgggtgca

SEQ ID NO: 24221 - DNA, 896 bp, DROSOPHILA
cgaggcgaaatatgtttttcatacacgcccccgaggaggagaagtgcatggaggcgcagctggacatccttatgaagatcaactccggtgaatatcggctggtgaagaagaacaagcgcagttccgtttggaacgtctaccgggaaatcgctcgtccggacggcaccaagttgaaatggcgatacttctgcatgggctgcaagcgtgtgatgcagagcaccggcggcaccacctccaatctgcgcatccacaagtgccacgtacggtatatcaagcagaacggccatctcaccgacggcagtcactcctacgaccatgatcccgcgccaccagctagccaaccgtcgccgcgcgtccagaaaccgaagaccaggcggccgacatcctattctacgcagtgtgagcagttctatgaggtcaccatggatccggagacccagtacagcgatctggatgatgagattgaggcttctttggaggaggagcagactctgaaatcaaaacgtgaattggaatcctcccactccagacccctgctgaagctcttctccgaggagaacttgtcgactgaaccagaggagccggaagacgagattgagattgtggaggcggaagatcaggtgcccatcgagctggacctatgtgacatccaacatactacatccgatgctggcggtgaggcaatcgaacccaagccaacggaaagtgtcgcccagttcgatgccaatgccatttccgaagcggaatcctatgccaaagcctgggctcacgccttcctgcggctgaacgaggaccaaaagttctacgccaagcgctccatagatgaactactggtcttgggtcgtctggagcgactgagcatttccacggtcacatccttgaccacaaacctgtag

SEQ ID NO: 24222 - protein, 294 aa, DROSOPHILA
MFFIHAPEEEKCMEAQLDILMKINSGEYRLVKKNKRSSVWNVYREIARPDGTKLKWRYFCMGCKRVMQSTGGTTSNLRIHKCHVRYIKQNGHLTDGSHSYDHDPAPPASQPSPRVQKPKTRRPTSYSTQCEQFYEVTMDPETQYSDLDDEIEASLEEEQTLKSKRELESSHSRPLLKLFSEENLSTEPEEPEDEIEIVEAEDQVPIELDLCDIQHTTSDAGGEAIEPKPTESVAQFDANAISEAESYAKAWAHAFLRLNEDQKFYAKRSIDELLVLGRLERLSISTVTSLTTNL

SEQ ID NO: 24223 - DNA, 18574 bp, DROSOPHILA
tgccacattgattcaccggcttcgggggaggttttctagttgtccccgggggttgaccatctgactgaatgttaaaaacgagtctcggtaattgtcaacacttttggggggatgggtacaactggagtgacgtcatgcaagggctcgaataggcggctgttccgaaatgccaaagttgttggcctgccctttttatcaaacgctttgttttcgttatacaatttatgtagatattcgctctgtcttcctctccctatggcactctctctctctctctctggggatccctctttcgcccttgccacccctcatttctctgcccgctgccccattctccgccgccctcgctctccaactgacacacattccgctgctccgagctgcgcagccaaccccttgcctgcctcacttgtcacactgccatagatttttcggctggaaagctctccaccactgtgcacttttcgcacgagagtctccactcgaaaaaaataagtaccacattttagatttcattttattcattaatttcatttttcatttaataacttatctgaaatactgccggttgtcactaaaatctcaaaaatgtgaatattgaaaacgtttgctttaatatgaagctttattcgcaattctttttttaaagagaagatctttggaattgccgttcgaaatatgctgataagagttcattacctatgaagcacatgcagtaagaagtcttatgttttaaacctatcttttcatatttttgtgacctgatttaatagtagtgacattgaaaggctacacgaaatattcttctttacgattagccttaaaagcgtttgtagcacattcatggttttttttcgccgagtgtatgagagcgttgggctgcggtgtaacatctgctggcgaaagctctctgccgacgtcggcagaacggaatgttctatccgagaatcgagaaagcttaaccactcgcggcgcgccgaaaagtttcagtcgaacgtcgaatccgaactgggaaggtccaactgtgacagcagcagctatctcgtctctttgtcgggtggtacagtacagctctgctcccctgccgcccgcccgccccctcggcgctggtgtgtgcccgctgctctgcttacacaataactgtgcatcgattgagtccagctccagcgagaagagaagcagcccaggactaactctcgttcgacataagaataaaaggatattacgttagcgtacagcagtcgtgtgtgatcagtatttgttgtatttgtctcgttccaacgcgaatcggttctagtgctgaaaacaagttcaatactgctaacggggtagttttctgcgaaagcccccaaaacacaatacgcaacgccaagcgcaaaaattgtgtaatagcacccaaacgtgtaaaaggtagaaaaaaataagaaagaataaaagaaaaaaaaacgaacaaaatgaaaccaagaactttccatgtctgctcaactgcagcgcccaccgactgccccaccacccccctttggggcgtcgagaaaacgacaacgtccttgtacgaaatcgatttttccaaaacttcatgcctggcgtaatggatatatacatttgtaaccatctgaagagagaaacggagatcgaaaagaactgtgtgcccagccattatacctttttcgtttttcccttagggaaaaacgggagatgggcataaagaaaatgcatttttcggacgcatttgacagtgttggagtgatctagagtgttttagtgtgtgtgccatagcgagacgaatatgcagaaataatgtttttcctcctctttgatttggcattcattttggcgttcatggcaagccaaacgcatgtccgtccgtttgtccgtttcctccgcatcgctttcgcctgacgtacttttgtggcaatgaaatcgtttagattcaattgacgcgatttacattttggaatagcagtaatttcctggccaccccacacgaatgagtggatatagcgagccagccacatatatagagcgatttgggtcccccgcctggcgatttcataattccgcacacagcataaaaaaaagaggggcacaggaaaaagtcttggaaaattttcctgccgctcttttcgaacttgcgcccccgacagtttgctcccactgcgctgtttaccgttaagctcgctcactttcgaaattctgtctctcgctttctctcttggcctctccattgccatgtgccgttattcggcatcctggaaactgcagctcgcctgcatttccatacacacactcgcttccattgtccacttccacacaatttcccgtgactccgtggccttccagcggtccacttgctgctccaccgcctcgtccttccagcgcccgcgtatcctgtggattgttgcataagctcgagtcgttttaaccgttttcgcctctattaatcttgcccttttccaaacttttaattttttcatttcagttttatcaagtttttattttttactttgttaatcgtgttttatctgccccaaccgttgtcgtgccttacatttttgtttgttgatcgttttatctgtctcgcctctaataagtttaaacaagaatccgcataatgagtgctcaggtgggtaatcgaaactgacgagctcagaaacattttattcatttacgtatatttttccatcaattgtaatttaccttgaccgcttcgagcatgataaatttaagttaacttttacgaatcagcgttacataacctatccttgtcctcttattaagtagggattcgtataagaaattatattggtctggtaaaaaatatgtatgtcggttttatagagagcaagcaaaacgtgcgaaaattaagcagacaattagctggaaattgttaataatatttaaattaaacactccggcaactgagatcattagcgagctcagctcatctggcgtttcagtctgcggatcacaaaaataataataaaaaaaaaaacaataaacaagtcgggtgaaaatgcatttctaagatactagagatgccagacacgatgtgttatcttgcccagtgaaactggtttttattttctttttcggggttactatgaaggggaaaaaacgagcctagcaaaacagtttcaatttcccagtcgaatgcattgtgttctatcaatccgaatcagacacctcaacgattgagccgcctcaatctggtttgaaaccggttaaaaccaaacttgcactcacctgccggctaatgcaccttcgaataaaagcgatatgtcaacaattcgcccgatttctggcttacacatttcccagatacttttgtatttgcacttttttgcattgattgaacaattagcgcgtcaattcgatgcacagctctttccctccaaatagtcgacatgttgtaaattgatattcaagttcaaatgccaaatggtttgcggcgaaatgtgtgcataccgttttgttctattcggtttagggggggacatttcagctggagcgcagcaacagatacacagatacaattgtatctgttcgtctaattggttcgctggcagctcacagttcgcagttctcagtttgctattttccatttcactggcttatgtaagtttctctgcggctgaccgcccattgtcgtattctgatttatactattttcgcccgatctccatcctggaccccaatcccaataccaaacccatacccctgtttccacatgctgtgccatttggcattgtttcggatcaattgaagcatgaaaagcgcgattaacttgaattaatgtgtatagaaaaatcggaattggcggcattgtgggaaaaccgggcgctttccgcccacaaagtcatggctaacaattgtttactatttcctaggcaaggtagcatgtaagcttaagatagtactatcattaggatatattctaacgcatatcttaactttaatcctcccatcagattgtttagcacttgagagggaatcttagaacgagggaaaccagcgacgcgagataaaagatacgaaagcagatcgatagtcgtttgaacacttgccacagtgcgtaagccgaaaagtagagaaacccttcagtagcaggcctctaggcccgattctctcgattctcgattcgatttatttcatgctgccaaagcggcctcaattgaaccagaaaacccaaaaggccgaaaaacagaaaaaacctgaaaccaaaagcacatacatataatgaaattaaataaatcaagacacgccaggcccgaaaaagcaaagccaaaaaaagcgtaagattctcgaatatgtatagtcgagtatacccgcaagttggatgccatgtgaacgcgacaggtttgcgttctcgctttcccctcgccctctgcattcattagtgtatacatactttcgtctcgagacatacgtatttttaattaatttgatttgatttccttcgacccctcggttttgcatggccaaacaaacagtagactatacgagtatgtttatattgcatatctcttgagttcttttgagtttcgctgacggctgcgctcttcactagcccattttgtttgttttttaataatattcataataataacagtgactcacgacgcactgtagataacgctgctcgatcccgaaaaacgggtcgaattttggctatcgcttgctggaaagcctttctattggaagtctatgtatagcacacgattcatagtcctttggcagcctggccaaagttttccatttccaattggcgctgaatcatcaaaacaaatcgcgtgttgccaggccaacgaaaaaccgcaatgcccgaaacgcctttagttttagctaagagttaatgtatgcatcatatcctatcatattaatgtttacactagtgttgcataagttgatttgtagtgtctctgttcgttcatatcatatttatcatatatatttggttattctttagttatcttatatgctacttgctagatctggtaaagtgaaaaatgaaaataattcctgaaactcaactatgaaataatttataaatataatcttattgcaaatacatatactgatttgtatagtttattttattgtaaagtaaaccagtctgatttattaatacacaatttatcactgtaacagactgaggtttgcattcacgaatatcatttatcactttaccagaggcggaaaatagctctcttatttattataatagccatatactacatacatgcatagtgtacgtcttgcatttgcttatgctcgtttttagttttgttcgatttttgatttttatctcttccccgtttgaaaacgttacttgttcgcccatcatcgacatcatcaatcaaacaccacccaacaaccgacccaccaacaacaacacccaaactgaaaccgaaaccgaacccgaatccaaactcgaaacccaaaccttcatgtgcgtagcatgggagggcggactcttatcgagtcgccacggttatagccaccgatgacgacaatcgcacagccgatggccagtacaaggtaaatcgaattttcctcactcacatcacacaccgccatatacactcgtatctatcatccactctatttatgtttttcatttctaataccgacccctttcgattttaagcgctttactaacccacttctttcccatcgatttcccttttcccggtctataattgcacatattatttattatatttgctagacttgggcatgcttccaatgacattttccgagtgcagttgacatttagaaagcactggcgaaatgtttacagcggctataaatagccataattcgctatgtataacgatggccaataataatgtcataaatatggccatttttgaatatctcggagtttattttcgaatctccattcattaaagaatatattattgttcaaggaaatatggccttgtactaataccaagcagttttttgtcttttgctcgattttaaaagttttccaaatgaacaggagttcaactagttgttgtttttttccatttgtttttccttgattgcatggcaaccccaacaatgacgtcagagagcaaaaaatcactgcccgtgcgtcttgaaaaaaagagaacacttatagacactgttaaagatagaatgccagacactagacagctgctaagactatatatataatataacttttgaatccacatatattttatttagaattctctttcttttccttcttattttttttatttggccaattcaaaggctttcgaggtcagcgaatgcatagtaaatctatatatttttggttgcactgtaggaaaagttacttttcattcatttttttcgtatttaatttttttttagttcctttgttttgtatacgtagcatatgtgtaggaacaaatgtttgtataattgcttgatgttttgttttgtgcacctcaattcatttacgtgctcttctcatttcgatcgggagcgtcatttagcgcgcattttgcatgccttagattgcgattactagagctttacgtatcacagcggtcgttttgaatattctcacgctcgaactcatttcggaatgggttcgcccaagtctataaccacatccccgtgcacaggttcggaaaatcacttgacaagtagtaaatttaagtcgggtaagtagttaacaacgggtaccggtacttaacttatctctaactgacccctaactcttaatggtaaacggaacagttgtacaattttgagggtttcttcagtgcaaacctatcgtaaactcttctctatccacttcctctgtaaccaatcccaaaacacactggtaatattgaatcctgtacgccttttttgaaaggcctaaccaaggcatgaagtaaatcgaattttgtgtcggctaatgggtctcgctgcagtgcatcattaacttccgccactaacgatattatccctctcaactcaacagtcaagacgcaagatgccggccaaagttaataaaaaggagaatttagatgatctcaaacaggagttggatatcgattttcataaaatctctcctgaggaattgtatcagcgctttcagacacatcccgaaaatgtaagtgcagcatttgagtaaatggtatcccattcgacatgtgaacttatacgtttttgatcttccgcagggtctaagtcacgccaaggccaaggaaaacttggagcgcgatggtcccaatgcgctgacgccacccaagcagacgcccgaatgggtgaagttctgtaagaacctgttcggtggcttcgccatgttgctgtggatcggtgctattctctgctttgtggcctattctatccaggccagcaccagcgaggagccggccgacgataatttgtatctgggtattgtactttccgctgtcgtcatcgtgacgggcattttctcatactatcaggtatgtgtccctcaaatctgagcagctaaagatcggcttactaactgtggtgtgtgttccgcaggaatcgaaaagttctaagatcatggaatcgttcaagaacatggtaccccagttcgccaccgtcatccgcgagggcgagaaactcacgctgcgcgctgaggatctcgttctgggcgatgtcgttgaggtgaagttcggcgaccgtatccccgctgatatccgcatcatcgaggcgcgcaacttcaaggtggacaactcctcgctgaccggcgagtcggagccgcagtcccgcggtgccgagttcacccatgagaatccgctggagaccaagaatctggccttcttctccaccaacgccgtcgagggcactgccaagggtgtggtcatcagctgtggcgatcacaccgtcatgggccgcattgctggccttgcctccggtctagacaccggcgagacgcccattgccaaggagatccaccatttcatccaccttattaccggcgtggccgtgttcctgggcgtcaccttcttcgtgattgccttcatcctgggctaccactggctggacgctgtcatctttttgatcggtatcatcgtcgccaacgtgcccgagggtctgctggccaccgtaactgtgtgcctgacccttaccgccaagcgtatggcctcaaagaactgtctggtgaagaatctggaggccgtggagacccttggctccacatcgaccatctgctccgataagaccggcaccctcacccagaaccgaatgacggtcgcccacatgtggttcgataatcagatcatcgaggccgacacaactgaggatcagtcgggtgttcaatacgatagaaccagccctggattcaaggcgctctctcgcattgccactctctgtaaccgtgccgagttcaagggaggccaagatggcgtcccaatcctcaagaaagaagtcagtggagatgcctccgaggctgctctgctcaagtgcatggaactggctctgggcgatgtgatgaacattcgcaagcgtaataagaagattgccgaggtgcccttcaactccaccaacaaataccaagtgtccatccacgaaaccgaggataccaacgatccccgctacttgctcgtaatgaagggagcccccgaacgtatcttggagcgctgctctaccatttttatcaacggcaaggagaaggttctggacgaggagatgaaggaggcgttcaacaatgcctacatggaactcggtggactgggtgagcgcgtgctcggtttctgtgactttatgctgccatccgacaagtatcccaacggctttaagttcaacaccgacgacatcaacttccccatcgataatctgcgtttcgtcggccttatgtccatgattgatcccccacgtgctgccgtgcccgatgccgttgccaagtgccgatcggccggcatcaaggtcatcatggtcaccggcgatcacccgatcactgccaaggccatcgccaagtctgtcggtattatatccgagggcaacgagaccgtcgaggacattgcccagcgcctcaacatacccgtctctgaagtgaatccccgcgaggccaaggccgccgtcgtccatggcgctgagcttcgtgatgtgtccagcgaccagctggatgaaatcctccgctaccacaccgagatcgtcttcgcccgtacctcgccccagcagaaattgatcattgtcgagggttgccagcgcatgggagctattgtggccgtgactggtgatggtgtcaacgattctcccgctctgaagaaagccgatatcggtgttgccatgggtatagccggttccgatgtgtccaagcaggtaagaaatcagattattatgataaaagtgggaccggacaaaaaatatcaccaaaattggccttccattaggcagtaattataattttaaagcagcataaaattaatttgaaaatgagtgtgatatttttttcttgtccacgcattaaccattccatattaacatttaaaaggattttgttgaatacgcgtttaatgtttttagtatgggaaaatacggtataattttcctttctgcatgaactcatgttttcggtttatgacactcctatagtaagtgagagatggttcaatgtggatttgatgttgtttttgcctaccaaaatgcctaaataaattatctaaatgatcctgtgtaggctgctgacatgattttgctggacgacaactttgcctccattgtgactggtgtggaggagggtcgcctgatcttcgacaacctgaaaaagtccatcgcctacaccctgacctccaacattcccgaaatctcgcccttcctggccttcatcctctgcgatataccactgccactgggaaccgtgacgattctttgcatcgatctgggcactgacatggtaagtttagacctctgccccaaacccaagctccatcgaagattaaagttaaagttgctattaagtcagtatcattcgagcaagttatatagttatacaagttgtagcccatcccagttaatagttaagaactagcctttttaacaccaactctgaacgtaaattgtgcggctgactgcactgccgatcagattcctgccatatcactggcctacgagggacccgaggctgacatcatgaagcgccggccgcgcaatccggagatcgataacctagtcaacgagaggtaaacgcgctagcctccgctccgatttagatccagcagctccagctagaaaacaacgcagtgctaggccatcgagtagtttaagtgctcttaatcacgtcacccaactctagctaaccccacagatctaggccaaaatcgaactgaattgaatttatggattgtaaaccgttgctaatgtaactacctgccgtaatccaatacctaggtgccagccatttcattggcctacgagcatgccgaagccgatattatgaagcgtccaccacgtgaccccttcaacgataaattagtgaactcaaggtgccaatcaagtcaatttataccccacactaaaacacacccacacacacacaccacacacacccactcgccaactcactaacctcaacctttaaaaggataaatccagactgaagtaaagaaaagcgcaaatcaagagaaaaaccatataactatagcatatgtcttatgtgtatgtggctggattgtattagaataagttggcctaaacgaaggcagcgtaaacatctaacaaagccgttgactcgtttatggcttactaactacccaactaactcttaagaatgttatcactcgaacatgcccaccacaccagctttcctctcagttaactcatctctgtagcatatgtccattcggtggcagatccctcgtcatgcatataccatctatacatttatacatagcatctgttctgtacatttcaagtacaataagtccatttcccatttttattgagtttccacccagagagttttatataaaaatcatacatacgctcatataaccgctcccacatgtacaattcaatcattccgactttgaatatcttgcccaaacgaatatcgacttcatctgccatactctaatgctctaaatgttaatatgtgtgcgtcgtatattgttaatctctcacaaataaataattcagatacatatcgctcacgattttcgttttgtggtgtaactaacactgagttaaccgtaagattcacccctcgacgttatatgaattggacaaattgattggcatttgtaatggattttaagtttgtacaatttggtaaaatttcaatatgaaaattagcatttgcacacgattttttatgaactaacccaaccgaaaataatggtttttatttcataatttgactcgagaacttacattagcttatgtttaactctgtttgtcactccacacatcaagcattttgcccaataagtctctgcagcttaagtttgatttaagaggggggtttaagttatgcaatctagtctgtaagatattacatatatacccttatgaaccagcgtcgcccccccagctcagcggatttctcagggttttgcagagttcaaggagaggagtttatgtttccataatttatcgtatttaatttcatttattttttccacttcaaccaactaccaaccgataacccaccaccacaaacgtttgcacgtttaggtgccagccatttccttagcttatgagacggctgaatccgatattatgaaacgccagccgaggaaccccttccaagataaactggtcaacgaaaggtaaagtttcgctccgtgctgatctcgaatcaattacaacatttaccagaacaaccaacaaacaaatttcaatcaatcaaccaaccaaccaaccagataacagcaagaaccgaatttctattctgtaacgtaaatgacacatatccgaactcaagtcaagattttgcatcttctgctactctatgaaccaccaaataattcctttttgtcacgcaatgaaaagtaaattgaataccattgaactgaacttgtactttggccggccaaagtccttaaagcaagctaaaatcagagtacgctttctttctatcctacaagtcgaagataatgaaatcattttactctacttttaacctatattatccgctatatctctgtctttctatatactaactaaaatatttttaaatagcttaagtacttcttggttgaatgttgattatttggattaattccacagatgttttccatgttttatgttaaatgtttcatttggtagcttttctttgaatttctgttcactgctctcttatttagttgaatattctcaagatttttctagtctctgatatttaagtttagatagtataaagtaaatttcaaatcgattagtaattttgattttacatacataactataacactgtgagtgaatcaaggtgtgttcttagtgaattcgttaagttttttcttataagctattcctgaacacactttaattcggacttgaaggtccaaaggataccattttggataatttttagaaagatctttaaaaaatacttaaagtatattttccttttgtatttcttcatatgtacggcatttcgtaagatttttaatttgtttttgcaataatgcaatatatccaattattgtacgctgataaatgtaattgtaattataactacatatacatacatagctactattgattatataacccaaaagaaaattttcatcctattaagttttaactaaagaagacaaaaggaagaacgactttttcggataccattttctcaaatatttttgcacttaaaatatttagaaactttatattggattaggagtacatgtaaatcttttccttatagccatgaagtcagttagtttgcctttcacttttctgcttaactttggtaaactttcgctctctctctctctctctctatcactttctctctatatctacaacgattcttaaggtgttatgaaattcaattttggggcttaagcatttttcccaagatacctgaatttatgttttccagtttcggaaacattcgtacttcttttgtttgtactccttaataacttggtttaatttttttagatttatgttctactgtagaagctctacagatatttgttttggtttttcgtataaagatccttttatttgtggtgcgaaggtaagtggtgatcaacttgatacctgaagactgaggctctagctcacttctgggctatgttttcgtagaataaacaataatttgttaccatgtcaatacagatcttttacttagttcttagccctatgctagagcaggcctattgttaatttagtgagtctgtataatctatgacatatgtacgtttctactgatgctacactcatgatacggtagacgaatcttttgtctcgacatcaattcattcacgaatctccacttactaaggtcaattcgaatcattcagcacattctatcaatcaatgccctgtatttttctctaccaactctcagtcagtcattcattgaaacgtctcgttttgagttgtagttgaacgacactcacacaaatctcccccgaactcaatctgaaatccagactgaaattgtcctctagtaataataatacatatataatgatttagcgcaatttaagctctaatccattcttgtacaccctatatctgtgcatttactattacctactacttactatatatcgattttactattactgggtgctctatgctctttttgccctagattagttttagcttcgtaagtacgtgggagctaacaaaaaaaaaaaaaatgaaaaacaccttaacatgcaacaaaaaataccccatgatggtactacttgacacagactcccggcctcccctcagatctctatctatctcttacgatctactagcgattattaattagcgtataaagaacaagtatttattactcgcaagcatatttatataaaacttttaaacaaatattttatatatatttgtaaactttaaccagattttcctttgtatttccctacattctttcgactcttgttatgtctttcttttgattatcaaacaaccaactaacaattgcaacttgcacaaataccgataaccgaacaatcaataaccattaattgccatataccgcaagattccggccatttcactcgcttacgagcaagccgagagcgatattatgaagcgtcagccgagagatccgtatcgcgacaacttggtgaaccgcaggtcaggaaaactaaacgctaaggtcttataaaaaaaaaaaaaaccaaaaaccaaactccaatatccaagtgttaaccgtcttttagttgattagttatggaatagaaaatgaacaaacatgcaaccatcattatttacgttaccaactttgaactttgtttgatgttctgtggtcgcgtttcttgcatcataatttgaccgaacaagtagatcaaccgatcatcaatcagactaaaatgcaatcaatcgaatgataaattccaaatttcacccagaaacttttgcgactgtttgttcgtttgctgatgcgttcatgcgtttttccttgtttcaattttaattccacacttatgaacgtacaaaaatacatttattccacagttttgtgttttacatagttttcttttgttccaatttctatgtaacctacttataagttgctttctgaaactctcaatgtggaatgaaaatatcttttaaatattctaaaatcaaaaaatttctaaaatgtaccaatctctaaagatttcgttttgattttaaacctactttacttgatttcttatggaataactccttttatgtatccctcacttaaatccctaaatctaagtgttacatttgtggtgtgttactcgcacaacaaacttcaatccttacacacacttattgtgtatgttcaaactattgaggaacaacattcgtattgaatctaaaagtgtgttttgcaaactgtagtgccactatgaaaaaagcccaacagctgcttctaaaaaatttggcgaagttagttcaaagaaaaacgctcgctcgctcaaacgctcacctgcataaacaataaacaaaaacaaagtacacgacccatacaacaaacaatcgaatataaggtggatctatttccacaagcccttagacaagcaaaagactgaacccaacaatcataaaaacacaaaacccacaaaaaacgaagcttctgccgttactcttagatcagttagtacgttacttgtagatgagtttgttcgagccaactacaaaacgaaaatcgcttcagttgtgttctagatacaccatatgattgttatataccaaatatatacatacctagactcgttccgaaatctggttccaagtttccaagtcgtggtaagtctgaatgtgagggagggtgtcctgataaacataggtaatacttgagaatctcacaacaatggcaacggataatgatttgttatgagttccttgtgtgtaatacttttacgtatttattactcttaagtttgtgttaacgtgtaagtttatgattgagttattgttttatgttttatgtgatttcgatcgaaacttccttgaacgtaagtaaacgaaaggatgtagagctgcactcgcctgtcgtagtaatagtggcacgcttaaatgtcctgcatgttccgatatgtatgtcctgtatttagaccgcatgttcaactagcactaacaataactttgcttttcacatccacatccaatgcgaaatgtatgaaagccaaacaatacaatgaaattcaaacaattctgcgccatcacgctttctatcgagtgtagactgtacgatttgctttaacgcgctcttgaaattaaaacgagatttgcccagacactttccacgctacatagagtaatgtcttaataccactaaatctaaacgataaacatccatttgcttaaacaatccataaaagagcttcaaggtaaagtggcactaacaccaatctaattgactaaccccgagtacgatttgctactcggatcgaggactgaacggacatttgcggtccttgggcagggtttttgtttgatttcctccttaagtgttttgtgtttgctttgagtgttattcttccgttctatttttctgtgtgccaacgtttatggctttatttcaagcattcgttgatcatttcttgagtaccccgaacgacctatcttacgataaacaaaaatcctagccaagccgcgcatgttcctgttttcttcagtccgatgcccgaaactttaccgctagccaaactgtaacgagaagtgtcttgcgtcctgaaaaacaaaaccaaaacccacacaaaagaaaaagtcttgcctgcctttgagagttacctaacgagatctgcttctttctcccaacttccgacttggtcccgcccatttaactaacccaggttgatttcgatggcctacggacagatcggcatgatccaggccgccgccggcttctttgtgtacttcgtcatcatggctgagaacggcttcttgcccaagaaactgtttggcattcgtaagatgtgggactcaaaggctgttaacgatctaactgattcctacggtcaagaatgggtaagtccaaactccaattcgatcttaaacacacttcatattaactctgaattcgtactttaacgataatgtaaacagccaaggatgagttagatactagtgaccaaaactaaccacaattggagccattctaattaatttatcctatactcccatagacctaccgcgaccgcaagaccttggagtatacctgccacacggccttcttcatctcgatcgtggttgtgcaatgggccgatctgatcatctgcaagacgcgtcgtaactcgatcttccagcagggcatgcgcaactgggctttgaactttggcctcgtctttgaaaccgtgctggccgcgttcctctcatactgcccgggcatggagaagggtctgcgcatgtaccccctgaagtaagtggtcctttaaaattagaatatatcattaattaaccttgtaaataaccttccttacgaatactatagactcgtctggtggttcccggctattccatttgcgctggccatcttcatctatgacgagacccgtcgtttctacttgcgccgcaaccccggaggctggttggagcaggagacctactattaaacacccacactgctacactcccacacacacagccacatgcccacacacgaatgcacaccacaacaagagcaaccaggaacacccgcaaacaacacctacaaaccatggagagcaacaaatagaaatgtttatgaaccacaaaacccacaaaagcaacacaaccacagtaatagcaacagcagcagcaacggcaacaacaacagcaacagctacgtctacaacaagctacagcaagaacatattacaatatattttatttttttaatttaattatttaaagtaaacgaggataaacaaaaatgcaagcgataattattttaaacgttaagtaaatttaaattataaattaaagctaaaaataagatttaaataaagtataaatgaaaataaaacaaacaacaaaaacgaacaacaatttcgatgaaacaccaatcacatccagacaagaacaacaacaaaatcaaccagtaactaagcaaaacagtaacaagaacatgtttttagtaaaattattaacgtaacgagaactggatgaggcgatttttatcgccacaataacaagatcccagaaagctaacacacacacacgcactcacaaacacactcacaaatacacacacacacacaccgatacacaacgcatgacgagacaaagtatataagaagtttagagaaattataaaacgaagtaaataaaaagtaaaatgaggaaagaaaacaatgaaaacccctagcgtagttaccaagtaagccgtgaaaagtaaagcccaataaaaaccacaacaacaacaaccaaaacaaaagaacagaaattaatttgcaaaacttgaaacttgtgtgtgtaaacgcagcttagcgcagaagaacgaaatatatatataaacagaagaaaaaccacaagaaatgtgaacacgacgaatataattgtttatatatatacacacatatattatatggaaaaaatttgattatataaatggagctatacaacaatacaccaaaaaccaaaattgaaaccataacgaaatcgaccgatctgcacttggcactacgccgagttccggataaaggtctccgagcaatgtttggagacctgccggtctagaatttgttaaaatctaatgaaaaaaccaactaaatgtttaataataaacccccttaaaccaattgacatgcaatattatgctttgtgtgcatttaagcccaaaagaaccgatgccgagattcggtgggattaagtcccccgatgtcgatatcgagattcagatacagataccattaccgatacctaggcccagaaggaaaagataaaaccaaataaaactaaaaaccaaattcaatacgaaacaaaagaaaacaaaaggaaaaagcgcccacaaaataaatgtttgtaagtttta

SEQ ID NO: 24224 - DNA, 3831 bp, DROSOPHILA
aatccgaactgggaaggtccaactgtgacagcagcagctatctcgtctctttgtcgggtggtacagtacagctctgctcccctgccgcccgcccgccccctcggcgctggtgtgtgcccgctgctctgcttacacaataactgtgcatcgattgagtccagctccagcgagaagagaagcagcccaggactaactctcgttcgacataagaataaaaggatattacgttagcgtacagcagtcgtgtgtgatcagtatttgttgtatttgtctcgttccaacgcgaatcggttctagtgctgaaaacaagttcaatactgctaacggggtagttttctgcgaaagcccccaaaacacaatacgcaacgccaagcgcaaaaattgtgtaatagcacccaaacgtgtaaaagtcaagacgcaagatgccggccaaagttaataaaaaggagaatttagatgatctcaaacaggagttggatatcgattttcataaaatctctcctgaggaattgtatcagcgctttcagacacatcccgaaaatggtctaagtcacgccaaggccaaggaaaacttggagcgcgatggtcccaatgcgctgacgccacccaagcagacgcccgaatgggtgaagttctgtaagaacctgttcggtggcttcgccatgttgctgtggatcggtgctattctctgctttgtggcctattctatccaggccagcaccagcgaggagccggccgacgataatttgtatctgggtattgtactttccgctgtcgtcatcgtgacgggcattttctcatactatcaggaatcgaaaagttctaagatcatggaatcgttcaagaacatggtaccccagttcgccaccgtcatccgcgagggcgagaaactcacgctgcgcgctgaggatctcgttctgggcgatgtcgttgaggtgaagttcggcgaccgtatccccgctgatatccgcatcatcgaggcgcgcaacttcaaggtggacaactcctcgctgaccggcgagtcggagccgcagtcccgcggtgccgagttcacccatgagaatccgctggagaccaagaatctggccttcttctccaccaacgccgtcgagggcactgccaagggtgtggtcatcagctgtggcgatcacaccgtcatgggccgcattgctggccttgcctccggtctagacaccggcgagacgcccattgccaaggagatccaccatttcatccaccttattaccggcgtggccgtgttcctgggcgtcaccttcttcgtgattgccttcatcctgggctaccactggctggacgctgtcatctttttgatcggtatcatcgtcgccaacgtgcccgagggtctgctggccaccgtaactgtgtgcctgacccttaccgccaagcgtatggcctcaaagaactgtctggtgaagaatctggaggccgtggagacccttggctccacatcgaccatctgctccgataagaccggcaccctcacccagaaccgaatgacggtcgcccacatgtggttcgataatcagatcatcgaggccgacacaactgaggatcagtcgggtgttcaatacgatagaaccagccctggattcaaggcgctctctcgcattgccactctctgtaaccgtgccgagttcaagggaggccaagatggcgtcccaatcctcaagaaagaagtcagtggagatgcctccgaggctgctctgctcaagtgcatggaactggctctgggcgatgtgatgaacattcgcaagcgtaataagaagattgccgaggtgcccttcaactccaccaacaaataccaagtgtccatccacgaaaccgaggataccaacgatccccgctacttgctcgtaatgaagggagcccccgaacgtatcttggagcgctgctctaccatttttatcaacggcaaggagaaggttctggacgaggagatgaaggaggcgttcaacaatgcctacatggaactcggtggactgggtgagcgcgtgctcggtttctgtgactttatgctgccatccgacaagtatcccaacggctttaagttcaacaccgacgacatcaacttccccatcgataatctgcgtttcgtcggccttatgtccatgattgatcccccacgtgctgccgtgcccgatgccgttgccaagtgccgatcggccggcatcaaggtcatcatggtcaccggcgatcacccgatcactgccaaggccatcgccaagtctgtcggtattatatccgagggcaacgagaccgtcgaggacattgcccagcgcctcaacatacccgtctctgaagtgaatccccgcgaggccaaggccgccgtcgtccatggcgctgagcttcgtgatgtgtccagcgaccagctggatgaaatcctccgctaccacaccgagatcgtcttcgcccgtacctcgccccagcagaaattgatcattgtcgagggttgccagcgcatgggagctattgtggccgtgactggtgatggtgtcaacgattctcccgctctgaagaaagccgatatcggtgttgccatgggtatagccggttccgatgtgtccaagcaggctgctgacatgattttgctggacgacaactttgcctccattgtgactggtgtggaggagggtcgcctgatcttcgacaacctgaaaaagtccatcgcctacaccctgacctccaacattcccgaaatctcgcccttcctggccttcatcctctgcgatataccactgccactgggaaccgtgacgattctttgcatcgatctgggcactgacatggtgccagccatttcattggcctacgagcatgccgaagccgatattatgaagcgtccaccacgtgaccccttcaacgataaattagtgaactcaaggttgatttcgatggcctacggacagatcggcatgatccaggccgccgccggcttctttgtgtacttcgtcatcatggctgagaacggcttcttgcccaagaaactgtttggcattcgtaagatgtgggactcaaaggctgttaacgatctaactgattcctacggtcaagaatggacctaccgcgaccgcaagaccttggagtatacctgccacacggccttcttcatctcgatcgtggttgtgcaatgggccgatctgatcatctgcaagacgcgtcgtaactcgatcttccagcagggcatgcgcaactgggctttgaactttggcctcgtctttgaaaccgtgctggccgcgttcctctcatactgcccgggcatggagaagggtctgcgcatgtaccccctgaaactcgtctggtggttcccggctattccatttgcgctggccatcttcatctatgacgagacccgtcgtttctacttgcgccgcaaccccggaggctggttggagcaggagacctactattaaacacccacactgctacactcccacacacacagccacatgcccacacacgaatgcacaccacaacaagagcaaccaggaacacccgcaaacaacacctacaaaccatggagagcaacaaatagaaatgtttatgaaccacaaaacccacaaaagcaacacaaccacagtaatagcaacagcagcagcaacggcaacaacaacagcaacagctacgtctacaacaagctacagcaagaacatattacaatatattttatttttttaatttaattatttaaagtaaacgaggataaacaaaaatgcaagcgataattattttaaacgttaagtaaatttaaattataaattaaagctaaaaataagatttaaataaagtataaatgaaaataaaacaaacaac

SEQ ID NO: 24225 - protein, 1002 aa, DROSOPHILA; identical to SEQ ID NO: 11877

SEQ ID NO: 24226 - DNA, 2664 bp, DROSOPHILA
tacagcaggagcgccaagcggctggcaaggaaggctccggtcgcgaccctgcatccggaattcacctgatgtgcatgaccgaccacgttgcggactatgtagccagatgcggatacgccaccagttcgctgctcatcgccgtagaccaaatcgcagcaatgcgcacccacctggtcgagctgatccagtcgctcggcgggattctcccctcaaagaggggccactgaaagaggagcatcttcatgcccttgcgaccctacattcgtttgctttacatttgttgacgcataagaaaatcagtaaaaaattcaaataatgaacctaactgctttgttaactgctattattattattcagttcgtactccacaaatgagacatactcgtgcatatattgttcaatataaaatgtgccaaaagtattgtaaatatgtgctgaagagttcttaactatttgtaacaaatattatttgatggcttcgcagcaaggatatacatacatttataatataaattgatttggactgtgcatttcgaattatgattgttgcaagccttagtgtagtgattaattacatatagtttcaaccatcgatttaactcataaaggcaattattattttttttttccagttgcatagcattgcagccaaacatatcacagaagttactctgatcagattaatcttcacagaaaaatacaataaaaaggacagctgtcagtgtgagccttaattaagtgactgactgattgattggctgaccgccccatccggctgactgcagtttaatatggtcaaatccgaagccctcactctgccgctgccactgccactgcccgcagtttcaaagccgaataagcccaaaggtcattgttcctcgttcgggcggcagctggcaaaaaaaaaaaaaaacagaaaacagaaaacaaaaaacccaaaacacaaagaccccacccacaacccaagccggaaaactgcagcagcccaacaccatatatgtcatatctgtctccatttgctggtggtgcaaatggttccaaggaatgtggtgctgtgatgctggacggacagcaatttacctggcagagtggtgcacaatatccagagactggacttggtgtacttggtgatgtaggcgccatcgtccagggctttgaagttggccgtcccattgtagttggcattgggcagcttctcctccgtgaagagccactggggtccggccagagcggcgatgacaatggcgacagaaatgctgcaaaaaacaagcagagtggaaataagacactggccaaaatcatttcgatactcgttaaaatatttaatatttaaaaaaggttaggttgtttttaaatgagtaacagactcatttttatttgcgttctttggcaatgctctcagacaactctagccaatttagttttatttttacatttatgtacatatcaaaatgatttaagaaccacagttttttggttgtgcaattggagagtagagaaagttgcattctctaaatcaaaatgaaagtcgttggcgagaccctggatctccgggcactccaaaaattgtgtggggcagctgattaaaaaatattcaacctgttttgcggtcggtcgggggacgactctgccaaaaacgaggccgaaaatccataaaaacacatgcgtacgaagctttccaaccacccacactcacacaaccaacccacccacccacactcacacacgcaatgatgtgcaaataaatgttggcacccaaaaacgaggagtgcaaataaaattgttggcgctgaaaaatgtgcgaaaaaagaagcagtgaaaatgcaaaaaaaaaaagagttcaaaagggtggtgggaattttttttagagggatctttagcttgtcgtcacccagatattcgtgaatatattcatgagtgcacttgaacgccaatatttgcgcagtttggcaccgcgcgtagtcacaagtgctgagatgtacttcgtattgtttagtactcaatattgttttaaaacaaatgccaatcgatttatgcaacaaaaatatgtaggtgcaagcactattatttaatcgaattaaggccatactattttaaccgtttttataaagtggaaaatatctacatatatgtatgtatgtcggagattgagtagattacattacatattattatttgaatgtaatcgaaattatgttattgatccgttatgttaagaatgagcagcgagtaatgaaattcacggagagcgttccgttattgagtggccatcatttgtgtgtgtattcaaatgagcatggctcctgttgttgttgtggtagtgtttcgtgaaaacgatataccgcgctccgcttctccgatatatgtatgtacatacatatataatattaaggattctacaaccgcctacattggcatttaattgcattaaatttgatttgaaatttctactccactatgggctgaatgaaaaatacaaattaataaaattaataagtctaaaacagagagaaatacatattgtatttagtttgtgttttctctattatctctataaaactataaaaaaaacttagagcaaacatcacttgtttaacaaaaactttgcgtagtacgtcatttattaaattcgaaacgaaaacaaacgcacgtgggcacgacgac

SEQ ID NO: 24227 - DNA, 321 bp, DROSOPHILA
atgtgtttttatggattttcggcctcgtttttggcagagtcgtcccccgaccgaccgcaaaacagcatttctgtcgccattgtcatcgccgctctggccggaccccagtggctcttcacggaggagaagctgcccaatgccaactacaatgggacggccaacttcaaagccctggacgatggcgcctacatcaccaagtacaccaagtccagtctctggatattgtgcaccactctgccaggtaaattgctgtccgtccagcatcacagcaccacattccttggaaccatttgcaccaccagcaaatggagacagatatga

SEQ ID NO: 24228 - protein, 106 aa, DROSOPHILA
MCFYGFSASFLAESSPDRPQNSISVAIVIAALAGPQWLFTEEKLPNANYNGTANFKALDDGAYITKYTKSSLWILCTTLPGKLLSVQHHSTTFLGTICTTSKWRQI

SEQ ID NO: 24229 - DNA, 2784 bp, DROSOPHILA
cttcaggccacaaagacgcgactgatctgccatctgcgagttggaggatgggggattgttggagatcttcgtgttcgtattagtggccatgttccgctgctgctttcgtttcatttgagcggagggcggagctggagccgaagatgaagctggatatatttccgtggccgtagatacggatcgggtgagtggaaattcctgaggcaagtcggcgaacagggcgggggcaggtaatgggtcggcagcggaagggagaaggggtgcgggaacatgggtggaggacacggacgtatccgtgcaaagctcattcaacgacttggcgaagctgcgcgagtgcagattacacttggacacagctggcttttcgaagtaaaaactaaaacgaaaaggttaaatacaatagcttatgaatggcattcatcaatatacatacatacatatacatatgtatttattatacattaaaaaagaaaagaacgtctcttcttgtctatctatcttatggtacctattaaatacctagtcgaagagaggaagatagtcaaagcaaaaaagcgattttttgtagcaagcataaatcgaatgatttagcatgtacatagaaggcggctctttcatactgacggacagacggatggacacatggacgaacatcgacaccatgtggcattcatgtgcaatcaaaaaaatagtagcttttgaattcattttagctaagtaacgggtatctggtagtcgaggcaaccgactatcgagttatctcttattttcatcataacttaacagtaattgtccaaattaaaattcgctaaacacctaattgcttaccgcctctccaggtcattatgcagatagagatttaagttcgatccggcattcggatgcttgcgacatgctcctggtagtgtttgcgtctgtccggaatggccaatctgtccggtcattccagggtgtcctcgtcccgcatcgtagacctgatggagtcgggaattgccactcctcaggattccatgtggtggctgcgccgtcggatgcggttggtgcgtcgggtggtgactctggtgaccctgttgaccttgacccgcgctactaagtccttcctggctggctgtggtgatgccgggctgcttgtaccgcttgtaggaatcactcaacggatgctggccctcctttaacttggcgtggatgtttgccacactaaaacagggcaagcgctggagggaaatgtacgtatggaaataaagtatgtgaagaacacagagagcgcagcagaagatgcagctaatcccgaaggacgcatccggcgacgcttgcatttaagttggtacgtttctgcagtcaagcgcgagaattacgaatcacgaggtgggctattcctaaggggattgtaccaccgggtgcaccaccaacacaaatgcgacgactgtcacagatgcaactttaaagtaatgccatcgaaaagttgttcaacaattgcttttaacaacaaaagtcataatataaaatgaagttaaaataataatggcaatatatccaagcgttatgaattgtttaagactagctcagttactcacactgtagtagctaacctcctgcaaattgatgaagaggaatatattcaagaccccaacgaattccgtgacaatgaatccaaagacgaagaggaagaagctctggccataggagaccttgatgagggctggctgaagggtggaccggggtcttaacttcgatccgatttccgccttcagtattgatatataggcaatcaatccaatcagcatcactagacctacaggatgattacgcaatttcggtgtcattattatgcttagaccctttcaaatttttcaaaactcaccactaacaatgaaaagaattcccgcgctaaaataatacagattgttttgatgcgagcaagtggggattagaaaaactatgaagctgatcactagaaatacaccagcagccaggaaaataggacacgacttggtgaccgtatctgtaagtaaaaattttcttacgttagaatatattttaaataaacccattttaaacgaatttaagacctgtttctgtatacatttacatgcttcaaaaaacccattaattgtattttttttttttttgtattcgcaacagtgctttcgtaataaattaactttaaaaatcgtgaccatgtttttttcccctctattaaagaaaacactagtctggctggcccatgtttctgactttaaggcttttgctttctttttgttttctctttgacctgtcaacgagtgagaaaatatcctgcggctaagcaaaaacacgtacagacagagacaggacctgcgaaaaatccgcacgcacagcgacatccatttttagccgactgtttaatagttttattttcgaaattctcccctgaggccggtttcaaattagttttgaccgctcggacaaaacaaaatgaatgggaatatttgaaatcgatggccaattgtgtgaaaattaatggaatttcaatcgggtgtggatattggtattttcgatagagggcggtaagcagtttaatgtgtttatgggctagttggcatcgcctgccatggaatgtgggcgaaattcttttaatggatattgaaaatgttcagctattgtcgtcatcgcctgacttcaattattgtacatactacttcctgttcttgaaaagaccacaaatcacaggggcaaaagttggtagatggaggccaaaggcctttaattaatattcatccaactaaagttgtattatgtgcatgt

SEQ ID NO: 24230 - DNA, 424 bp, DROSOPHILA
atgctgattggattgattgcctatatatcaatactgaaggcggaaatcggatcgaagttaagaccccggtccacccttcagccagccctcatcaaggtctcctatggccagagcttcttcctcttcgtctttggattcattgtcacggaattcgttggggtcttgaatatattcctcttcatcaatttgcaggaggttagctactacagtcgcttgccctgttttagtgtggcaaacatccacgccaagttaaaggagggccagcatccgttgagtgattcctacaagcggtacaagcagcccggcatcaccacagccagccaggaaggacttagtagcgcgggtcaaggtcaacagggtcaccagagtcaccacccgacgcaccaaccgcatccgacggcgcagccaccacatggaatcctga

SEQ ID NO: 24231 - protein, 141 aa, DROSOPHILA
MLIGLIAYISILKAEIGSKLRPRSTLQPALIKVSYGQSFFLFVFGFIVTEFVGVLNIFLFINLQEVSYYSRLPCFSVANIHAKLKEGQHPLSDSYKRYKQPGITTASQEGLSSAGQGQQGHQSHHPTHQPHPTAQPPHGIL

SEQ ID NO: 24232 - DNA, 2678 bp, DROSOPHILA
tcgggtctcgtagtaccgatggcagtcattgggaaacggccatctctgcacagtttgggccatgcaaaatccagagaacacggcacatagtaaaacaattagtggtaacttgtttagcactgataaaagtgaaaatttagtaatgttatgaaaatatttaagtttgtacttttctctctgcctcgcgaagatttcttagtctgataccgatccgatgtttctgggtttttatatatcattgctaagtaaatacatattattgacaaattgatactatgactttagaggaattttatttattggctttcatatcatagctgtccttgaaaagataagcttgtccggtcaagtggatgggaaaataactcgtaagatgagtactaactgttgctcaccaaattcaaaaacctatattagtaattggtagttcgcgaaatttgaaaatgtgttaatctttctgattaataagaggatcagttggataaaaccagatgtctgttgaattttcattattagggaatgtatagaatagtaatttagaagatcagacctgggcagtaagaattcgatatgtacacatagcatatctaggggaaatttttttttaagatttgactttcattgtttacgcaaaatgatgttcgataaataagtgttaagcacttgaacttgataaagatatccagattattgctggtataaaaggccgagtttttccaagttgtagcatccactttcttggagctctttcagcaaacaacatcaaaagtaacaagacacattcaattttgaactcttaaggcattgaaaagtttatttttttttgcagtgcggcaaggatctgttgttatctacctaggtttgttggctttcattgcaattgtcgattgccaggaaaacaataatctcgtggtaaatgtgccgatcggttaaccagtataatgtctaggaaaataattttttacatttctagtccatagtaaccgaccactctatacaatgcccaccatttgacgatcccaaccataatgtgatgttgccatatcccaatgactgtagcaagtattacgtatgccaaaaaggacgagcctatgagcaacagtgtcctctgaatttgttctggagccagatgacctaccgctgtgactacaaggagtactccaactgcaatacgtatattccaagtcccaaccatgatgttgaggtcatatttagtgcatatcccggagattgcaggcgattctacgagacacgtatccttcgctgtgagcaaaacctccagtggagttcagtataccagagatgcgttgtcccacagtatggcgattgtcagaactctcctgtgaccgtgccacccgtagtcccctttaccccactgcctacctatccacccgttccaaccgttcccgcaaccgtgataccttatgatcccatgcccaccgctggtactccaccgcctataactcccatggaatctttacctctgccaattgacgtccaatcattgtgcaataacagtcctcccaatgcgtacattccttatccgggcagttgtaagaagtttatacattgcggaccaacagcaaccattctttcatgcgcaggctcctcgaattggaatcctgcccagcatgcctgcaccacttacagcaatgggtgccaggcttctttaaattgaaaccagagctttacccaatcaaacagaagacatgaagttacaacattttaataattacttttacaaaagcattcaataaaagatattgtgattacaattctgtaacaaaacttgcaatcgtttttaaggactgccataaagaaaaccctaaatcatctgattcggttttcggtgaaatgtgcaaagcacttggattgcagccagccaggtgaggatccgtacaggtaagaatgatgggattaaattcttctccctccgggcacgcataacccaccggaatggggtcttcacaagcaatgtacttgctacagttcccaggatagggcaccagtgatccctctgccttatctgcacaaattccattcggtgaaggcttctctgtggttgttgtggtagtaggaatagttacgggtgggattgttgtagctggaatagaacagtttgcaaaccaaggagccatacacctttccaaggcggcactaaattcctgaccctcgcgacagtcataaacgataggatcgggttgaatacattgtataaacttggagcagtcatccggatagggaactagttttccctcaggagctccatcacatggatctggttctgagcccggagtacttggtgttattaccgtggttggaccttctgtgctatctgtaactgtgggggatgtagtttggatttcacgacatgcctcgggtgaaacaccaaaaccacatttcccagtccacggatcgaaatattcctcactgccacatatacccatcatatacgaattctcgtctgtgcaataaatataccattggcagttttcttggtaaggcaaattgaggccagtgctgttggaacagatttgagtatcagggctaggagttgtaaatcccggcgatgatgttgtggtctctccattggaacaatcgctagattcccactccacacatctctggagagcctcgttgaaaaacaagctctctggacagtaaaatgcaatgggaac

SEQ ID NO: 24233 - DNA, 678 bp, DROSOPHILA
tgcccaccatttgacgatcccaaccataatgtgatgttgccatatcccaatgactgtagcaagtattacgtatgccaaaaaggacgagcctatgagcaacagtgtcctctgaatttgttctggagccagatgacctaccgctgtgactacaaggagtactccaactgcaatacgtatattccaagtcccaaccatgatgttgaggtcatatttagtgcatatcccggagattgcaggcgattctacgagacacgtatccttcgctgtgagcaaaacctccagtggagttcagtataccagagatgcgttgtcccacagtatggcgattgtcagaactctcctgtgaccgtgccacccgtagtcccctttaccccactgcctacctatccacccgttccaaccgttcccgcaaccgtgataccttatgatcccatgcccaccgctggtactccaccgcctataactcccatggaatctttacctctgccaattgacgtccaatcattgtgcaataacagtcctcccaatgcgtacattccttatccgggcagttgtaagaagtttatacattgcggaccaacagcaaccattctttcatgcgcaggctcctcgaattggaatcctgcccagcatgcctgcaccacttacagcaatgggtgccaggcttctttaaattga

SEQ ID NO: 24234 - protein, 214 aa, DROSOPHILA
MLPYPNDCSKYYVCQKGRAYEQQCPLNLFWSQMTYRCDYKEYSNCNTYIPSPNHDVEVIFSAYPGDCRRFYETRILRCEQNLQWSSVYQRCVVPQYGDCQNSPVTVPPVVPFTPLPTYPPVPTVPATVIPYDPMPTAGTPPPITPMESLPLPIDVQSLCNNSPPNAYIPYPGSCKKFIHCGPTATILSCAGSSNWNPAQHACTTYSNGCQASLN

SEQ ID NO: 24235 - DNA, 3963 bp, DROSOPHILA
ttataccgcgattacattttttgactcttgtgtaccgatgtactatcagtcaatttaattggcttaataaagagttgaacacactttaatttttcacatctagtcaaccaattacttattgttaatttaaaaaaaattgtaatataaagaaaaataataaaaagaatcccacaatcacacatgtgaataatggaaagttttgatctaagctcagaccattctccaataataatgacatacagtacaatagctcatatattgacaaaacgatacaaagtaatttctgcaaataccgaaatcaatgcgtttaaaagttatctggacgcttcttttgtttttcacatctagtcctctctatatcgcgtctatattctcgcgaatcgagccctcggtcggtttggcggtaggtgtggccgtgggatcctgcgaaaaaaattcttttccttgaatgggtgggattatgacaagtaagtgcaatagtacggtatttagcacgtccttccgtcatttgcgtcgtcatattattttcattaatacaggttttgtgcagctggtcgaccgacaaaaatcaaaacaataatgggataactgaactgaaaatatgttttcctatagttttcctatattttaaaccataaaaaatatacaacaaggacaggtgcgtcaataaagtaatttatgcagtatgtgtagaatagttttggaaaaattatattttagaataaaccttatatcataaatcacaaaatttgaagttgaagcataaaattttgtttatctacgctttttgttccttagctgtaacactttggtattgttctaactcttagaatgcagacttatgcgcgttaatattgaaatatatgactacagcgtgttagtgcgcataccttgtaagggaatacatcacattcatggactacgggacaagatatgagcatgtatatcgttgttaccgattattgatcgaatgaatatccaccattttgtagttgtgtgtttcatttagtgaaaagtcgagacgtcacaataaactggattgtttttgtcaatgatattaccaaaatgtgtttatagggtgaatttttgtgttaatacaaattgcaaatataaacagatattaaatccaattctataacataagtatataaacatatattgcttatgtgtacacatctgaatacatgtacgtattctgtttcatctgaagtggaaaagccaatatcttgctttgcactagtgcactaatgcttatttcgtaaatattggtattgaaatattatatattattttataccacattgtgtgtgtgtaatcggtcgtatatatactattatatttagctagtatggattaaaactatatttgtgtgaaatttttattaatatgctttgttttccaattattttggagatattgatcatagtttcgttttaaagcatagattccttcaggctttctcgagtatttcctatgcaaactatatgggatgtgcgaagacatatttttaaatgtttggatacccaaaatatttttaaccggaaataaaaatatttgtttagatatatgaataaattttaaactaaatcacctttgttttattatttttcatctttctattaattaattgcaataccttggaatgaaaacaataggcatgtgcaaccttttgatttatttataaataaataattaattaaatgggagccaggggtatttttacaaatggaaaatctttttatttattctttttgcataaacaactttcggataggaaaaggtagaagcttgttaagcttgttttatacgatccccggaagtgaaattgccttgttttagaacaactttatataatgattaaaaaatttacaaatgtagaatgtagaaactatttctgtatatgtatccttcttcagtgttacaagccgaggtgatctggccatatcctgtgagtcattccgtatttataaacaggagatctcgggaacttcatatatgtataagctttaaaataatcatgttgatttttgtgatatgttatatgataatgttaaaaacaacaattgtaataaataatgttatatttatataaatataaaagctgacaacctattacatatttaaatttaattaggttttcacaaactgcaacggttttattgggtgtgacaaacggcttccacgatccaggaaaagttaccgattcacattataaaatacgatatcatgcctgaaacgtaccattgcttacgaatcaatgtgaaaaaaaggagtttttttacaacaggtaagatatactcatatttatttaactgtgcccaaaacctttaaaagatttttactttttttaaggcatcaaaaatgattatagcaaggaaattagtaaaaatttaaacgaaaatcgtaatgaaatcacaaagcccaatacatgtgctttatcagtattaaaaaacgatgcaagcgcaccagctgctatactaatttgtgctcataaaacgttcactgaatgtaattgcaaaatcagcaggttaaagcctagatatttgggctccatttttatctctatcttgtcccgtaaaatgaatttacgtcaacgttatgtcaattttttatttatactattaattgcaattcaccatatttccttgtcgaagtcattattattggaggaaggaaattcaacgggcaacaacagaaccatttcacaagaaaagtttaatggaaatcataacttcagcaacagcactggaatcaacatgatttccgggacatcatctatagtgcaaaaggattatttggaaaaattaaataatattgagcgtagtgttgcagctgttctcattaaagtagcatatggtacaacctcaacaaccaaacgaagcataccagacacaagttattcactaggtctaactactgttgccacaccatttttaaccacacagaggtaagtcgttaaaaaatctcttaaaccctatcacttgatggttattgtctcgctccgattgataaacaacgaaaaatgtgttggacttaagaggcgtaaaaagtcttcatttataatctggttattgttactcttcttctggaaactggtgaagtaaaaggaaatactagatcaaacaaaaccgtccctaacgattattttcttgccctcccggtaatattatattgtagcgtggaatgagtagaatgagttcatttagttttttgtattgactaagccaagtgcagaatcaaattcagagtgacataaagacttttaattaaataaaatgggtaagtaacaacccaaaactgcaggatttcttgtttactttaatacttaaagcatagcaaatgctggagaacttcaggcaagtgaatttttagttacttcgaaaaatcgacacgacaacgaaaactacttttgcgaaatgattttcaaatgttttaaaattatttcgaacataataagtgctttcgcggcgacatttagctttttacctctgtttgagtttaagactacctccacggctgttgagaaggaaacttttaaatgaccaacaatgtatcacttgaacgcttaccacgattacaatacgttgctgcatatgagctacaaaaataaacaccctagatataagaggggcggtgaattcgaaatctatctgatggaaaggtattgtaagagttgaggcaaaattgaaattatattacaagatctcgagctccagtataacgcgtaaattgtaacaagctgttagcattttgattacaacaatgggaatttgaatcggaattctgcaagagcagaagcaaattgaatctataagctttttaacagttggagactaaaaccgaccgaagatggatgcttttaaacacatgcttaagggcgagcctgctttcgtctgaaacagatcttttaaacctttgcagtttgaatatatatgctcgcttactacgctcgcatgaaagcgt

SEQ ID NO: 24236 - DNA, 950 bp, DROSOPHILA
ttcatttagtgaaaagtcgagacgtcacaataaactggattgtttttgtcaatgatattaccaaaatgtgtttatagggtgaatttttgtgttaatacaaattgcaaatataaacagatattaaatccaattctataacataagtatataaacatatattgcttatgtgtacacatctgaatacatgttttcacaaactgcaacggttttattgggtgtgacaaacggcttccacgatccaggaaaagttaccgattcacattataaaatacgatatcatgcctgaaacgtaccattgcttacgaatcaatgtgaaaaaaaggagtttttttacaacaggcatcaaaaatgattatagcaaggaaattagtaaaaatttaaacgaaaatcgtaatgaaatcacaaagcccaatacatgtgctttatcagtattaaaaaacgatgcaagcgcaccagctgctatactaatttgtgctcataaaacgttcactgaatgtaattgcaaaatcagcaggttaaagcctagatatttgggctccatttttatctctatcttgtcccgtaaaatgaatttacgtcaacgttatgtcaattttttatttatactattaattgcaattcaccatatttccttgtcgaagtcattattattggaggaaggaaattcaacgggcaacaacagaaccatttcacaagaaaagtttaatggaaatcataacttcagcaacagcactggaatcaacatgatttccgggacatcatctatagtgcaaaaggattatttggaaaaattaaataatattgagcgtagtgttgcagctgttctcattaaagtagcatatggtacaacctcaacaaccaaacgaagcataccagacacaagttattcactaggtctaactactgttgccacaccatttttaaccacacagaggtaagtcgttaaaaaa

SEQ ID NO: 24237 - protein, 219 aa, DROSOPHILA
MPETYHCLRINVKKRSFFTTGIKNDYSKEISKNLNENRNEITKPNTCALSVLKNDASAPAAILICAHKTFTECNCKISRLKPRYLGSIFISILSRKMNLRQRYVNFLFILLIAIHHISLSKSLLLEEGNSTGNNRTISQEKFNGNHNFSNSTGINMISGTSSIVQKDYLEKLNNIERSVAAVLIKVAYGTTSTTKRSIPDTSYSLGLTTVATPFLTTQR

SEQ ID NO: 24238 - DNA, 5959 bp, DROSOPHILA
tgccttgccttaacgttattattatttaaatatagcttagaaatagtaataaccgaatcacaatatcacaaaataaatttcaaaaatgattttatattaggatatttgtcattagtgtattcagcttgcgacgtgtgaatgatttttaataaggcattgttgagtgtttgtgtccgcacttcgtgcctcaagatatgacttttgcaataaacatattcaaattcaaacatattttcatatttttattaaatttataaatttttattttctactacgtattatttttatgaaatatttatttctcaatgtaatgtctttttctgaaaaatgtatgttttaaattacagtagttctaataatttcctttgtatttgcttctaattatttagtatatttattaagtcatttgacttaatatgatgtatgtaaatgatcccattttattatgtaaaatgcacattagatttagttgttttttaatatttttttttatattccaatttgatatttttaaacagcgcgcaatttcatcatattgctacgaaattggccaaaacttcccaaatatctaaattcgtttcttcgatcagaattgatttcggcccgaaaatcgtcttctggaagaacacgcacacataaacgcgttctcgtctcttgtttttactcacacaagcaagcaaattctatttttagatttattacgctctcagcgtaaggacagagggcaattttagccgtcgccaaagaaagtgccaaacccatatatggccgtaacgcatcttgttattttagtgtctttggtaaaagggtatactagattcgtttaaaatgattcaacagacagaagggagtgttgtgtcccaaccgtataaagtatatatattcttgatcaggaatagctgagtcgatctggccatggccgcctgtccgtataaacgtcgagatctcaggaactataaaagctagtaggtttagattaagccagcatacagattctagagacaaaccaaaatgtgttgataccttttcatatttttagtagtcttgtaattttaaaagccttaatgcgccctaataagacgaaatgacaaagaaaaaaagttttttttttgtagacgtaaacaatattttaatacttataatcgttatgtatttgcatattttgtatatattttcagatatcactcgtcacatcaacaacatggtgttggtggacgtccgaaaaattatgaactagacttggagagggaccatgcattgcccacatctgcgcccaacgcagatattttaaaaagtaataacaatccgacatacccgaatccaaatcgccaccattcacatgatagggatcgtcacaggaacgttgtacttcatagttcgacgccaataccatcgagtaagtacgatggaattatttctaaaaatgatgttctttaatgtcatatctttgtagttcccaacctgttaaagaaaataaatggagcccagccgccaacaataccaatgtatcctggtgacattccatcatattctccaccgtctcgggcctttttcacacctccacttccaccagaataccaaaacccatttgcagacaagcccactttacgaggtaccaataacgagggtctaattgcagtgaataggcgtcctatcccaccgcctagtttgatgcccagccaagaccgaataccaattcgaccaccagacctgggaagcaataataacgacgccgttgtcaattcaatgacggacttaaattacgctccgtctggcatggatgcaaagcatcgtctcgaagaaaatttcgcccatggaacagtgtcagatatatccggagtagagcgaataaaagctttgaatacaccagcacgtgccagcggagaggaatatttatacgaaaaggcaagtagcgcaaaaggtcagggatcctatgaagtggatgccattggtccaaacaaaagacaggaagttttacctaatattagacgtattctgggatcaaaaaatggtgacataccagcggttttattgaagcacgtaactcagcgacccataattacattgcggcaacctccctcttccccaattgtactgatcgaaaagtcaacatcaaacgaggaaatcatagatgctgatgcaccatccgtggttagtcctaacattaatcatagcaagtaccaccccgggcagttggagtattatgaaaatgcgactgcaggaacgacgccatcagcagctgctgcaataggagatgtatcagctacttcattttcctacgccaccacaaatgcgggtcagccaggacatacaggaaagacaacggacgctattagggagcttggtacaggcgtacccgaccagaatcctattggggcagctgcagctgcgacagtacacacaacttgggcatgggcatggaatattcacatctatctgtcggttgtactcttcactattttatctgtatattcgctttacaaactgcttacctataacaagcttacacatttgttcgcacaggcatattttgtgtgtattaatctgattctgattatgatctgcatattgagaatatttttcctttgctttgatgcatacaatgttcatggtagctttaatttatttacttcagagctctttcttaatctaccgtccacatttttaacagttgctttctctgttcttatattgtttctcttccttaagtccctaaaccacaaaaataatagatactctgctctgataagaccgctgaccgttgttgtgggttgcggggtccacgttgtactttgcattacattgcattatgttgaatcctatactttaaaaaatcatcacttatactttcaacaacagcagcaacagcagtactttcgtcggcagcaactttataaccaacaaggccagcctacggctacaatgtctccatcggcaattttgccaccaccgccccgggtattaactttaatatgtcagataatttatatttttatatgcctgagcctagggctgctatatctttacatataccgcattttaaaacgcattcttcgcagcaaatctcaaaactacatacatggctatcaaaatttgtcttacgccattcacattacgattgccacagctctattgtttgtactattggcagcccttcagatattcggtgctatatatatttcatgtcgtcatacaagtattgtcgatgtcgactggctgcaatggggatatcagttctctctgcgtctgatagagatagctataattactttaatgtcctgggtagctggactaaagacaagtgtcgagcacgattctttgagtgccgttgctggagatgttcgcatgattggttctggtatgggtgcatatggccaagatggtggtacacctaacaatgcaatcagagaaaaacatgtcggaaacggcacaggcacccataactcaaatgtgacaaattttttccttccgtgcacatcaagctctagtcaggagcattttgaaactgactacccagctgtttgcaatgcaaatacgaatcttcatacatacacaatgcggacaggaaaacttatttatgatgacagttacgcccttaattctatgggaccaacaacagctacaacttcaaacgctcgtccttgtgaatatcagctacaggagcctatgtaccaaaggccatatgatacggggtcaattggaagtactttaaatcaacaacatcaattaaatcaaatgcgtttccaagagcatccgacttatatgagtacggactacatgacagattcaggaccagatcattacgaaaatccaaatttcagtttgcacagtactgcaactgaacaaaagcgaagggattacgatcaaaatgaagtttcttttaactcaaattctggggctttgcagcagcaagtagaattgttgcaaaacaattgttattctgaaccactagagcaggaaaacaagagatatgaatttaacatctttgagcgaccggtgtttaaggaaaaatcagttcacaatgttcagtcaaacagtgagtgtattcaagaccgacaaaaaataacaaatgggcgcaaaaaaaagtttaacggtgcacttgatcggcatgtctttgaaagcaagactcatgagcgccgcagttcgaattcagctaattcgtgctcttcatcaaatttgggaggtggtgggcgatttggaagttttaattcatttgaacgcggatatttcaacggcgtttgcaaaagtggtactataagcagtatagccaaggctggtgctttaggtcgaacccttgagtcaccaattgcttctgctgaaactcaacgaatagtcgccaatggatcgcagacgttaggaataccagataaagatagaccacagtattaccagagagcaagtggacgtaattcgaacttaaggtcattggagagtgaaactgaactgtttaaaagtatgcccataagggagaaccatctacaacagttaccttatggtcacaattccgaggatgaagaagatgaagaagatgacactatatcgggaaataatgtagagtgtacaaacttgataaataacgatcatggttttgtcattcctgttgaagatacggcaccaaattctatatctatgaacacaaaaacaccatcacttgccgggtcagcggcaactaaaaattccaattatcgcgcacaattacatatgccaaataatggaaagcataggtcggagttatgcacgacttcatcagcttcagtggcgtctgcatcttcaaattcatgcacaacatccagtgcttctgatagtatgcttgtagcagaccaaggctttctacgatttcggtccatagacgatccaaattgtgttcaaaacggaagtaatgtagattccgaaaggactgcagttttatcccttcgtcttaaaagttgcagtgcgacggtaaatggcatcgattgctaagatttttaattccgactcatagctttgcatgtcataacgataactatcttgttttataactcactatcaatcaagcgcggttttgattgtccttttatgtcaataagtagtaaaatagacgttttcaactatcttcaaacttgtgatatataaatatataacaaaactagcgaaaagcaaaattataacctatcattcgatatataattatctaatgcctactctaaaaaatatatatttatttaaaatatcattttagaaacgttttaatacgaaactctatatttgattttcgcgttgcatagatgtattttgttctaaatccatttcataaaacaaaattaaaacaagcattcgcaactgtatattacgtctccagccattaattatttacctagtaaatatgtatataataatatactcaataaaaagatcacagaatttctacacgaaaacatattaataatgtaacatactgattaaatttattataaaaaagtatgcggtccgattaatgcaggatacgaacttgaaaaattaaatatataacatgatatttttagattatgatttaaaaatattttgtattatcatttcagttgaatttttgcagtttgtaaaatgaaaataattgattttgttctcatatgtatggaacaaaaatataaaaaatataattttgccagtttaaagttcataaaagaaatattggttttcatgtaagataagtattttaaaaaggccgtataacataatattgcaaaataagttttagagtcgtacaactcttatatttatcggcttataaaaataaaaaaattcttaagactacaacaacctaaattcgtttaatataagttaaaagcctgttacaattaaacgttaattacatagtactgattagttaagggtattgcattttctattgttaaatcttccaaaatatacggatccttattaataattatatttaggtgttcaattgtaagaatattatttt

SEQ ID NO: 24239 - DNA, 3845 bp, DROSOPHILA
gacaaaccaaaatgtgttgataccttttcatatttttagtagtcttgtaattttaaaagccttaatgcgccctaataagacgaaatgacaaagaaaaaaagttttttttttgtagacatatcactcgtcacatcaacaacatggtgttggtggacgtccgaaaaattatgaactagacttggagagggaccatgcattgcccacatctgcgcccaacgcagatattttaaaaagtaataacaatccgacatacccgaatccaaatcgccaccattcacatgatagggatcgtcacaggaacgttgtacttcatagttcgacgccaataccatcgagtaattcccaacctgttaaagaaaataaatggagcccagccgccaacaataccaatgtatcctggtgacattccatcatattctccaccgtctcgggcctttttcacacctccacttccaccagaataccaaaacccatttgcagacaagcccactttacgaggtaccaataacgagggtctaattgcagtgaataggcgtcctatcccaccgcctagtttgatgcccagccaagaccgaataccaattcgaccaccagacctgggaagcaataataacgacgccgttgtcaattcaatgacggacttaaattacgctccgtctggcatggatgcaaagcatcgtctcgaagaaaatttcgcccatggaacagtgtcagatatatccggagtagagcgaataaaagctttgaatacaccagcacgtgccagcggagaggaatatttatacgaaaaggcaagtagcgcaaaaggtcagggatcctatgaagtggatgccattggtccaaacaaaagacaggaagttttacctaatattagacgtattctgggatcaaaaaatggtgacataccagcggttttattgaagcacgtaactcagcgacccataattacattgcggcaacctccctcttccccaattgtactgatcgaaaagtcaacatcaaacgaggaaatcatagatgctgatgcaccatccgtggttagtcctaacattaatcatagcaagtaccaccccgggcagttggagtattatgaaaatgcgactgcaggaacgacgccatcagcagctgctgcaataggagatgtatcagctacttcattttcctacgccaccacaaatgcgggtcagccaggacatacaggaaagacaacggacgctattagggagcttggtacaggcgtacccgaccagaatcctattggggcagctgcagctgcgacagtacacacaacttgggcatgggcatggaatattcacatctatctgtcggttgtactcttcactattttatctgtatattcgctttacaaactgcttacctataacaagcttacacatttgttcgcacaggcatattttgtgtgtattaatctgattctgattatgatctgcatattgagaatatttttcctttgctttgatgcatacaatgttcatggtagctttaatttatttacttcagagctctttcttaatctaccgtccacatttttaacagttgctttctctgttcttatattgtttctcttccttaagtccctaaaccacaaaaataatagatactctgctctgataagaccgctgaccgttgttgtgggttgcggggtccacgttgtactttgcattacattgcattatgttgaatcctatactttaaaaaatcatcacttatactttcaacaacagcagcaacagcagtactttcgtcggcagcaactttataaccaacaaggccagcctacggctacaatgtctccatcggcaattttgccaccaccgccccgggtattaactttaatatgtcagataatttatatttttatatgcctgagcctagggctgctatatctttacatataccgcattttaaaacgcattcttcgcagcaaatctcaaaactacatacatggctatcaaaatttgtcttacgccattcacattacgattgccacagctctattgtttgtactattggcagcccttcagatattcggtgctatatatatttcatgtcgtcatacaagtattgtcgatgtcgactggctgcaatggggatatcagttctctctgcgtctgatagagatagctataattactttaatgtcctgggtagctggactaaagacaagtgtcgagcacgattctttgagtgccgttgctggagatgttcgcatgattggttctggtatgggtgcatatggccaagatggtggtacacctaacaatgcaatcagagaaaaacatgtcggaaacggcacaggcacccataactcaaatgtgacaaattttttccttccgtgcacatcaagctctagtcaggagcattttgaaactgactacccagctgtttgcaatgcaaatacgaatcttcatacatacacaatgcggacaggaaaacttatttatgatgacagttacgcccttaattctatgggaccaacaacagctacaacttcaaacgctcgtccttgtgaatatcagctacaggagcctatgtaccaaaggccatatgatacggggtcaattggaagtactttaaatcaacaacatcaattaaatcaaatgcgtttccaagagcatccgacttatatgagtacggactacatgacagattcaggaccagatcattacgaaaatccaaatttcagtttgcacagtactgcaactgaacaaaagcgaagggattacgatcaaaatgaagtttcttttaactcaaattctggggctttgcagcagcaagtagaattgttgcaaaacaattgttattctgaaccactagagcaggaaaacaagagatatgaatttaacatctttgagcgaccggtgtttaaggaaaaatcagttcacaatgttcagtcaaacagtgagtgtattcaagaccgacaaaaaataacaaatgggcgcaaaaaaaagtttaacggtgcacttgatcggcatgtctttgaaagcaagactcatgagcgccgcagttcgaattcagctaattcgtgctcttcatcaaatttgggaggtggtgggcgatttggaagttttaattcatttgaacgcggatatttcaacggcgtttgcaaaagtggtactataagcagtatagccaaggctggtgctttaggtcgaacccttgagtcaccaattgcttctgctgaaactcaacgaatagtcgccaatggatcgcagacgttaggaataccagataaagatagaccacagtattaccagagagcaagtggacgtaattcgaacttaaggtcattggagagtgaaactgaactgtttaaaagtatgcccataagggagaaccatctacaacagttaccttatggtcacaattccgaggatgaagaagatgaagaagatgacactatatcgggaaataatgtagagtgtacaaacttgataaataacgatcatggttttgtcattcctgttgaagatacggcaccaaattctatatctatgaacacaaaaacaccatcacttgccgggtcagcggcaactaaaaattccaattatcgcgcacaattacatatgccaaataatggaaagcataggtcggagttatgcacgacttcatcagcttcagtggcgtctgcatcttcaaattcatgcacaacatccagtgcttctgatagtatgcttgtagcagaccaaggctttctacgatttcggtccatagacgatccaaattgtgttcaaaacggaagtaatgtagattccgaaaggactgcagttttatcccttcgtcttaaaagttgcagtgcgacggtaaatggcatcgattgctaa

SEQ ID NO: 24240 - protein, 1188 aa, DROSOPHILA
MIGIVTGTLYFIVRRQYHRVIPNLLKKINGAQPPTIPMYPGDIPSYSPPSRAFFTPPLPPEYQNPFADKPTLRGTNNEGLIAVNRRPIPPPSLMPSQDRIPIRPPDLGSNNNDAVVNSMTDLNYAPSGMDAKHRLEENFAHGTVSDISGVERIKALNTPARASGEEYLYEKASSAKGQGSYEVDAIGPNKRQEVLPNIRRILGSKNGDIPAVLLKHVTQRPIITLRQPPSSPIVLIEKSTSNEEIIDADAPSVVSPNINHSKYHPGQLEYYENATAGTTPSAAAAIGDVSATSFSYATTNAGQPGHTGKTTDAIRELGTGVPDQNPIGAAAAATVHTTWAWAWNIHIYLSVVLFTILSVYSLYKLLTYNKLTHLFAQAYFVCINLILIMICILRIFFLCFDAYNVHGSFNLFTSELFLNLPSTFLTVAFSVLILFLFLKSLNHKNNRYSALIRPLTVVVGCGVHVVLCITLHYVESYTLKNHHLYFQQQQQQQYFRRQQLYNQQGQPTATMSPSAILPPPPRVLTLICQIIYIFICLSLGLLYLYIYRILKRILRSKSQNYIHGYQNLSYAIHITIATALLFVLLAALQIFGAIYISCRHTSIVDVDWLQWGYQFSLRLIEIAIITLMSWVAGLKTSVEHDSLSAVAGDVRMIGSGMGAYGQDGGTPNNAIREKHVGNGTGTHNSNVTNFFLPCTSSSSQEHFETDYPAVCNANTNLHTYTMRTGKLIYDDSYALNSMGPTTATTSNARPCEYQLQEPMYQRPYDTGSIGSTLNQQHQLNQMRFQEHPTYMSTDYMTDSGPDHYENPNFSLHSTATEQKRRDYDQNEVSFNSNSGALQQQVELLQNNCYSEPLEQENKRYEFNIFERPVFKEKSVHNVQSNSECIQDRQKITNGRKKKFNGALDRHVFESKTHERRSSNSANSCSSSNLGGGGRFGSFNSFERGYFNGVCKSGTISSIAKAGALGRTLESPIASAETQRIVANGSQTLGIPDKDRPQYYQRASGRNSNLRSLESETELFKSMPIRENHLQQLPYGHNSEDEEDEEDDTISGNNVECTNLINNDHGFVIPVEDTAPNSISMNTKTPSLAGSAATKNSNYRAQLHMPNNGKHRSELCTTSSASVASASSNSCTTSSASDSMLVADQGFLRFRSIDDPNCVQNGSNVDSERTAVLSLRLKSCSATVNGIDC

SEQ ID NO: 24241 - DNA, 11114 bp, DROSOPHILA; identical to SEQ ID NO: 3721

SEQ ID NO: 24242 - DNA, 1739 bp, DROSOPHILA
cagtttattgacgtttaatgtaactgaaatggcaaagaacgcttacagcaatccatacctcacacatactaactgtgcacctaggcggagatgtaggacgtattgcgaaggaatataagccgtacgcagccgcttagtactttgtaggaactcggcttgtgcgtcactcatatcggctctattttaaaaaccaaaattactacagagtatcaaatttggacggacgcattgaaaacgcggatcatagacttacggaagatatttctgtgttcgcaaattctgtagctcatttgtatagtagcctgactaaaccatgcttcgatctgatgcttattggcttggcactaatgagatcgtctaaaaaaatgaaagctaacattataactggaccagcattatcaatcggggttattgcccttacagcccatatattaagaattgtttcaccgaagttcggacagctggtatcggaagaagcaaatagatatgggtatttaagacatatacactcccgcataataacaaatgcggaagaaattgctttttacggaggtcataaggtggaaatgcagcagctaaggcaggcatacaaccgcctggtaaatcaaatgactacaatttttaaccaaaagctttggtttataatgcttgaacaattttttatgaaatacgtttggtcgggtactggaatgattatggtatcacttccaattttgaccggcagtgacgtaggacttggaaccgttcccaacacggccatatcggaatcccgagttagcgaacgcactcaatatctaactactgctagaaatttactaatttccgcagcagacgcgattgagcgattaatgtcttcttacaaggaaatcgtgtcgcttgctggctacacatttagagtggctggtatgatggatgtctttgaggaaactgctttgggagtttattgcaagacaagtgtaatggaatccaatcagtcgaacggtattattgagtttcgtaatggaaaaccaatagcaaagggtcgcataatctattcagatgatccgaaaaatatgtcaattagccttcgtgcagtgccagtggtcacacctaactgtgatatagttgtaccaaaacttacattgtgcatagagcctggtgtgcacttgttaataactgggccaaatggatgtggaaaatcgagcttgtttagaatactaagtggactttggcctatatacgcaggggagttgcacataccaaggcctgtgaaagacgttccatgtatgttttacattccccaacgtccatatatgtcaatcggcagcctgtgtgatcaaattatataccctgacacgagggaagatatgaaacgcaagcatataactgaaaacgagctaagatccattttgaaaatggtcagccttgagcacatcgctcaacgggatagctttgacgttgttcgtgattggaaggatatattatccggaggtgaaaaacaacgtatggcgatagcccgtttgttttatcatagaccgcgctatgcccttcttgatgaatgcaccagtgcagtatctatagatgttgaaagctcgatttatgaaattgctaaaggaatgggaattactttgttaaccataacacacaggcctactttgtggaaatatcacacacatattttggagtttgacggtcttggaaactggcagtttagaaaaatgaattcagatgaagaacaaaaaggacaatttctatcgtag

SEQ ID NO: 24243 - protein, 463 aa, DROSOPHILA
MRSSKKMKANIITGPALSIGVIALTAHILRIVSPKFGQLVSEEANRYGYLRHIHSRIITNAEEIAFYGGHKVEMQQLRQAYNRLVNQMTTIFNQKLWFIMLEQFFMKYVWSGTGMIMVSLPILTGSDVGLGTVPNTAISESRVSERTQYLTTARNLLISAADAIERLMSSYKEIVSLAGYTFRVAGMMDVFEETALGVYCKTSVMESNQSNGIIEFRNGKPIAKGRIIYSDDPKNMSISLRAVPVVTPNCDIVVPKLTLCIEPGVHLLITGPNGCGKSSLFRILSGLWPIYAGELHIPRPVKDVPCMFYIPQRPYMSIGSLCDQIIYPDTREDMKRKHITENELRSILKMVSLEHIAQRDSFDVVRDWKDILSGGEKQRMAIARLFYHRPRYALLDECTSAVSIDVESSIYEIAKGMGITLLTITHRPTLWKYHTHILEFDGLGNWQFRKMNSDEEQKGQFLS

SEQ ID NO: 24244 - DNA, 10955 bp, DROSOPHILA
attgccaatatcaaaactaacttatttaatattattaataaatttcatagaatgcaaatatgagtatatattgctgttttgcaatgaaaattgcattaaaattgcgagtgcgaggcagatatgccaaaccaaaaaagtagctgtttaggttatttaggcgttactgttatcgacatgttaacttccaaatgaataatttaaacttttccggggatcgattttggttctgatgctgaatggaatatagtaactagaaaaactgaatcctggaataaacgatatctttccttctcattattctcaaagttctcggttgctttattgacattggagacaaaatcaacggaagtattttaggatatgtaaatgttaactttatatattttcagtcattttttttgctgttccaaattggtacaacaatacaagaatgaaggaagccatccctaaaagtgtactcacactacaatttgcaggatacttttaaaaggaacttttgtccaatcttttttaattaaaaacaattttaaagggcccacgtattttatttccaccgttccataattgttactaagcatgtgacgctatctttacgcacatagccacacataaaattttgattggaaaagtttgagacattactaagtaagttacttttctatttgaaaattaatccaaacctacgaaacctgccttttacaactaataactctatatatatatatatctattatttttgaaaccatcgaaagccatcgtaaaatgttattgattatatggacgattaatgccaaaatgtacgtgtttgtatatgcgtataaaaaagtatggttatttttttcagtttattgacgtttaatgtaactgaaatggcaaagaacgcttacagcaatccatacctcacacatactaactgtgcacctaggtatggctatgtacatacttttactgaaaacaacaagctttaagctcttgtgcagttcggtcatagccttagattctttcacttgcctggcagtatccttcggggactgtctattctaacagtacaaatcgtttataaacattgccgtcaagtagtcattcatagtttattttcctgacgtataaaattttctaacaaaaagttgtgcaagtagtagtagctataagtgtttttttttttattaatctttaggaaaactataatgattcacgaaatcaaactgtgtatcgtacttcagtaaaaatccaaacctagcaatctaatatacatacatgcatatacatatttatgtatatataaaaataatgtatgcttatacattcaacgaatatgttttctaaaatttaattatcgctggagtattattcacagtaaacattgaaatgtgaacaaagggtttgaaatgttatgtataaattaaaacctacctacgctcgtaagttttactgccagtaaaacatccgtttattaatagccgagtcaatttgcccatgtccgtctgaaagtatgaacgtcgagatctcaggaaatataaaagctaaagggttcagcatatagattctagagacgcatgttgccacgccctaaaaacgctcaaaggaccaacatttttgaaaaatttttgtaaattttgtcattaatttattattcttgtcaaataacttttaacctctaacgccctaaggctgccaaaccggtcacgaccacactttttaacatttttaattgttttctcattttattccacaatatctccagaaaattgattaattttccgtccgcatgtacactagctgagaaacgggtatctgatattcggggaagtcgactatagcattctctttagttaaattgttacatttgggtaatacaatttagattgagatttgtcccgtggttttcgtattgcaaacataaagcataagacaaatcacatatgtatgtatgtacgtacatatttataggtacaggttgtaggtacaatttgcctgtataaaaagattcgatgaatttaataaaaagccgatctgtccccggagttctttaatatctgacaaacatttctgcgatatgttattcaatacttacaagtttgctattaaacagtttatctctgaaagacatagagctgtttgccgtcagctgctacagttgtcgagtatcaattatttcttagtgcccgacatttttaatgttttattcatgtacattgaaacatttgtaatgtttcatttatgtacctttaggttatcaactaccaaattagttgtaaatcaaaaaaacttaaaataataacaagaaaagctttaaaattttaaactaagcccactctgttctcgacagctaaaaacatttagggaagaagataaataaaaaaacaactaactcactacccattactatctacattcatacatctatatagcttaaagtgcaaagtctgttaaatgcgtctatcatatcaggtcatcggtcagtaacaataattggatcatccattagcaattcccttctgaattgccgtaagactcgatcaatttcgaattaaattatatacaaaatatttaatatggatttccaagtgactttaaatcttacattttattccgcgataaagaatatatgtagttttttattattattttttttatttagttttttattgtacaatttgaggaaatttttctgggaaactgtacttttaccataaagcagttctgttaccctccgaaataatatcaagagagaatgctatagtcaagttccccgaccatcagatacccgttacttagctagtgtgaatgcgaacgcggaatataatcatttttctgtgatatcgatacatatgggggaaaaaagtgagagaaaaattaaaaaattgttcagaagtgtaaatatatacttaagatggtcggaaacgcttccttctgccttttacatacttttcaataaatctagtatacccttttactctttgagtaacggttttaacatagctggaagatagaactttcaaaaataaaagaagataaaacacctactatcaaatcaaagatcctttggaaggtcgtcttttcataatttttgtcttttttagcctattacaaaaaatctaacttataaacaacgctttattctgggaaggtggcagaccttaacagccaagtccaaaaaggtgtgtggtaaggctaaaaatacatatcactagcaaattctttttgaaatccccctatttccctgctggtttttgttgcacatatacctaagaaggtattattttgtgtatgtgttattttattgttatattcttctttgaaattaaaacaagatagaacgctatagtcgacttctccggttatcagctagcccaagtaagaccgaaaattttcaacatttttaattagtatcggtagaaattgggaaagaaaattaatgttaatccaaaaaaattaacttatttttcaaaagtgtgggcggtttttgaaggttgtatggcgttagagtggacttgttaaaacgctttttggcaaatcgatagaaatatacaagactaataaaattatgaaaaaatatccaacaatttttcaaaagcttgggcgtggaaacgcttccatacatacttattaatacgtggactgccgtctgcagtggtattgtctagagagtatgaatttttatggaacgatctcttgtttacagtcaatagaacgataacgtagtttcaaagtcctcttccgctaacttatcattattcttcgtactgtacttggcagtgttggtttgagttaatcagtaaattatcaaaggtgctttattttacatgttccgacttattcaaagacattatatcaaatttattggcttttctttctttttgtagagttatttccgttttaggtattttcatttgctcttatccttcgataagaactagtattatgtccatttgctaaaactttcttggctattgtaagtgtgtttttttttttttttgtccggcacgggtggattaaacatcttcctgcatttgcaaatcttaaatgcgaggtgtcaataaactccaatttttattatattcttagttgtgttaatcaaactcgcttaaatgtatgtaacacttcttgagtggcatcaacagccgattcggtctagccatgtttataattttggggtattcatgtatgcatatcctgcaacctatagccaatgagtgctttaagatcaaatgacctcagatttcagtcaacattgagggtttttaggcaatacctttctatataaatacataatagcttagttgtatgtaatgatattcttttcttttctgggggattatatattatgtaatgttcaaatttttttcttacgttgttaattctttcacaagtaactattactcagtttagctactttactctacaggcggagatgtaggacgtattgcgaaggaatataagccgtacgcagccgcttagtactttgtagggtaaatatatatttcaaaacatttctttattaattatttctgtcaataattaatttatattcttcattcctttgggttggtacaaggtgccttatgcttaactgtattattaatctaatccgtttcaaccgtttagattaaaaagtctattacgtgtcattaagattttttttaaaagttcaccttgctgttttaagctatgtacagggatacgaatttgtttttttgttataattgtttataatattaaatttttaatttataaaagaaatgtaaatttccagtcttgctatgagcactaatttagatatccgtacgggccaaaaagagtggttcttatcaaaggtttttggaacttatcaatttctacttgtttccattaagaaaattaatttaaaggcctgattaactagtttaatataagagcgcgtcgaatacggactttatttctgtggcctctaaaataattaaagttattttatcgttttaaatttagcggaagaaaatacggcttatgtttttttttttactatctagtgccatttcttaccattttgtttgaaaaaaagtattcataatttttttaacaagatcatggcaacctgttttattttgtttaagttgtagctcatattcttctactaaatacgctcattacttctcaatttctatacatatgcaaaaacaaaatggcagactatgccacaagtttgaaaaatttaatttaatatattatttataattttcagtccgatttttcataaactgttttgtgcaacgataaatccaaacgtcaaagaactattatactgtcaacaatgagtgttttatcaaaatatgttgaccggattgcagaaaagtgtgaacataatgggtttacaaaacacgcttttagctatgctctagtaactagtgctatcctagcacttaccattaaagttactatcccttacgtaaaaaacgtaaatactacgtctagtgtaaggacccaaaaaggaaaaaccaatggccaactttcaccatcgacaagagatagctcagaagaggatttcaagcttgcagaggccgaaaagttattggttgcacagcagcttaaaaaaaaagctacaaataatttagttgagcctggtctaaataaggagtttttaaaacatttgcaaatgttggccaaaataatgattcctcaggccttctgctatgaaacaggattactaagcgttcatactttttgcttgatttctcgaacatttcttagtatttatgttgccgcattggagggagctcttgttaaatttatagttcgaaaggatattaagcaatttgcccttgtattgcttaaatggtttggaattgctatccctgctactttcgttaattctatgatacggtttctcgaaagtaaactgtctctggcgtttcggtaaataacaaattttactactaagacaatataaaaattacatttttgatttagaactcggcttgtgcgtcactcatatcggctctattttaaaaaccaaaattactacagagtatcaaatttggacggacgcattgaaaacgcggatcataggtaagttattgattcaaaatttaaaaaatatttaataaggtcatctttcttgtagacttacggaagatatttctgtgttcgcaaattctgtagctcatttgtatagtagcctgactaaaccatgcttcgatctgatgcttattggcttggcactaatgagatcgtctaaaaaaatgaaagctaacattataactggttaattcaattattcttttatttggaatgcgtttctaactattttattccgacatttaggaccagcattatcaatcggggttattgcccttacagcccatatattaagaattgtttcaccgaagttcggacagctggtatcggaagaagcaaatagatatgggtatttaagacatatacactcccgcataataacaaatgcggaagaaattgctttttacggaggtcataaggtgagtttaaatttctctagaccctgaaacaaagtttaaaatgttatttttttcaataattcaacatatttataagccacctatcgggataagaattatttggtaacacttgattgaaacttttcttaatgttttcatcaagaaatgtagtcaatgaagttagatatgcgcgcgtaatttaactttagcatttttaaacttatgtacccgaaatggatgaggtattgtacgaaatattaaaaatattatattataaataatattaaaacgaaacattaaaaatcaaaggaataaaattaaaaggggtactttaattttgtacataaagtaagtgagatatctaccctttcaataatagcaagacaatacaaaaaatacaagagagctttgcggcgttagagtgggcgtggcaacaagtgttttagcaaatcgataaaaatttacaggactaataaaattatgaaaacatttagaaaaatggttcaaagatgtaggcgttgcagtttagtgcggtttaagggcgttagagtggacgtgccaaaaactatttgcaaatcgtggcaacgtgggtcaacaaacttgcgatacgtctttgtctctagaatctgtatgctgaatctcaaccttctagcttttatagttcctgtgaattcgacgttcatatggacagactgacatgatcgactcggctattgatcctgaccaaaaatatatatattctttatatggtcgggcacgctttcttctgcctcttacatactatttaacgaatctggtaatggcatcggcagatccgggcgcttaatggacgtgacatagttctgaaacaaaaggcgttactaaatctgcaacatctagctctgatatgtccgctatcatacaggcaggattgtccaatggccggatcgattggcaagtgaaccatatacaagtgacacctttaggggtcgaatttttcttagtatgctctcttactgtactagtaaaatttataaatgtttttcaacaagtttcactttgaactatttagttattttagctattaacgtttagccttgaaagaaaacactgcaattgggatttctgggtggcgcatacatacataccaaaaattcacaagtatacatatgttaatcattatttttaaattttttaggtggaaatgcagcagctaaggcaggcatacaaccgcctggtaaatcaaatgactacaatttttaaccaaaagctttggtttataatgcttgaacaattttttatgaaatacgtttggtcgggtactggaatgattatggtatcacttccaattttgaccggcagtgacgtaggacttggaaccgttcccaacacggccatatcggaatcccgagttagcgaacgcactcaatatctaactactgctagaaatttactaatttccgcagcagacgcgattgagcgattaatgtcttcttacaaggaaatcgtgtcgcttgctggctacacatttagagtggctggtatgatggatgtctttgaggaaactgctttgggagtttattgcaagacaagtgtaatggaatccaatcagtcgaacggtattattgagtttcgtaatggaaaaccaatagcaaagggtcgcataatctattcagatgatccgaaaaatatgtcaattagccttcgtgcagtgccagtggtcacacctaactgtgatatagttgtaccaaaacttacattgtgcatagagcctggtgtgcacttgttaataactgggccaaatggatgtggaaaatcgagcttgtttagaatactaagtggactttggcctatatacgcaggggagttgcacataccaaggcctgtgaaagacgttccatgtatgttttacattccccaacgtccatatatgtcaatcggcagcctgtgtgatcaaattatataccctgacacgagggaagatatgaaacgcaagcatataactgaaaacgagctaagatccattttgaaaatggtcagccttgagcacatcgctcaacggtaaattatatttagctaattttaaggaataaggaatgtcaatttccattcttattttcagggatagctttgacgttgttcgtgattggaaggatatattatccggaggtgaaaaacaacgtatggcgatagcccgtttgttttatcataggtatgaatgaagttttttcttgcatatattcgtttttggtaatgtgaaagggtagactggattcgttattgtatgttacagaaaaggaattgttttcaacctataactactaccgagttactactaaccgagttgacatggccggttctgtttttataaacgtagggatctcagaaactatagcacctaaaaaaataatattaatccagtatattttgccgaccgccatttttaacaacgatatagtagcccgtttatagcaatatcttacaagtctctcttttattttgaataccattaaattagcccaataagaccactaatatctcttaaaatatagttatacccgttaggtaaagtaaaggggtatactagattcgttgaaaagtatgtaacaggctgaaggattatcgactatataaagtcgatctagccatgtccgtctgtccgtgtgaacgtcgagatctcagaaactataaaagctagaagtttgttgacccatgtgcctcgcccactctaatgctcgcaaaccgcacaaaactgccgcgcccacattttttaaccattttccgtaattttttcataattttattgtattagtcattttttattattatattatcatattagtcttgtaaatttctatagatttgcaaaacaaacattttaccacgcccactcaaacgccgtaaagccgacgaaccggtcacgcccacactttgaaacaatttttaaatattttctcattttattccccaatatctatcgttatcccagaaaaatgatatttcacgtttgcattcacactagctgaataacgggtatctgatagtcggggaactcgactataccattctctcttgtttttatactgagttgttaatcaaacattcccgaaagttctctactagagctttatcaattttgaatagaacaatactttaagaaagaattgtagggaaagtaagttaacttcatgcttggttataagatatattgaccgctggacatcactcaattcttcctgttagaccgcgctatgcccttcttgatgaatgcaccagtgcagtatctatagatgttgaaagctcgatttatgaaattgctaaaggaatgggaattactttgttaaccataacacacaggcctactttgtggtaagatgatttaagaaaaggttcaccaaacttattaaaattcgtaccattttaggaaatatcacacacatattttggagtttgacggtcttggaaactggcagtttagaaaaatgaattcagatgaagaacaaaaaggacaatttctatcgtagtacaaagttgtttcggggaaccgaagcttttatacccgtgcagttttgacataaacttacttatcaagattgtgtacacaacagtaatagaatacagtcttccgatttataagcaaattccacaaatcgtcaggtttttaaaatcttatataaatattataattatataattattatatataatttaaactccttttattttatttttacaattttttttaaacataactaaaaatatgattttatgcataggtgtgagcaatattaaaaaaccttaaaattttaatttgaatatttaagtctgcgttttatatgtcaatatccatcgcaaaggtataaaaaatggattgtgccacatcgccttttaaattaatatttgaccaagaattgcaactttattttaaattgtagtaaattgaaataaaaggtacacttaaataaaattgctagtgtcgatgcgttttaatttttgctaaagtcaaacgacttaaagtggtaggataataatttgggtatacatggcaggtcccatatgcttatcccataaagttatcgttggtgacaactagcactgccaagagtgttccgcatagagagaacctaaaaacacaccctgcaccattttcgactatatactataaatttatgatcagaatcaaaaggggagttgacataagaataatgtaataaaaacggccatacacattggtcttgcactttgcagacacttttttcgtgaaggccaaattgctctcactcctctcgcgtaaaattaagagagtaaaaacaaagacactagaataacaagatgcgtaacgccatacgattttttggcacacgattttttcgccgtggctctagaggtggctctaggctctctcgaatttttgttagagagcgagagagcgaagagcgctacagcgaacagctcttttcaacgcacaaagtgatagcagacatctatatgtgtgcacacgtattcacatgcattgtaaatttg

SEQ ID NO: 24245 - DNA, 2366 bp, DROSOPHILA
ctttcacttgcctggcagtatccttcggggactgtctattctaacagtacaaatcgtttataaacattgccgtcaagtagtcattcatagtttattttcctgactccgatttttcataaactgttttgtgcaacgataaatccaaacgtcaaagaactattatactgtcaacaatgagtgttttatcaaaatatgttgaccggattgcagaaaagtgtgaacataatgggtttacaaaacacgcttttagctatgctctagtaactagtgctatcctagcacttaccattaaagttactatcccttacgtaaaaaacgtaaatactacgtctagtgtaaggacccaaaaaggaaaaaccaatggccaactttcaccatcgacaagagatagctcagaagaggatttcaagcttgcagaggccgaaaagttattggttgcacagcagcttaaaaaaaaagctacaaataatttagttgagcctggtctaaataaggagtttttaaaacatttgcaaatgttggccaaaataatgattcctcaggccttctgctatgaaacaggattactaagcgttcatactttttgcttgatttctcgaacatttcttagtatttatgttgccgcattggagggagctcttgttaaatttatagttcgaaaggatattaagcaatttgcccttgtattgcttaaatggtttggaattgctatccctgctactttcgttaattctatgatacggtttctcgaaagtaaactgtctctggcgtttcgaactcggcttgtgcgtcactcatatcggctctattttaaaaaccaaaattactacagagtatcaaatttggacggacgcattgaaaacgcggatcatagacttacggaagatatttctgtgttcgcaaattctgtagctcatttgtatagtagcctgactaaaccatgcttcgatctgatgcttattggcttggcactaatgagatcgtctaaaaaaatgaaagctaacattataactggaccagcattatcaatcggggttattgcccttacagcccatatattaagaattgtttcaccgaagttcggacagctggtatcggaagaagcaaatagatatgggtatttaagacatatacactcccgcataataacaaatgcggaagaaattgctttttacggaggtcataaggtggaaatgcagcagctaaggcaggcatacaaccgcctggtaaatcaaatgactacaatttttaaccaaaagctttggtttataatgcttgaacaattttttatgaaatacgtttggtcgggtactggaatgattatggtatcacttccaattttgaccggcagtgacgtaggacttggaaccgttcccaacacggccatatcggaatcccgagttagcgaacgcactcaatatctaactactgctagaaatttactaatttccgcagcagacgcgattgagcgattaatgtcttcttacaaggaaatcgtgtcgcttgctggctacacatttagagtggctggtatgatggatgtctttgaggaaactgctttgggagtttattgcaagacaagtgtaatggaatccaatcagtcgaacggtattattgagtttcgtaatggaaaaccaatagcaaagggtcgcataatctattcagatgatccgaaaaatatgtcaattagccttcgtgcagtgccagtggtcacacctaactgtgatatagttgtaccaaaacttacattgtgcatagagcctggtgtgcacttgttaataactgggccaaatggatgtggaaaatcgagcttgtttagaatactaagtggactttggcctatatacgcaggggagttgcacataccaaggcctgtgaaagacgttccatgtatgttttacattccccaacgtccatatatgtcaatcggcagcctgtgtgatcaaattatataccctgacacgagggaagatatgaaacgcaagcatataactgaaaacgagctaagatccattttgaaaatggtcagccttgagcacatcgctcaacgggatagctttgacgttgttcgtgattggaaggatatattatccggaggtgaaaaacaacgtatggcgatagcccgtttgttttatcatagaccgcgctatgcccttcttgatgaatgcaccagtgcagtatctatagatgttgaaagctcgatttatgaaattgctaaaggaatgggaattactttgttaaccataacacacaggcctactttgtggaaatatcacacacatattttggagtttgacggtcttggaaactggcagtttagaaaaatgaattcagatgaagaacaaaaaggacaatttctatcgtag

SEQ ID NO: 24246 - protein, 730 aa, DROSOPHILA; identical to SEQ ID NO: 3723

SEQ ID NO: 24247 - DNA, 10186 bp, DROSOPHILA
cacatccaatccgataacagtttgcaacaaaccacttaaacttttctttgcagcgggcaacatggcaattgtcaacacagccggtcttaagtatttcgctccgcctattaaataccagagtaagtagttgcatttaaatgtgcacaatgaatttagagcaataaatgaatgaatgtgggaacccccagatgtggagcagccggagagacccaagctgagggtcattgagcgccagccccagctgccgccaaacatccgtccgccaaagatgcagaagcgcctgcgatacatgcgcggtccggagatggtgcacaacacgctgctccataagcagtacgcaatcgtggccactggcggagggcgcctgcgctggggccactacgaaatgatgcgtttgaccatcggacgcaagatgaacgtcaacactatgttcgccacatggcgcgttcccgcaccctggcagccgatcactaagaagggccagggccaacggatgggcggcggaaagggagccatcgaccactacgtgacccccatcaaggccggtcgcgtcattgtcgagatagccggcaagtgcgagttcgttgaggtcaagcagttcctgcagcaggtggccaaccagctgcccttccaggccaccgtcgtttcccaggagatgctcgacgaacagcgcgtcgccgaggaggaacagacccgccagaatgagaacccctttaccatgaagtacgtgatccagaacaacctcagcggctgccaccgttggctctcgcccgtggaccacaagtggttcggcaagcacctgtagatgtatagcttcaattaataaagccatccttcgttaatctgttacgaaactgtttcaagtacttttgaaaactggaaatatcttaaagtaggttcgaacttcgaacttagggctcgttgttccaagccgtgactctgcggcacccaattgtggagcaaataagaaaaacgccatatgaagggaaatgtacgagttctattgcaaacatttgtttaattttccatttcgtttacgtgggtaatatgtaatgcatcatataatatgtttttcttgccgtttcgttcgcattataataaatgtataatattatgcatgtatgcgtgtgtgtatgctttgtcgcggggtatggtgtgtgagcaaatagccttctcccacggacttcagttctggaagcagaactttgacctgccgcagctcctcgtatttgtcaagtaaaatccacaccttcgttgatctagtcaagtttcggtgatcgcgattccgggatccgggatggaatcaaagccggtggaagagggctattgtgcagggatgggaattcgtgtgttttatgttatggggtcgaatggatactcgacccttacccttagctcggcttgtctaacaatcggtatcgtaccaggcagccaggttgttgttgtcattgggtggcgtcggcatggcgtccaagtcaaagttcaatgcaccggcatcaatctcgccaacgtccatgtccatggaatagggcgaagttggtgcgccgctaggcggaatggcgccgatgttaccaccgccgccgctagctccgcctacagctccaccattgccgggagcaccgccagcaccgccgccgcccactgggctgctgatctccagaccctgcatcgaatctattggtagagtatcatatcctgtgaacaaacgagatgggcaaagaatgatagggaatattgtgattagtggagaggatttacaatctccgccagccgtcaactggcagatggtgcgacaccttgaagtcctgcaaaagtggattcactgctgctcgctttaatcgggaactcatctaaaatgcatctttccaacacacttattggatttatgccgattcaaacgaaatgcagactccactcgtacacgacgaccctttaacattaacctagagtatcaaacaacaaaaatctgtcgttgaatactgcttaaaaagaactaaatacgtctaaaatacgacacgacatggacgcgttattgtcgattggaattcgtcctctgaaacttgcatgcacacacggcttacaaactagatacgagtatatacaccataaaatatatggattgtgggtggctaaaactatgcgattatcgcaggctacgtgacatgcagtatgaaccgaaataaagtttattactgctccttcatggagggagaccttaaagataaaagccgtctaatgaaaggaaacaaaatagatttatacaaaacaataaatttgcgaaattatcaaagaaacgtatgtgtttctttactattcacgatccttattttttaaggttgcactctgtggttatttgtggtagatcggtgttcgtgtgtgtgtgtagtgcaaaaatcttcaagctacgtgtaaagtccggagagatagatattcttttccaaatgtgagagagcaggggaagtaatcccgcaaaagactgaagtttatccctattatcccttattgacataattggcgcccaatgtcgggcatcggatgcacaagatttggatttatcgacaaatgtttgtataccgcaaatggaaacaggcggagttatattcacttccttcgcatgcagccgtggaactcaagggtttaacgatattagggggtaacgagcaaggagacagagatattgagatcaagcgagggaactgggtggaagagggtttcgctcacactgaagaaactaaagtgagcttaacgtcttagtttcgattaacaagtgcatatttgaatgatgaacagacatgataacgattaaatggatgcgggggtttggggctggtcccgaggatttttcgaattgtctgaacctgttaacgtttccgttggtttactttttagtggggttatgcaggattcttcttcttggggtgtggctcgaggggtacgatgggtacgagggtctcttcttacgcatatgacatacataccttgctgatggaatgcgcgacctccgtgtgaactgtgcacgctgggcggaccttgtccgtacaggccctcatatgcttcttctggtccaagcatatcctgtgatcgatcgaattcgtgtttgtttatcggtttatcggtcggtttgcgtgatatgtgcgtgatcgtacgtgtgtggttgtgtggtggatgtattttttacagtttcgttttcatttattttttgttgggatggatcagaagtgaaaagttgttaggaaagaagaagacacgcgcaaacgccagtttgcaagtgaatgtgagcgagaggaatagagagtggggtgaggttgttgtggtatcggggcggcgagagcgagacagagagtgagagtcgcattgttggattgttgttgttggtgagattttggtgcagtgattatccgtcatttcggttgttgttgcgtttcatttaccgttgcagttgtgtttatagtgatttgttgttttgttttgggttgttttggttttacacacacaaagtaaacataaaggaaaaaaagaaaagaacaaaagtaaaacaaacgtgaattaattacaaaatcaaaattaaacataaacaaagagcgcgatgacgcagcaattatacaaattgaaattcatgtaagtatgtttttggtcgggttgttttcggaggaatcgtggagggggtgaggttgggttgtgtggtttggggagggtatcaatcaaatatgatcagaactaatcggaatccgtatttgtaatcggcgttcatctacaactacctacttatcgactaacatatacggtctatcgattggtggtttacaagaaaagcaaaaaaccgaacgaaatgaacccaaatgaaatggaaattcaaaaataggttatcgaaatcgtaagcaagcgatatataggtcgatacttaatctggataccattatataatgcttgactaaagtaggttctctacaaatttacaattttatgtacagatttcgcttaacgcgctgcatttttaaatcagattcaatggaacacaagaagggcgtttaaaaagccggaatcccggggacgtcgaatttgcttagcctacttagcacgcacctgtagatcgggacccatgcccaggtcggcattggcccatatgttgttgtcctcgcgcagcagcgagttggtcagctctatggatagccgcttcttgtaatcctgcggcttgtcctcactcatgcgaaagagaacagcggcggcgtatgtggccacgccttcattgcgcgagtgcaggagatcggtcagcggcccagtggcgccctcctgctcgataatctcggcgccctccttgtcagcggcgagctcacaaagaacgccagcagccacgcgctaaagtaagaaaatattcatagtatacttgagtcacaacaagataaacttcgatctcacctgtatgttctcgatttcgttgaacagcaatcgtacaaagatcggtattaccgactgctggcgaatgagtgcccggttgtgagactcgcgggccaggatatgtagcgcccccaccgtgccctcgacaatctcctccatgcgaacgccgtcagcgtatgcggacggctgctgtgaaccagtggtggctatcgaggaacgttgctgcaaggttgcaagtataattgacgtcataattattctctccaacttatgcttccactataactaactcaccctctctgtgtcttggaaggcgcgcataagcagtcgcaccagatggtggatggccccgtgctcccgcaacggggcgtgattggccggacagagggccaaattgcgtatgagtccaatgacggccttgatcaagggccagcgtgatggtggatgcaatagctttacaatcaccgatagtccgtagtttaagcgtacggcattctgggccaactcagagtccacatgacgcgaggtcaagtgacgcagggcacatacagccggctcggtaatctcttcgcgatctccagcattgataatagtacggacgagggcgtccacaccgcccacctgacaaacggtggccttgttgcgctgattgttgcacgtcagatttgaaaggataccggcggcacaggtgaccacgttgacatcggtcgagcccagaacctggacgagagattggagcaaagcttcaaggccctccaccttagtggctgcatccgaaagattgcggagcgtccacaaacagttttgcacaaggcgcggtgacatgttacccaagtgcatagccagcgcctgcattccaccggcatccacgatggccggcttgttgctggagcaaacggagagcactttcagtacccgcgaagtggtccacagaagcttctcgtagtcgtaggagcgcataatgcgcacgagttcgttgggccctccggaggcaagaattattaacttgctctcctggttaccataggccagaatttgcaagcaatctgtgacgatagccagaaacttaacgttgtttcgttgcagcagagtaaccatcttctgaagcccgccggccaggcgcacagccatcttagagccatcctggtggagcagcaaattgtgcagagtggtaattgcatagaacagcacactctccactggcgaggagagcaacttgacgagtgccgggatgccgccactcttgaagatggccagcagaccctggcgatggtgtgataagttgtgcagtgttcctaccgctgccttggtgctctccagatcgttgctgttagagatggcacgcaccaaagcggctaccatctgagggctgttcataatggcatgtcgcgaggcctccttcttagacagctggtggaccatcatggcggcctgggaaactaccacctgatcctcatcgttcagcagcttgatcaactcgggtatggccctggttgccagctcagcgtcgtcctggtagttgatcagattgaccaccgcgtgctttagcatttgtgacggttccgaaagacgttgcactgccgtcggctgttggggatcaaactgggtggagggaatctcaatgccctcctccagggtttccggaaacatggcagcacgtacacgttgggagcgtgtctggctcagttgctggttcatatcgtccacttggtcttgtgtgaaattctgcgggaaaccggtgtccaggtcgaacataagtggatctccctccatctcctcgtcctccttgccagacagcgatggaacctgggtcacggcacccgagtggatgccggagtcgcccaagtacgaattctgctgccacatgagggtctgctccttggcggataccatcggcggcagatcaggtggattgtattgattattatgcgacactgcaaaagattgattgcaaaacgttttagagtgaattgacaaaaatatacactccaacttttctaactcgaatcaccgatgtgtttcgatcatttccattgcaacttaatcgtgttataagaccccaaagaagcagaaatgaagtgtaagaataatttttgtatgctcttctttaacttgttaacatctgtctacacattcatggtaacttttcttttttaaaaccttttgaagtggaaaaacgacagagtagaacggaatactgagtgcagcccaccatctacatataatgcaacgaattcgggtgcggggatgcacacgctttaaccctctgcaacccatttgcatgcgctttcgttaaaagatggccaaatgggaaacgacagcgactgacagcaaagtgagcagcatcccaacagccggcgcaaaaaatgcaaaaggaaaactttgaagcgtgacaaattgaacgctgcaggatattcccagaaagttcagggcgctgggcggaatgggtttggtgcagggggtcagatgctcacacatgagagggtactggcaaaaggatttgtgggcgttttgtttgccacttcagtcttaattatgccgttccaggcccagctttttgcctttgttgttttacttatgcgcggacacagcacggccacgccccttctgtatgcattcgtaattacaaacttcactgctcttcgccatccactctgcaatactacagtcaaatctcaatagatcgaacacggtgctgaatataaatgactccataaaaagcagcattgaaacatgctggtaacctatggaccaggtctccaaatgtggtctctgagttcaacaaaatggtttagcccacagctgatgaattttgttcgctataagcacatgcgactgtaatactgtaatcgcttttcgtttcatttcccaaatcgattaagcgttttttcttcgccatatccgtcgagtgggccacgcacttgaatggagtactgtgttgggatggagggcgcgggcggagcctttaattgcatgttgccgcttactaattaaattctgcacagcagcagcgccagaaaaaagcaaaggcagaagccaagaaaaatgtgcagccaactcgactgcgagttcgggagacggggtacgagaacaaggtccccggagaagaccaaggagcgatggcaaaagggtggcgtgggttggagtgccacgtgcaagtacacgagtccttgaatgtgtgtgtgcgtaagtggatagcatggggagggaatggagtttcaaaggatagtgagcagcggcctactcaagggggtttcggggttgtacagcaattagttgaaaactaaactaaatacttaatagtggtcgaattaaaaggccacttcctaaatggctatgaactgttcactactgtcgtcctagatattgacattcctcgactttctgtggcaaaagtgatgggagttcaatgaagccaacatgcattaacgagctcctcccctttggtgaagtcctctcctgcgcctctgagagcctcaccaacgcgctctgcaaatcaagtgtcaaaaagaaatcttctttcctactccgtttactgcgtcagcggaaaagtgtaaatttcaaactccgaagtagaagggagcgcttttttttttgatgaatcggatataagcacaggccgctggtggttgatggcccaacaaaaaaaagatcatcaagcattacaagtatgtagatgtacacaaattatttgtctggggtggatggatatagttgttaccctgtattctgcagacaacccacaaagggaatatcagaaacaaatgacaaaagcaaatactttatgtcaaatttgccaaatttgtcaaaaacaagcatcgctccctcatttaacgttggagaggggttgttattgtattgcgatacggggataattgtttcacagatacaatgcgctgttgcatccccttcatagggccatgtattctgactatttatcctaaatgttctaaactctagagctaccatgacttaattgcgtccattgaaacgcaatatcatctctaatttgatgaaatcggatcctgtatacaactgcatttggactgggtatacaaaagcccaaagtggaacactctgatacacagttaactttgatgctctttgcatactccctggaagatgggaaagggaagagtaccgctgctggaaatacttactggttcgattctgggctggcatgtaactcatcttggtgattgaggcgctttacaccacacctgcaagaaagagacggagagtatatgagtaatgtgctggacagtcaataacatggagttcgtgtgtgcttcggatggagaccacggaactccactaaatgggggccccggaaagaagggcttgttgtgtttgcagactgccaacagacgcagatatcgtccgttagtcacttattctagtcgttggtctttttttttaactcatttccgctttgagatgccgaagcataatatgaaatatgctgcgtatacaaacaaacgcactaatacattcttacgcaggtagaacgggtatttgtgggtatgtgtgtgtctacctgccgaagactttggccacgaaccttgagttatttaattactttgtttagcactctttcaaatctcatgcactccaacaaaaaacaaaatggatttttcacttctctcgaaaaaggcgcagcggaaaatgcgaccgaccagcacgctcgtttaaacggaacagaatccagatgcggagagcgcaagcaaagcaaggcacttgcaacaccgcgcgtgcggagtgcgggaaagggacagggaaagagactgggagagaaagtaaagggccgcggcagtgcagcatacaaatgcagtgctgcgcagagttgccacacatccaaacgattgtgcctacacacacatactcgcgtaggcagctcagaaagaatcccaactccatttcagttgtcgattagataaaacacctaacgataagcctgcctctagattcgaagaaaacgatttcctgtctgtggcattgtttacattccagcgagcaacaaaacaagcgcccgatttacgggggaggaatacataaaaatgccgtttgtgtgtatccagatcatacacacacacatacacaggcgcacatccagcgaacccctgcccacccccgcgccgacttgtttgccatggctttccaactttcatggcacacagaaactttggctttccaaacggattcactaccgactaacagtactcaccgcgtccaaggaatttaagtctgctttagagcaggatttatttatttaaaacgctataagaaacaaaataacagcgaattgtctgctcgagaaaaactgtgtatatggcgacgaaacccaactagcgatggcctgctgctgtcccgataactcgatgggccctgtgcgataggccaaaggaatttttcaaattttttttgttctgagaacacaaaaatctcacgaaatttgtatagcatttcatccttaagaaactcaattcacaatatttataatttagctaaggcgaatttatttctagttcatgttatcatgttatctcgaactcaccgtttatcttgtataaacatttaccaacacaagcacctgagtgtacatgagggtgtatgacaacacaggtacgaccaaaaactattgtttttgggcgacgaattaaagaaatatctatgactttactattacttaccgcttcgaaagtaaatttatctgctcaaaggcaggttaacgcacttttgacgcacttagatatttaaattcgacaaaaatccccgactatgaaaactgtgt

SEQ ID NO: 24248 - DNA, 3178 bp, DROSOPHILA
ctcccagtctctttccctgtccctttcccgcactccgcacgcgcggtgttgcaagtgccttgctttgcttgcgctctccgcatctggattctgttccgtttaaacgagcgtgctggtcggtcgcattttccgctgcgcctttttcgagagaagtgaaaaatccattttgttttttgttggagtgcatgagatttgaaagagtgctaaacaaagtgtggtgtaaagcgcctcaatcaccaagatgagttacatgccagcccagaatcgaaccatgtcgcataataatcaatacaatccacctgatctgccgccgatggtatccgccaaggagcagaccctcatgtggcagcagaattcgtacttgggcgactccggcatccactcgggtgccgtgacccaggttccatcgctgtctggcaaggaggacgaggagatggagggagatccacttatgttcgacctggacaccggtttcccgcagaatttcacacaagaccaagtggacgatatgaaccagcaactgagccagacacgctcccaacgtgtacgtgctgccatgtttccggaaaccctggaggagggcattgagattccctccacccagtttgatccccaacagccgacggcagtgcaacgtctttcggaaccgtcacaaatgctaaagcacgcggtggtcaatctgatcaactaccaggacgacgctgagctggcaaccagggccatacccgagttgatcaagctgctgaacgatgaggatcaggtggtagtttcccaggccgccatgatggtccaccagctgtctaagaaggaggcctcgcgacatgccattatgaacagccctcagatggtagccgctttggtgcgtgccatctctaacagcaacgatctggagagcaccaaggcagcggtaggaacactgcacaacttatcacaccatcgccagggtctgctggccatcttcaagagtggcggcatcccggcactcgtcaagttgctctcctcgccagtggagagtgtgctgttctatgcaattaccactctgcacaatttgctgctccaccaggatggctctaagatggctgtgcgcctggccggcgggcttcagaagatggttactctgctgcaacgaaacaacgttaagtttctggctatcgtcacagattgcttgcaaattctggcctatggtaaccaggagagcaagttaataattcttgcctccggagggcccaacgaactcgtgcgcattatgcgctcctacgactacgagaagcttctgtggaccacttcgcgggtactgaaagtgctctccgtttgctccagcaacaagccggccatcgtggatgccggtggaatgcaggcgctggctatgcacttgggtaacatgtcaccgcgccttgtgcaaaactgtttgtggacgctccgcaatctttcggatgcagccactaaggtggagggccttgaagctttgctccaatctctcgtccaggttctgggctcgaccgatgtcaacgtggtcacctgtgccgccggtatcctttcaaatctgacgtgcaacaatcagcgcaacaaggccaccgtttgtcaggtgggcggtgtggacgccctcgtccgtactattatcaatgctggagatcgcgaagagattaccgagccggctgtatgtgccctgcgtcacttgacctcgcgtcatgtggactctgagttggcccagaatgccgtacgcttaaactacggactatcggtgattgtaaagctattgcatccaccatcacgctggcccttgatcaaggccgtcattggactcatacgcaatttggccctctgtccggccaatcacgccccgttgcgggagcacggggccatccaccatctggtgcgactgcttatgcgcgccttccaagacacagagaggcaacgttcctcgatagccaccactggttcacagcagccgtccgcatacgctgacggcgttcgcatggaggagattgtcgagggcacggtgggggcgctacatatcctggcccgcgagtctcacaaccgggcactcattcgccagcagtcggtaataccgatctttgtacgattgctgttcaacgaaatcgagaacatacagcgcgtggctgctggcgttctttgtgagctcgccgctgacaaggagggcgccgagattatcgagcaggagggcgccactgggccgctgaccgatctcctgcactcgcgcaatgaaggcgtggccacatacgccgccgctgttctctttcgcatgagtgaggacaagccgcaggattacaagaagcggctatccatagagctgaccaactcgctgctgcgcgaggacaacaacatatgggccaatgccgacctgggcatgggtcccgatctacaggatatgcttggaccagaagaagcatatgagggcctgtacggacaaggtccgcccagcgtgcacagttcacacggaggtcgcgcattccatcagcaaggatatgatactctaccaatagattcgatgcagggtctggagatcagcagcccagtgggcggcggcggtgctggcggtgctcccggcaatggtggagctgtaggcggagctagcggcggcggtggtaacatcggcgccattccgcctagcggcgcaccaacttcgccctattccatggacatggacgttggcgagattgatgccggtgcattgaactttgacttggacgccatgccgacgccacccaatgacaacaacaacctggctgcctggtacgataccgattgttagacaagccgagctaagggtaagggtcgagtatccattcgaccccataacataaaacacacgaattcccatccctgcacaatagccctcttccaccggctttgattccatcccggatcccggaatcgcgatcaccgaaacttgactagatcaacgaaggtgtggattttacttgacaaatacgaggagctgcggcaggtcaaagttctgcttccagaactgaagtccgtgggagaaggctatttgctcacacaccataccccgcgacaaagcatacacacacgcatacatgcataatattatacatttattataatgcgaacgaaacggcaagaaaaacatattatatgatgcattacatattacccacgtaaacgaaatggaaaattaaacaaatgtttgcaatag

SEQ ID NO: 24249 - protein, 840 aa, DROSOPHILA; identical to SEQ ID NO: 7380

SEQ ID NO: 24250 - DNA, 8279 bp, DROSOPHILA
ggggtgtttggttggttaggggggggggggggctccatgtggtgccgaacgcttaatgtcaattaatttataaaaatcccccccatatgcccaacccacaccatcacgccagcaactggttttcgcggctactgtagagagagtctgattaataaacttgtgccttctgcatcctccttttttccagactgaaaaccgataatgacggaggagcctggtgtcccaagcacatggtgtcgaatgcgttgaaggagtacctgcaggtagatctgctgcagacgcacgtcatcacggcgatccgcacccagggtcgctatggcaagggtcagggtcaggagtacaccgaggcctatgtcctggagtactggcgaccgggcttcgacaagtggcagcgctggaagaacatccagggcaaggaggtaggtgtccactgtgaagccaagcatagagcatatcttccagctaatcccatctctcatctatcctccacagattctgcccggcaatatcaacacatacagcgaggtggagaatgccctgcagccgatcatcttcgcctccaagattcgcatatatccgtatggccagtacgatagaaccgtctgtctgcgcgccgagatcgtcggttgtccatgggaaggtgagtacagtcgcgggagtaggggatgccgtatccaagtggaggcgataagagcttgacatgagcaatgatagtgcggaggggctaacagcgttttagtgtcagcgctaatttatcattccacaaacccgagaggcagcctgtttgcaattagaggagcaaaagcggcttaagtgttcgcacgattggcttgtggacactcgtggcatgcggcatgcggagtgtccagatgctcgagttccagatggcttataaggcctggcatgatctgcgattcggagccactttaaataactaatgcataccacttgtttccagcataacgtaaaagtttttagctcaaggaaaccatttacttcactccaagttttgtttatttaactaccatgttcaaccttccccaaaaattccataatttccattagaccttacttaccgcattatatgcatgttccgcgaaaaccctcaaagtcgcccccgaatcgcatgacccacacaggcgagtccaagttcccaggtcagaggactatgcccaccacataacaagaaatatccaggcaacgtctggcccgaaccacgtaatccaatcaaggtgactgctacgctccatggaaccaagtgtagcgcattcctgattctttcccaacataggggcaccgcaacttgatggtcgggatttcttttcaacgccatgagcactgtacttgaaatatatatcgcgtgcagacgttgcaaaaacatcccataccaatccgattctcccggctagacccgaccgaaatcgaaatcccagacgacgacatgccgggcacgctgaacaccatgtcccgtcagtcgtccgataacaaaacaaaaaaataaataaaaaaaataaggaaaaagaacaggaaaactctgaaacaactcagtgcactgctgaaatggagtgtttacaatgcaccatcagatttgagagaatttgttatctcattagcattatccattgctaacagattgcaagcgagttactgtcattactgcatcttcgagatttttatttgaatgtcagccacactttttcccagtgtacgcaaacaacatgaccaacctggtcggcggctgctcctaacctttactttgtcgattttttgcacgcaattgtcaagtagtccacgggccagaaacaagtctggacaaacaaatttttctataatttccatgggctgggcggcgacttttccgccggcagcaatagtacacaactggccagcgaaacgcgcctaatgacaatttgtagagccccaagttccccaaatgcccccgaggagcggaaaaaggcgcggaagttgaaaatttttccgtaaattaacgcaatgtttggtcgcgggacttcggggtgatggtacaaggggaactaggaactacgaactggctcctgggaatgggacgagttcccctgataagtggcgccatttgtgtgcgcgggagcaccaagttttagctgcggcacgcccatttgcgacgaaacgggggacttggatttgaatatggatgtgtatggattcgggggtggcagacatgcaagcctcctgaccgctcacattttgcggactatcatttgatttgccacggggaatgtgaatgtgaacaggagagccgacatggcgcatttcatatgcaaattaaacaagataagatgggaatggattgtgccccgagtgggccacattgttggccctaacagcagatgggtctagacaagtgccagacggccagtggatagtggacagtgggcgaagaaatcaataaatctccttcttggggtcgcgtcgatttcattacgcgatcattaatctgctcgaaaacatgcccgaatcgaatcataattgtttataaattcaggccataaatttcggaaactgctggcatttgaatggggccctttggccccacctatagccgctcccgaagtattccgcttagggttaaagcgccacaatcgtaaaaaaaatagggttcatacgaccgacccaccagtcagtgagattatctccccactttgacatcgaaagcgtggctaagctggaatttgttacgatttaacaacagctcttgatatcgtcaaatcgaaaatggagaaggggtatggcaatgggaaagggaattgggtttgcatatgctcgagtgcattataaatgcagccagcaactgattagcgttaagccggcgatttatggaacccactgttcgggggcccataatttatgggcattttagggcattacgagccactagctcactatcttggtgttgaaacctagggaaacttcagcttcgagaggttgggcaattgaaagtagagctgccaggtgggtgccactaaatgggtagtgctttgtccacacttaaggctgctttccaattccctttgagttccggcaattccactgggaccactcagtcatccatccatccatccatctggtatcctcaatttgagtcatcagccagaagcgcgttgacattgttgctgttacagtttggcttgcgtgccacatccaagaaaggcggagagaaattacattttatatattgcagttgctcgctgtcttggcgaccaaaaataaaaaaaaaaaccaacaaaaataaaaagtgaagaaaaactccacgcacttaagcaaggacttgtccttactttgctcatttcttttttttggccaacagtcgcgacacgcaaataaggatcgcatgctggcacgcgaataacgaggcacacagacagcggaggtggaggcatccatcctgctgccccccagtgctccatggcattgcgtgaacttcgtcgcagcggaggcaattgaaaaacgcgctgccccgaatgtctttgcagttaattaaatatgccatataacgtttacattcggtttaatatcgtgtcgcaggaggaggaggaggaggaggaggagtaggtcttatctgccagctccggcgtaattcatgtaattaaacgaggcggtccaggcagtccgaaggccttgaataataattaatattttcgttcgaacgcaccacccacttccatatccaccacatatcatgatcgataagggtcgtttgcccacctgagcagccccatcatcattatccacatatgcatgtgcgcccagtgcgtaggaggtccctaattacgtgtaattatgtgatttttggtaattattggaaaattccaacgactgccttgcgccgcctatctatcgatatatctatcctgtgagcttgtttgtccgcgtgtcctgtttaccacgtgacccgattgtgtaaatagaaattcaagtgaattagttaagcgtgtgtcggagttcccccccccccccccacaatcggtgcaccctattttccggacagggtataattatatcgagtgcctggcaaccccgatttgttgttttttttttcgaactgatctaattgttttcggtggcggagtgggggcggccattcgattttgtaattagtgtcaggtgtttgctggcgagtgccggcaatttggtatccttattcgttggattgaagccctagcttttcggttacttggtttccgcttttactttagccagctaatccccacacaaccagcgaaggaaacccatgactcagcccccgagaataacgcttgactttgacattgaaaaactatagccggcaagtttctcgatccccttcgattaatgcccaacataaccaccgaaaccgaatgacagactcgaggggaggcttggttgcttccaaagtggccacaaaacgaaattatgtttcaagtaactcaatatgctccacacctcctggggcagccgaatcactgaatccctcgtcttgggggagtacgcagtggaaagttttaatttagcgcggttttaaggccaacgaagtggggaaggcagccacactggagctctcgattgaggcagatcctaatattattaaatattaagtttgtccttgttccgcagctctgtcacacaacttttctttggctaagtgtagcaccacagaactcggcattttgtcagacatttgtcttacccacgtgacgtgaaacgagtatttgacatgtcttgtgtgtgatttccccaattctcatccccatcctcatacccatcccattcaatctccttagtcggcagctcgggtttcgttattttcgtcttaaagttttttgtttgaattccccgaatttccacactcgaaatttaaatgtatctcattcctttcctttccgttctcagagggcatcgtgtcttacagcattccgaagggcgtgcaacgcggcatggaggtggatctgtcggataaaacctacgatggcaacgagcagggcgatcgctatgtggacggacttggtcagctggtggatgggcagaagggcaaggacaacttccgcaccgacatccatggattcggaaagggtgagtaactgaagcgtgccacttgcgcgaaacttttccattaatttgcccgaaaatatgaaatttccctggctaaaacagtcccatcatttaggccatccgcttcccgtttgaaactgaaaactatgagcctaaaaggtttgccttccgcagccataactttctcctaacaactttacactaagcactgtggtcgaatttggaagatatattcataaaatcatacaagtaatagaatttagatgcgataatagcaggaatcgtattatttgtttatagatatttgcaaatttcaagtactttctccctcactttcacccattcgagaaccatttgtttatgcccacagtgcggcgatggcccattgaaatcgaaaagatttatggcaacagaaagaaactgattaacatcgaataatgacaaaagttcagcgacgggaggagcatggggcacatctgacccccattgcgccgtcgaaagctcacttcattgaacatcgatggggggaaaactttggcctcgccaataatttgactgcacaacacaataagctaaaataaataataactttggaccatttgctggcgtcgcagtaaaacttgccggataccaggccaagatatagactgccacgccccctcctctgccactctgccagtatcctcaacgccgatgggcggcggcagtaaaaaaatgtaaacattatgcatagttgataatttatggcaactctggcattcatttccgccccaaaaatgcaaaagttctggaatttgcgaagccagccagtttatatttttccatctcgccccgccccgcgacttccattgaatgccccatgcgctctgcccctttccacatgccccatggattggcaaatggccaataatcgaaattattgagaatcgagaattccacgcaggagcaaaagttcggttggacaattagacatgcagtcgctgtgtctgcggaaattcgagacgagctcgagacggagtcataaaggcaacgcattgcaacggcaaagtttccggcgcataattccgattccgatttcgattctgattctgatttcgattcgcggcactcccatatctcggcttttatggcaactatttgctcgtcttctgcttatttgcattataagtgggaatcaatactccgccaggctggtggtgtgttgcatgccccaagggaggcggcggcattgtataaattctagttaggtcttgccctccaatcccataagcatacgagtatagttgctgcaagctaatattgcatgatttctgcttaagggggttggtggggggagggggatggcaactttgctcccctgaagtcctttctaagccccccacgtaggggactcgtcaccccactgaaattagggccacgcaaacaaggcagcggcagaaaaaatggcttaaatgtcgcattggccattatttctagttatacagagtctaccctcgaacccaaaaacacaaacccaaacccaaaccgagtattcaagcccaaaaaaaaaaaacccttcgtgcgcctgccgtgagcatttatttgttttgggcgcatttggggaaaacttcaccccaaatgtgccattgacaatgccaggttggggacttaaatagctttacatgtcagtccgccgcagggctgctctattgatttctctcccccattccacggaaatgttcattttatttcattttgatgggtttttattcatttcaggttatgaatggattggctggcgtaacgatacgcccggactgctgggaaaaccggttgaaatagtctttgagtttgatacggttcgcaatttcagtgccatcgtcctgcacacaaacaatatgttcactaaggatgttcaggtgagcacgtagtttagtcttagaaataccaaattaatagccaaattcgttatttataagcgaactaaaacgatatcccaattcttcaccaggtatttgtgcatgccaaggtgttcttcagcatcggaggtcgctacttttcgggtgaacctgtgcaattttcctatatgcccgatacgataatggatcatgcaagggatgttaccatcaaactgcaccaccgggtgggcaaatatttgaaaatcaatttgtactttgccgtcaaatggattatgctctccgagatcagctttatatccggtaagtgtggcacgtgagatgctgtgatgttaaaacgaatgaatctggcacagaattgcagtgaattgcatttgccaagtgaggcaggccgcttgaggaaatggaattgcatacgtacaaatgcatttttcagcttcatttcactctcgagctctcgattatgcgacaacacaacgtctaagggctaagggctgaaggctgaaggctgcgtgatttgttgggcggaggagcagtgcattactcctaacaggggataaaacatttttccaacattttggccaataacaatggactgcagcgtgtgtggtggtgaggatggggatgagtggaaaaggccccgagataaacgaacacaaacattttcctctggctggaaaactaaagtcaattgaatgcgcaaaacccgtctgcttgcaaaaatgtaaacaatccgagactcaagggtagatgaaactatgaattgcatttcagcttacttttccatgaatatcccgacatgtcccgattaaaattttccccaccgacaggctcaatccggattcaaccctccgctctaccaattactataactccggtcagtgaaccgaagaccgcttaaattcattgtgttttcggtggagaatccctcgtaaatccctccgttgttaggtgtgaaatagggcaaggggatgagtttgattgatgagctcaatagagcgtgccgtatgaatagggatttcctgtactttacattttcccggcagatggcacttggatttgtgatggcactgataggggaacctaatagctttacgcagggaagttgatcataaatcgaactgagctccgtttttataagtcaattagtcgggctaggggagggaaatcagctgaacgccctgcgaaaatatattagaaaaggttttcgaaatgaaagacaacaaaggttccaaaattcctaagacgcataagaggctcagcaagctcacacaaaggaacccagcgttcttaagttcgggactataatggacatgccac

SEQ ID NO: 24251 - DNA, 972 bp, DROSOPHILA
atgcccaacccacaccatcacgccagcaactggttttcgcggctactactgaaaaccgataatgacggaggagcctggtgtcccaagcacatggtgtcgaatgcgttgaaggagtacctgcaggtagatctgctgcagacgcacgtcatcacggcgatccgcacccagggtcgctatggcaagggtcagggtcaggagtacaccgaggcctatgtcctggagtactggcgaccgggcttcgacaagtggcagcgctggaagaacatccagggcaaggagattctgcccggcaatatcaacacatacagcgaggtggagaatgccctgcagccgatcatcttcgcctccaagattcgcatatatccgtatggccagtacgatagaaccgtctgtctgcgcgccgagatcgtcggttgtccatgggaagagggcatcgtgtcttacagcattccgaagggcgtgcaacgcggcatggaggtggatctgtcggataaaacctacgatggcaacgagcagggcgatcgctatgtggacggacttggtcagctggtggatgggcagaagggcaaggacaacttccgcaccgacatccatggattcggaaagggttatgaatggattggctggcgtaacgatacgcccggactgctgggaaaaccggttgaaatagtctttgagtttgatacggttcgcaatttcagtgccatcgtcctgcacacaaacaatatgttcactaaggatgttcaggtatttgtgcatgccaaggtgttcttcagcatcggaggtcgctacttttcgggtgaacctgtgcaattttcctatatgcccgatacgataatggatcatgcaagggatgttaccatcaaactgcaccaccgggtgggcaaatatttgaaaatcaatttgtactttgccgtcaaatggattatgctctccgagatcagctttatatccggtaagtgtggcacgtga

SEQ ID NO: 24252 - protein, 323 aa, DROSOPHILA
MPNPHHHASNWFSRLLLKTDNDGGAWCPKHMVSNALKEYLQVDLLQTHVITAIRTQGRYGKGQGQEYTEAYVLEYWRPGFDKWQRWKNIQGKEILPGNINTYSEVENALQPIIFASKIRIYPYGQYDRTVCLRAEIVGCPWEEGIVSYSIPKGVQRGMEVDLSDKTYDGNEQGDRYVDGLGQLVDGQKGKDNFRTDIHGFGKGYEWIGWRNDTPGLLGKPVEIVFEFDTVRNFSAIVLHTNNMFTKDVQVFVHAKVFFSIGGRYFSGEPVQFSYMPDTIMDHARDVTIKLHHRVGKYLKINLYFAVKWIMLSEISFISGKCGT

SEQ ID NO: 24253 - DNA, 11200 bp, DROSOPHILA
cacatccaatccgataacagtttgcaacaaaccacttaaacttttctttgcagcgggcaacatggcaattgtcaacacagccggtcttaagtatttcgctccgcctattaaataccagagtaagtagttgcatttaaatgtgcacaatgaatttagagcaataaatgaatgaatgtgggaacccccagatgtggagcagccggagagacccaagctgagggtcattgagcgccagccccagctgccgccaaacatccgtccgccaaagatgcagaagcgcctgcgatacatgcgcggtccggagatggtgcacaacacgctgctccataagcagtacgcaatcgtggccactggcggagggcgcctgcgctggggccactacgaaatgatgcgtttgaccatcggacgcaagatgaacgtcaacactatgttcgccacatggcgcgttcccgcaccctggcagccgatcactaagaagggccagggccaacggatgggcggcggaaagggagccatcgaccactacgtgacccccatcaaggccggtcgcgtcattgtcgagatagccggcaagtgcgagttcgttgaggtcaagcagttcctgcagcaggtggccaaccagctgcccttccaggccaccgtcgtttcccaggagatgctcgacgaacagcgcgtcgccgaggaggaacagacccgccagaatgagaacccctttaccatgaagtacgtgatccagaacaacctcagcggctgccaccgttggctctcgcccgtggaccacaagtggttcggcaagcacctgtagatgtatagcttcaattaataaagccatccttcgttaatctgttacgaaactgtttcaagtacttttgaaaactggaaatatcttaaagtaggttcgaacttcgaacttagggctcgttgttccaagccgtgactctgcggcacccaattgtggagcaaataagaaaaacgccatatgaagggaaatgtacgagttctattgcaaacatttgtttaattttccatttcgtttacgtgggtaatatgtaatgcatcatataatatgtttttcttgccgtttcgttcgcattataataaatgtataatattatgcatgtatgcgtgtgtgtatgctttgtcgcggggtatggtgtgtgagcaaatagccttctcccacggacttcagttctggaagcagaactttgacctgccgcagctcctcgtatttgtcaagtaaaatccacaccttcgttgatctagtcaagtttcggtgatcgcgattccgggatccgggatggaatcaaagccggtggaagagggctattgtgcagggatgggaattcgtgtgttttatgttatggggtcgaatggatactcgacccttacccttagctcggcttgtctaacaatcggtatcgtaccaggcagccaggttgttgttgtcattgggtggcgtcggcatggcgtccaagtcaaagttcaatgcaccggcatcaatctcgccaacgtccatgtccatggaatagggcgaagttggtgcgccgctaggcggaatggcgccgatgttaccaccgccgccgctagctccgcctacagctccaccattgccgggagcaccgccagcaccgccgccgcccactgggctgctgatctccagaccctgcatcgaatctattggtagagtatcatatcctgtgaacaaacgagatgggcaaagaatgatagggaatattgtgattagtggagaggatttacaatctccgccagccgtcaactggcagatggtgcgacaccttgaagtcctgcaaaagtggattcactgctgctcgctttaatcgggaactcatctaaaatgcatctttccaacacacttattggatttatgccgattcaaacgaaatgcagactccactcgtacacgacgaccctttaacattaacctagagtatcaaacaacaaaaatctgtcgttgaatactgcttaaaaagaactaaatacgtctaaaatacgacacgacatggacgcgttattgtcgattggaattcgtcctctgaaacttgcatgcacacacggcttacaaactagatacgagtatatacaccataaaatatatggattgtgggtggctaaaactatgcgattatcgcaggctacgtgacatgcagtatgaaccgaaataaagtttattactgctccttcatggagggagaccttaaagataaaagccgtctaatgaaaggaaacaaaatagatttatacaaaacaataaatttgcgaaattatcaaagaaacgtatgtgtttctttactattcacgatccttattttttaaggttgcactctgtggttatttgtggtagatcggtgttcgtgtgtgtgtgtagtgcaaaaatcttcaagctacgtgtaaagtccggagagatagatattcttttccaaatgtgagagagcaggggaagtaatcccgcaaaagactgaagtttatccctattatcccttattgacataattggcgcccaatgtcgggcatcggatgcacaagatttggatttatcgacaaatgtttgtataccgcaaatggaaacaggcggagttatattcacttccttcgcatgcagccgtggaactcaagggtttaacgatattagggggtaacgagcaaggagacagagatattgagatcaagcgagggaactgggtggaagagggtttcgctcacactgaagaaactaaagtgagcttaacgtcttagtttcgattaacaagtgcatatttgaatgatgaacagacatgataacgattaaatggatgcgggggtttggggctggtcccgaggatttttcgaattgtctgaacctgttaacgtttccgttggtttactttttagtggggttatgcaggattcttcttcttggggtgtggctcgaggggtacgatgggtacgagggtctcttcttacgcatatgacatacataccttgctgatggaatgcgcgacctccgtgtgaactgtgcacgctgggcggaccttgtccgtacaggccctcatatgcttcttctggtccaagcatatcctgtgatcgatcgaattcgtgtttgtttatcggtttatcggtcggtttgcgtgatatgtgcgtgatcgtacgtgtgtggttgtgtggtggatgtattttttacagtttcgttttcatttattttttgttgggatggatcagaagtgaaaagttgttaggaaagaagaagacacgcgcaaacgccagtttgcaagtgaatgtgagcgagaggaatagagagtggggtgaggttgttgtggtatcggggcggcgagagcgagacagagagtgagagtcgcattgttggattgttgttgttggtgagattttggtgcagtgattatccgtcatttcggttgttgttgcgtttcatttaccgttgcagttgtgtttatagtgatttgttgttttgttttgggttgttttggttttacacacacaaagtaaacataaaggaaaaaaagaaaagaacaaaagtaaaacaaacgtgaattaattacaaaatcaaaattaaacataaacaaagagcgcgatgacgcagcaattatacaaattgaaattcatgtaagtatgtttttggtcgggttgttttcggaggaatcgtggagggggtgaggttgggttgtgtggtttggggagggtatcaatcaaatatgatcagaactaatcggaatccgtatttgtaatcggcgttcatctacaactacctacttatcgactaacatatacggtctatcgattggtggtttacaagaaaagcaaaaaaccgaacgaaatgaacccaaatgaaatggaaattcaaaaataggttatcgaaatcgtaagcaagcgatatataggtcgatacttaatctggataccattatataatgcttgactaaagtaggttctctacaaatttacaattttatgtacagatttcgcttaacgcgctgcatttttaaatcagattcaatggaacacaagaagggcgtttaaaaagccggaatcccggggacgtcgaatttgcttagcctacttagcacgcacctgtagatcgggacccatgcccaggtcggcattggcccatatgttgttgtcctcgcgcagcagcgagttggtcagctctatggatagccgcttcttgtaatcctgcggcttgtcctcactcatgcgaaagagaacagcggcggcgtatgtggccacgccttcattgcgcgagtgcaggagatcggtcagcggcccagtggcgccctcctgctcgataatctcggcgccctccttgtcagcggcgagctcacaaagaacgccagcagccacgcgctaaagtaagaaaatattcatagtatacttgagtcacaacaagataaacttcgatctcacctgtatgttctcgatttcgttgaacagcaatcgtacaaagatcggtattaccgactgctggcgaatgagtgcccggttgtgagactcgcgggccaggatatgtagcgcccccaccgtgccctcgacaatctcctccatgcgaacgccgtcagcgtatgcggacggctgctgtgaaccagtggtggctatcgaggaacgttgctgcaaggttgcaagtataattgacgtcataattattctctccaacttatgcttccactataactaactcaccctctctgtgtcttggaaggcgcgcataagcagtcgcaccagatggtggatggccccgtgctcccgcaacggggcgtgattggccggacagagggccaaattgcgtatgagtccaatgacggccttgatcaagggccagcgtgatggtggatgcaatagctttacaatcaccgatagtccgtagtttaagcgtacggcattctgggccaactcagagtccacatgacgcgaggtcaagtgacgcagggcacatacagccggctcggtaatctcttcgcgatctccagcattgataatagtacggacgagggcgtccacaccgcccacctgacaaacggtggccttgttgcgctgattgttgcacgtcagatttgaaaggataccggcggcacaggtgaccacgttgacatcggtcgagcccagaacctggacgagagattggagcaaagcttcaaggccctccaccttagtggctgcatccgaaagattgcggagcgtccacaaacagttttgcacaaggcgcggtgacatgttacccaagtgcatagccagcgcctgcattccaccggcatccacgatggccggcttgttgctggagcaaacggagagcactttcagtacccgcgaagtggtccacagaagcttctcgtagtcgtaggagcgcataatgcgcacgagttcgttgggccctccggaggcaagaattattaacttgctctcctggttaccataggccagaatttgcaagcaatctgtgacgatagccagaaacttaacgttgtttcgttgcagcagagtaaccatcttctgaagcccgccggccaggcgcacagccatcttagagccatcctggtggagcagcaaattgtgcagagtggtaattgcatagaacagcacactctccactggcgaggagagcaacttgacgagtgccgggatgccgccactcttgaagatggccagcagaccctggcgatggtgtgataagttgtgcagtgttcctaccgctgccttggtgctctccagatcgttgctgttagagatggcacgcaccaaagcggctaccatctgagggctgttcataatggcatgtcgcgaggcctccttcttagacagctggtggaccatcatggcggcctgggaaactaccacctgatcctcatcgttcagcagcttgatcaactcgggtatggccctggttgccagctcagcgtcgtcctggtagttgatcagattgaccaccgcgtgctttagcatttgtgacggttccgaaagacgttgcactgccgtcggctgttggggatcaaactgggtggagggaatctcaatgccctcctccagggtttccggaaacatggcagcacgtacacgttgggagcgtgtctggctcagttgctggttcatatcgtccacttggtcttgtgtgaaattctgcgggaaaccggtgtccaggtcgaacataagtggatctccctccatctcctcgtcctccttgccagacagcgatggaacctgggtcacggcacccgagtggatgccggagtcgcccaagtacgaattctgctgccacatgagggtctgctccttggcggataccatcggcggcagatcaggtggattgtattgattattatgcgacactgcaaaagattgattgcaaaacgttttagagtgaattgacaaaaatatacactccaacttttctaactcgaatcaccgatgtgtttcgatcatttccattgcaacttaatcgtgttataagaccccaaagaagcagaaatgaagtgtaagaataatttttgtatgctcttctttaacttgttaacatctgtctacacattcatggtaacttttcttttttaaaaccttttgaagtggaaaaacgacagagtagaacggaatactgagtgcagcccaccatctacatataatgcaacgaattcgggtgcggggatgcacacgctttaaccctctgcaacccatttgcatgcgctttcgttaaaagatggccaaatgggaaacgacagcgactgacagcaaagtgagcagcatcccaacagccggcgcaaaaaatgcaaaaggaaaactttgaagcgtgacaaattgaacgctgcaggatattcccagaaagttcagggcgctgggcggaatgggtttggtgcagggggtcagatgctcacacatgagagggtactggcaaaaggatttgtgggcgttttgtttgccacttcagtcttaattatgccgttccaggcccagctttttgcctttgttgttttacttatgcgcggacacagcacggccacgccccttctgtatgcattcgtaattacaaacttcactgctcttcgccatccactctgcaatactacagtcaaatctcaatagatcgaacacggtgctgaatataaatgactccataaaaagcagcattgaaacatgctggtaacctatggaccaggtctccaaatgtggtctctgagttcaacaaaatggtttagcccacagctgatgaattttgttcgctataagcacatgcgactgtaatactgtaatcgcttttcgtttcatttcccaaatcgattaagcgttttttcttcgccatatccgtcgagtgggccacgcacttgaatggagtactgtgttgggatggagggcgcgggcggagcctttaattgcatgttgccgcttactaattaaattctgcacagcagcagcgccagaaaaaagcaaaggcagaagccaagaaaaatgtgcagccaactcgactgcgagttcgggagacggggtacgagaacaaggtccccggagaagaccaaggagcgatggcaaaagggtggcgtgggttggagtgccacgtgcaagtacacgagtccttgaatgtgtgtgtgcgtaagtggatagcatggggagggaatggagtttcaaaggatagtgagcagcggcctactcaagggggtttcggggttgtacagcaattagttgaaaactaaactaaatacttaatagtggtcgaattaaaaggccacttcctaaatggctatgaactgttcactactgtcgtcctagatattgacattcctcgactttctgtggcaaaagtgatgggagttcaatgaagccaacatgcattaacgagctcctcccctttggtgaagtcctctcctgcgcctctgagagcctcaccaacgcgctctgcaaatcaagtgtcaaaaagaaatcttctttcctactccgtttactgcgtcagcggaaaagtgtaaatttcaaactccgaagtagaagggagcgcttttttttttgatgaatcggatataagcacaggccgctggtggttgatggcccaacaaaaaaaagatcatcaagcattacaagtatgtagatgtacacaaattatttgtctggggtggatggatatagttgttaccctgtattctgcagacaacccacaaagggaatatcagaaacaaatgacaaaagcaaatactttatgtcaaatttgccaaatttgtcaaaaacaagcatcgctccctcatttaacgttggagaggggttgttattgtattgcgatacggggataattgtttcacagatacaatgcgctgttgcatccccttcatagggccatgtattctgactatttatcctaaatgttctaaactctagagctaccatgacttaattgcgtccattgaaacgcaatatcatctctaatttgatgaaatcggatcctgtatacaactgcatttggactgggtatacaaaagcccaaagtggaacactctgatacacagttaactttgatgctctttgcatactccctggaagatgggaaagggaagagtaccgctgctggaaatacttactggttcgattctgggctggcatgtaactcatcttggtgattgaggcgctttacaccacacctgcaagaaagagacggagagtatatgagtaatgtgctggacagtcaataacatggagttcgtgtgtgcttcggatggagaccacggaactccactaaatgggggccccggaaagaagggcttgttgtgtttgcagactgccaacagacgcagatatcgtccgttagtcacttattctagtcgttggtctttttttttaactcatttccgctttgagatgccgaagcataatatgaaatatgctgcgtatacaaacaaacgcactaatacattcttacgcaggtagaacgggtatttgtgggtatgtgtgtgtctacctgccgaagactttggccacgaaccttgagttatttaattactttgtttagcactctttcaaatctcatgcactccaacaaaaaacaaaatggatttttcacttctctcgaaaaaggcgcagcggaaaatgcgaccgaccagcacgctcgtttaaacggaacagaatccagatgcggagagcgcaagcaaagcaaggcacttgcaacaccgcgcgtgcggagtgcgggaaagggacagggaaagagactgggagagaaagtaaagggccgcggcagtgcagcatacaaatgcagtgctgcgcagagttgccacacatccaaacgattgtgcctacacacacatactcgcgtaggcagctcagaaagaatcccaactccatttcagttgtcgattagataaaacacctaacgataagcctgcctctagattcgaagaaaacgatttcctgtctgtggcattgtttacattccagcgagcaacaaaacaagcgcccgatttacgggggaggaatacataaaaatgccgtttgtgtgtatccagatcatacacacacacatacacaggcgcacatccagcgaacccctgcccacccccgcgccgacttgtttgccatggctttccaactttcatggcacacagaaactttggctttccaaacggattcactaccgactaacagtactcaccgcgtccaaggaatttaagtctgctttagagcaggatttatttatttaaaacgctataagaaacaaaataacagcgaattgtctgctcgagaaaaactgtgtatatggcgacgaaacccaactagcgatggcctgctgctgtcccgataactcgatgggccctgtgcgataggccaaaggaatttttcaaattttttttgttctgagaacacaaaaatctcacgaaatttgtatagcatttcatccttaagaaactcaattcacaatatttataatttagctaaggcgaatttatttctagttcatgttatcatgttatctcgaactcaccgtttatcttgtataaacatttaccaacacaagcacctgagtgtacatgagggtgtatgacaacacaggtacgaccaaaaactattgtttttgggcgacgaattaaagaaatatctatgactttactattacttaccgcttcgaaagtaaatttatctgctcaaaggcaggttaacgcacttttgacgcacttagatatttaaattcgacaaaaatccccgactatgaaaactgtgtatatgagcgcagaacagataaccgataactcctctatcgcaggtggctgccaacttgcttcaaaatagaaagcgcactttttaaatttccaaaagtattcaaacactggtctttaatttcttaatacatatttaagttgggcaagcaatattggtttatgcagtcgtagaagtgggttcatcggttatggtcacagcagctggcggcggatcgccggccttccgttgatccctaaagaacatgacccacgcgctcttatggatctctattccatcacataggccatacacctgggcaaatccgaaataggcagcaacagcggcgacaccgaagagaggtaccattatgactagtcctcccaggcaggcgaagaacaccatggacacaatggtcaggagtgtgcctaaaacgagtcgataagaacgtgatctctggtaaacactacggaacgcaccttctagcaccagcaaacctgtaaaggtcataaccatggtggctattccaaacccaaatattataaggaagggcagcatgaatacaagaccaccagctagcaggcagatagcaacgtgcggattccgggtgcaccaggccgcggtggcctccaggaaatcatttccacctagctcggacatcacaaaatctgccaggcggcagatttgaagccctgcaatatggcaacgttataacaaaggcaacttttgttacgcggtgtgatgcataaaacaggttaacaaccgtacagagtagtacatatataagtaactaattgtggcagtaagcaattaagcgcttttacagatagtacttcaactagtggacatacatgacctgtagagagtctggagcaagctctccaggaactggtcgccagtcagaactcctgcactacgatcgcctgggccatgtatctttacgtgctccggtttgctctctgttcccgatcccgcagacttcttggcgtttgcctctttggctgctttgcgagccttgttcgagtgagcctgcagagtc

SEQ ID NO: 24254 - DNA, 3081 bp, DROSOPHILA
ttctgcgctcatatacacagttttcatagtcggggatttttgtcgaatttaaatatctaagtgcgtcaaaagtgcgttaacctgcctttgagcagataaatttactttcgaagcggtgtggtgtaaagcgcctcaatcaccaagatgagttacatgccagcccagaatcgaaccatgtcgcataataatcaatacaatccacctgatctgccgccgatggtatccgccaaggagcagaccctcatgtggcagcagaattcgtacttgggcgactccggcatccactcgggtgccgtgacccaggttccatcgctgtctggcaaggaggacgaggagatggagggagatccacttatgttcgacctggacaccggtttcccgcagaatttcacacaagaccaagtggacgatatgaaccagcaactgagccagacacgctcccaacgtgtacgtgctgccatgtttccggaaaccctggaggagggcattgagattccctccacccagtttgatccccaacagccgacggcagtgcaacgtctttcggaaccgtcacaaatgctaaagcacgcggtggtcaatctgatcaactaccaggacgacgctgagctggcaaccagggccatacccgagttgatcaagctgctgaacgatgaggatcaggtggtagtttcccaggccgccatgatggtccaccagctgtctaagaaggaggcctcgcgacatgccattatgaacagccctcagatggtagccgctttggtgcgtgccatctctaacagcaacgatctggagagcaccaaggcagcggtaggaacactgcacaacttatcacaccatcgccagggtctgctggccatcttcaagagtggcggcatcccggcactcgtcaagttgctctcctcgccagtggagagtgtgctgttctatgcaattaccactctgcacaatttgctgctccaccaggatggctctaagatggctgtgcgcctggccggcgggcttcagaagatggttactctgctgcaacgaaacaacgttaagtttctggctatcgtcacagattgcttgcaaattctggcctatggtaaccaggagagcaagttaataattcttgcctccggagggcccaacgaactcgtgcgcattatgcgctcctacgactacgagaagcttctgtggaccacttcgcgggtactgaaagtgctctccgtttgctccagcaacaagccggccatcgtggatgccggtggaatgcaggcgctggctatgcacttgggtaacatgtcaccgcgccttgtgcaaaactgtttgtggacgctccgcaatctttcggatgcagccactaaggtggagggccttgaagctttgctccaatctctcgtccaggttctgggctcgaccgatgtcaacgtggtcacctgtgccgccggtatcctttcaaatctgacgtgcaacaatcagcgcaacaaggccaccgtttgtcaggtgggcggtgtggacgccctcgtccgtactattatcaatgctggagatcgcgaagagattaccgagccggctgtatgtgccctgcgtcacttgacctcgcgtcatgtggactctgagttggcccagaatgccgtacgcttaaactacggactatcggtgattgtaaagctattgcatccaccatcacgctggcccttgatcaaggccgtcattggactcatacgcaatttggccctctgtccggccaatcacgccccgttgcgggagcacggggccatccaccatctggtgcgactgcttatgcgcgccttccaagacacagagaggcaacgttcctcgatagccaccactggttcacagcagccgtccgcatacgctgacggcgttcgcatggaggagattgtcgagggcacggtgggggcgctacatatcctggcccgcgagtctcacaaccgggcactcattcgccagcagtcggtaataccgatctttgtacgattgctgttcaacgaaatcgagaacatacagcgcgtggctgctggcgttctttgtgagctcgccgctgacaaggagggcgccgagattatcgagcaggagggcgccactgggccgctgaccgatctcctgcactcgcgcaatgaaggcgtggccacatacgccgccgctgttctctttcgcatgagtgaggacaagccgcaggattacaagaagcggctatccatagagctgaccaactcgctgctgcgcgaggacaacaacatatgggccaatgccgacctgggcatgggtcccgatctacaggatatgcttggaccagaagaagcatatgagggcctgtacggacaaggtccgcccagcgtgcacagttcacacggaggtcgcgcattccatcagcaaggatatgatactctaccaatagattcgatgcagggtctggagatcagcagcccagtgggcggcggcggtgctggcggtgctcccggcaatggtggagctgtaggcggagctagcggcggcggtggtaacatcggcgccattccgcctagcggcgcaccaacttcgccctattccatggacatggacgttggcgagattgatgccggtgcattgaactttgacttggacgccatgccgacgccacccaatgacaacaacaacctggctgcctggtacgataccgattgttagacaagccgagctaagggtaagggtcgagtatccattcgaccccataacataaaacacacgaattcccatccctgcacaatagccctcttccaccggctttgattccatcccggatcccggaatcgcgatcaccgaaacttgactagatcaacgaaggtgtggattttacttgacaaatacgaggagctgcggcaggtcaaagttctgcttccagaactgaagtccgtgggagaaggctatttgctcacacaccataccccgcgacaaagcatacacacacgcatacatgcataatattatacatttattataatgcgaacgaaacggcaagaaaaacatattatatgatgcattacatattacccacgtaaacgaaatggaaaattaaacaaatgtttgcaatag

SEQ ID NO: 24255 - protein, 840 aa, DROSOPHILA; identical to SEQ ID NO: 7380

SEQ ID NO: 24256 - DNA, 2351 bp, DROSOPHILA
ccaggtaggtgaaggtgaaaacgtgatcgacgaagggctggctcttgggatgatggttgggcacggagtaggtctgcacgaacagctccttgagcagcttaaggtgcggcagctcgtcgaatttggagtcaaacgagagcagcggacgtgatccccgcaagcagtttcccgtcatcttcagttcggccattgtatgaatgttttcgatgaggaatttagcggatggaccagtcgatcccgaggtgttggatatccacatgtacagatcccttttccggcgtccctcgaacagcatcgccttgttgcagtgcttcatttcgcacatttcgttgaccaccgacaaggttttggagcgctccattttggattcgggtcggtggtgcggcattagggtcttaatatccttcattaagtgccggtcccggtggctaataccgcgggcggagaagaccagcacgcgctgtttgttcacccatttttcctgtaaataaaatccagtttttagttaagaaattcgggtttaaaaaagtcacttttcttgcctttttgggcaccacatcatctgacgatctctgtggcggcagtggtggattttcatccagcggcactatctccagctgcggcgcggccttctttttcttattctggaatttgcgacccattttttgtagtttaaataattaaaaacaattgaacagtgcgaaggcaaaacgtggagtgacaacaaccagggatggctattcattcaaagccagggcgtcaacagcacgtgcacccgaatagtggtattttgcaacactttatgggaagtatttgaaaagtccgtaattttaaatcaaaaactagaaaaatgtaggtaaaatattttttaacggtttcttttattttcgttaagctaaataaacttttaaattttcataatctataaattaatttgaaattacaattagcatgacgtatagcatccgataattagcctctagctgctgacaagggattttcaatcatcttcatcttcaagtccgggttcaggacatagtcgacatctgctctcatttacgccgtaattcatgcaaagttctcccacgcactcgcaacatccgtcatgaaaccacctgtagctggtggctccggttttcaggcaggtctgtcgacacttattccaggatgtgcactgatccagatacaaaacggtgcaatttagaccagatcctggttttccattcgttgaaaacgagaccacgctccaattgtatgtgtatccatcgtttggagatgaggacatggccctgaacaaggctggcattccttcgaattcctcggtgtgcgatttctttcgcatttgtgccatgttagcgaggcctaactctccaaaggatagcaaaatgtagatagtcagaagtgttttcatattgatttggaatatgcaactgaagtgttggcgcacttacaaacggtttttaaataagaatatagtacaggtagtaggtggtataatgtttcaggtagaaaatcactcaccagctgccactaagggctttatctatttttataactattacctaaatgcccgcaatggccctttttgctgacttattattggaaattaatactttaatccatgcaacgcagttgggatctttaacattccgagctgttagaaattactttatgaaatatggatttttaaatgtattttatgcggttatagtgtaagaaccagttcaatcaaaggaaccacagcgtacacagccatcgaaacagtttagacgtatatcgatcagttcacatctctatcttgtctgtatacggctgtgtgtcaaagcggcaaaagcgagaaaagtcgaagtgcaaataattttaacggagcggaaaaaatatagataaatcagaaccatgtcggactatagatcgcaatcgcgcagtggcgggggacgtggcggtcaggagtactcgaacgacgacgatccgccgatgtcgcgtctcttcatcatttgcaacaaggcgcacaccgaggaggatttccgtgaagccttctcgccatacggcgaaatcgaggatatctgggtggtgaaggacaagcacacccaggagaacaagggaatcgcgtacgtcaagttctccaagacatccgatgctgccaaggcacaggaggagatgaacggcaagaccattggcaagatggatcgcacccttaaagtcctggtggcagccaagtaagattagcttcgagagtactggcccaaaaccatggtctaactcttatcctcctcttccagtcgcaatcagggctcaaataagtctgagaacgagcaggagaagtacgtgagactcttcatagtgatccccaa

SEQ ID NO: 24257 - DNA, 351 bp, DROSOPHILA
atggcacaaatgcgaaagaaatcgcacaccgaggaattcgaaggaatgccagccttgttcagggccatgtcctcatctccaaacgatggatacacatacaattggagcgtggtctcgttttcaacgaatggaaaaccaggatctggtctaaattgcaccgttttgtatctggatcagtgcacatcctggaataagtgtcgacagacctgcctgaaaaccggagccaccagctacaggtggtttcatgacggatgttgcgagtgcgtgggagaactttgcatgaattacggcgtaaatgagagcagatgtcgactatgtcctgaacccggacttgaagatgaagatgattga

SEQ ID NO: 24258 - protein, 116 aa, DROSOPHILA
MAQMRKKSHTEEFEGMPALFRAMSSSPNDGYTYNWSVVSFSTNGKPGSGLNCTVLYLDQCTSWNKCRQTCLKTGATSYRWFHDGCCECVGELCMNYGVNESRCRLCPEPGLEDEDD

SEQ ID NO: 24259 - DNA, 3005 bp, DROSOPHILA
tagacaaaaggtggcactttataagccaataaaaatataataaagtatacgaatgatatgtccatacaaagtaaagaagatttattggcattagtctataatggtaattttcaaaattaaaaagcttaattcttcgactagttaacactaaaacctgtaggacaagaacataaacatttaacatacatcaatgttttaactaagtattagcgttaaaaaatataatataaagctttaattaagttgggctttttataaacagcttgcagctttgattaaacttggaagctgcgactattttaagcattttcaaagagcttttagtttaaatatagcatgaaactttatggttttcctagttttaacactaagcttttgagtatttcaaaactatgacttgcagatacattttctgagagtgcttggcatttctgaaaaattatttactcaagactttttgaaatcattcaaaaccattatttagtatattacagtaaataaaacgaacctcctcgacgtttttcctgtttttaattaacacccttttgctttcaggtagtaatttttaaaatttaatattcatcataaagctgagcaagaacttgaatctaaatcaaataaaatgttaccctttcattgttctttcttttcgtttattgaatctttttcattatcgcctcttttctttgtgcgatgctgaatttaacattcgatttcggcgttagtttatttatgtaaaatccggccgctaaattaaattttatagttcagttttggcacctcccctcgcaccttcgatcacctttggattggcgattatttatggaacctttgtgatgatgcaaagcaatttccgttcgccgaatgcgaaagtgaaatgagccggccgcgaatttatgtaatatgttgatatgccgtcttatatatggcggatttggggcccgtggccgcatagccaccgtcgccgtgcaagttcccagagatcaaaccggagctcgagatgatgcagccatgggccgttgtggtcctacttctgcccctgatcaacggagatgtgagtcacctgcccagggaatatataccgcccagtgcggaactggagccaaccacacggtctgctgctgatggccaggaggtgcagaaggatccatctggattctatccatcgactggactgccactgccgccgggctatgccattcccacgggcagcaacgttttgccacagcctgtccagccgccaaacttccctctgcccatctatccaccattctacggcttcggcggaggtcctgtcgagcagggaggaggacatggtattgggccagtgccttcggcctatcccaacggaggtgcattcccggcgggtcctaccaatggaggcgcattcgcagggggtcctacgaatgcggccttccaactgccaccaggtggtcctttcggtccgcaagctggtaattttgcccagccaggtggtttcccgcaggcaggtgggtttcccccacaaggagctggcttccagccacaaggcatccctggcaatggattcccaacgcaaggagctcccttctcaccacagcagggagtgttcccatcacaaggaggtgccttcgggccacagggaataccgggcaatggtttcctaggaggtaacttcccgccacagggagggcccttcccaggatccgcatatccaccggagttcttgacaaaccagggacttcccctcacaaatccccagggtcccttccaaggacccagtccagcaggattcaatgtgcccgcaggattcggcggacctgtgcccggccagaatccctaccaacaatttggacccggtttcggaggacccgctccgccgggctactccgatgagccggcgaaggagcaaccaaaggacagtgagaggacagtagtggcaccaccatcggccgacgatcccaagagtgtggcggatacggtttacgcatccaatggcggctatgtctacaagagggccaagtaatgcgatggctttcgaagccccaaattggggagttcatcaaacatgttcgccataaattatgatccatattttgttttttttttttcttgtattttttgtgcctttgtttttattcatttatttgatctgctggccataaagatgcggacagacaaaacgattgtctctatgctaatcgaaatctttgccaaaactgactgataaccataaacgagacaatctatcgtcgtgattgatacatatatatagacagacctatgttttatgcataccctggccagacacatatgtgttcataaactatgttgtcttcaaaagtcaatacaaggcgattaaaggctgaaataaaaaacacgattagtggtttgggtgtggactaaaaccgaagtcctacgataattatgcacattcaccatcaaggtttattgaactctgatatgtttctggatggaattaagtttaaacaaaatggtacaagaattaaaaaaaaaaacatccacaacttaaaagcagtaatagtttatcatgcaacaacaatggatcattaaaaatggatttatgtttatcatttcatattctaaaataaatccaacttaaaaacgaataaattcaaatgattgtcttacatgtataaattttgaattgacgtcacagaaaagaggtagagaaagaagctgcccacctaaagggcaaacttaatcgatttaagttaatttcagcgaaattcaaagaaccttctgagttaattttagcttcgcgatatttttttttttttttttaatttgccaaactagtttctgacgtcaaagagtttcccctaaagaacatacatacatttatgataatgaacttcttttcgtgaacttaagatggttatcgaaaaggggatttttccatagtttaaaaccagacttattcaactcccatgtttggtttcaaaagtctatagacttcaactagcccgaattgattttttattcatcttttttttttttttttg

SEQ ID NO: 24260 - DNA, 1005 bp, DROSOPHILA
atgatgcagccatgggccgttgtggtcctacttctgcccctgatcaacggagatgtgagtcacctgcccagggaatatataccgcccagtgcggaactggagccaaccacacggtctgctgctgatggccaggaggtgcagaaggatccatctggattctatccatcgactggactgccactgccgccgggctatgccattcccacgggcagcaacgttttgccacagcctgtccagccgccaaacttccctctgcccatctatccaccattctacggcttcggcggaggtcctgtcgagcagggaggaggacatggtattgggccagtgccttcggcctatcccaacggaggtgcattcccggcgggtcctaccaatggaggcgcattcgcagggggtcctacgaatgcggccttccaactgccaccaggtggtcctttcggtccgcaagctggtaattttgcccagccaggtggtttcccgcaggcaggtgggtttcccccacaaggagctggcttccagccacaaggcatccctggcaatggattcccaacgcaaggagctcccttctcaccacagcagggagtgttcccatcacaaggaggtgccttcgggccacagggaataccgggcaatggtttcctaggaggtaacttcccgccacagggagggcccttcccaggatccgcatatccaccggagttcttgacaaaccagggacttcccctcacaaatccccagggtcccttccaaggacccagtccagcaggattcaatgtgcccgcaggattcggcggacctgtgcccggccagaatccctaccaacaatttggacccggtttcggaggacccgctccgccgggctactccgatgagccggcgaaggagcaaccaaaggacagtgagaggacagtagtggcaccaccatcggccgacgatcccaagagtgtggcggatacggtttacgcatccaatggcggctatgtctacaagagggccaagtaa

SEQ ID NO: 24261 - protein, 334 aa, DROSOPHILA
MMQPWAVVVLLLPLINGDVSHLPREYIPPSAELEPTTRSAADGQEVQKDPSGFYPSTGLPLPPGYAIPTGSNVLPQPVQPPNFPLPIYPPFYGFGGGPVEQGGGHGIGPVPSAYPNGGAFPAGPTNGGAFAGGPTNAAFQLPPGGPFGPQAGNFAQPGGFPQAGGFPPQGAGFQPQGIPGNGFPTQGAPFSPQQGVFPSQGGAFGPQGIPGNGFLGGNFPPQGGPFPGSAYPPEFLTNQGLPLTNPQGPFQGPSPAGFNVPAGFGGPVPGQNPYQQFGPGFGGPAPPGYSDEPAKEQPKDSERTVVAPPSADDPKSVADTVYASNGGYVYKRAK

SEQ ID NO: 24262 - DNA, 3862 bp, DROSOPHILA
atgcattgttcgtttccaatagcaccgacgtcaatgatttaagacgtaagtagtctcatatatctgcgatgtaaatccattctatgcaggtttcccaaagcagacgaatttgaaataatctgaatttttgcattttgttgttattttataacgtgatttggtgaataagtaagtgatatttgctaagggcacggaatttgactcatttgtatatatttctgtgttttctcctcacaactcttcgatctaaattgtatatacaatagatttcttcttaagttactgcacctatgattccagagaattaagcaaatattttccttaaacagcaaatgcccgtgtagaatatgccgatgccggagttcttcgcagcatgttctggatctatgtggtgggtcttatatggacagtggagtttattttcgcatgccagcagtttgcattggccgcagccgtggccttctggtacttccaaaaaccgaccagcacgcccacgttttacgccattggcaaactggttaagtatcatttgggtacggtggccaagggatcctttgtcatcactattttcaagattccccgcctgatactcacttatttgtacgccaagtaagttgaatcatcgtcactttgcatgagtttcccattctttactaattgaacatgacatttcagattaaaaaaaggcgaggacaagggatcggagtgtgccgcctgctgtttgaagtgctgcatttgtggtttctggctgcttgagaagttcattcgcttcttgaatcataatgcctacaccgtggtggctatcgaatccattaacttctgccccgctgctggcattgtaagtctgctatcccataaatgttgaatgtttgaaatttataaatttttatttctttctaggcttggaatgccatggccacgaatgtcctgcaagtggccaccattaacagtgtgggcgacttcattctcttcctgggaaaggttgtggtggccgcgctctctggcctgattggtatcgttttgctcaaggataagcccggtctgaatttctacatggctcccgtcataatcatcatcatattctccttctttattgctcacattatcctctcgctttttgaggtaggtattcctttacaatacgaccaagcttatggctaacctatgactcgttaatagatggtagtggataccttattcctctgtgtctgcgaggataagaccctgaatggtcgctctggtcgttgggcacagagtaacttggccaagctggtaggcgaggaaccgctgcagcctggcgaggagccgcccatcgaagttgttcaaatgatgcccatcaacaagcagccatttagtattacccgactccctcagtccgatcccgaggtagctcccatgtcggcggattagttctaagacgcagctagatgctttcgcttttgtattccaagcgcagaaccccccgaaactcaacgcacatctcattaggatgttaatatttatatacataccattactccgtcgcgacgtacaaagcagaacagtgggactaataataactggtaatcttgtctattgatatattcaaacttaggatgcacagtttgtaaacgtatttataaagtttaatcgtttttgtatcttaatgtaaaatgaggtgtttaaacctttttcacgcgtttaatggttcttgccttctttctttcaatcacatctttcacggcctgcagttgtttctccttgatcttcttggtcagcgccgatttgggtgtctgtttggcggcttcctccttcttctttttggctatcgcagccagtatcttggccgtctccacgggatcatcgtcctcgaatagctcatcgttatccatgccatcgtaggctctaataggtcgcgtggcctcgtgcttgaccttttgctccactcggttcacgtacttatccttggcagccttcttaagtacctgccgctgtttggatggactcacgtagtccggattctcccaaatggttttgccagtgaaggaaccatcgaatatttttacaggattcatcacgtaacgcggcccgacttcggacaaaccgccatcttcggatagaatctggaaatttctgaaccagatgcgtttgtccaggtaggtgaaggtgaaaacgtgatcgacgaagggctggctcttgggatgatggttgggcacggagtaggtctgcacgaacagctccttgagcagcttaaggtgcggcagctcgtcgaatttggagtcaaacgagagcagcggacgtgatccccgcaagcagtttcccgtcatcttcagttcggccattgtatgaatgttttcgatgaggaatttagcggatggaccagtcgatcccgaggtgttggatatccacatgtacagatcccttttccggcgtccctcgaacagcatcgccttgttgcagtgcttcatttcgcacatttcgttgaccaccgacaaggttttggagcgctccattttggattcgggtcggtggtgcggcattagggtcttaatatccttcattaagtgccggtcccggtggctaataccgcgggcggagaagaccagcacgcgctgtttgttcacccatttttcctgtaaataaaatccagtttttagttaagaaattcgggtttaaaaaagtcacttttcttgcctttttgggcaccacatcatctgacgatctctgtggcggcagtggtggattttcatccagcggcactatctccagctgcggcgcggccttctttttcttattctggaatttgcgacccattttttgtagtttaaataattaaaaacaattgaacagtgcgaaggcaaaacgtggagtgacaacaaccagggatggctattcattcaaagccagggcgtcaacagcacgtgcacccgaatagtggtattttgcaacactttatgggaagtatttgaaaagtccgtaattttaaatcaaaaactagaaaaatgtaggtaaaatattttttaacggtttcttttattttcgttaagctaaataaacttttaaattttcataatctataaattaatttgaaattacaattagcatgacgtatagcatccgataattagcctctagctgctgacaagggattttcaatcatcttcatcttcaagtccgggttcaggacatagtcgacatctgctctcatttacgccgtaattcatgcaaagttctcccacgcactcgcaacatccgtcatgaaaccacctgtagctggtggctccggttttcaggcaggtctgtcgacacttattccaggatgtgcactgatccagatacaaaacggtgcaatttagaccagatcctggttttccattcgttgaaaacgagaccacgctccaattgtatgtgtatccatcgtttggagatgaggacatggccctgaacaaggctggcattccttcgaattcctcggtgtgcgatttctttcgcatttgtgccatgttagcgaggcctaactctccaaaggatagcaaaatgtagatagtcagaagtgttttcatattgatttggaatatgcaactgaagtgttggcgcacttacaaacggtttttaaataagaatatagtacaggtagtaggtggtataatgtttcaggtagaaaatcactcaccagctgccactaagggctttatctatttttataactattacctaaatgcccgcaatggccctttttgctgacttattattggaaattaatactttaatccatgcaacgcagttgggatctttaacattccgagctgttagaaattactttatgaaatatggatttttaaatgtattttatgcggttatagtgtaagaaccagttcaatca

SEQ ID NO: 24263 - DNA, 1753 bp, DROSOPHILA
ctggttgttgtcactccacgttttgccttcgcactgttcaattgtttttaattatttaaactacaaaaaatgggtcgcaaattccagaataagaaaaagaaggccgcgccgcagctggagatagtgccgctggatgaaaatccaccactgccgccacagagatcgtcagatgatgtggtgcccaaaaaggcaagaaaagaaaaatgggtgaacaaacagcgcgtgctggtcttctccgcccgcggtattagccaccgggaccggcacttaatgaaggatattaagaccctaatgccgcaccaccgacccgaatccaaaatggagcgctccaaaaccttgtcggtggtcaacgaaatgtgcgaaatgaagcactgcaacaaggcgatgctgttcgagggacgccggaaaagggatctgtacatgtggatatccaacacctcgggatcgactggtccatccgctaaattcctcatcgaaaacattcatacaatggccgaactgaagatgacgggaaactgcttgcggggatcacgtccgctgctctcgtttgactccaaattcgacgagctgccgcaccttaagctgctcaaggagctgttcgtgcagacctactccgtgcccaaccatcatcccaagagccagcccttcgtcgatcacgttttcaccttcacctacctggacaaacgcatctggttcagaaatttccagattctatccgaagatggcggtttgtccgaagtcgggccgcgttacgtgatgaatcctgtaaaaatattcgatggttccttcactggcaaaaccatttgggagaatccggactacgtgagtccatccaaacagcggcaggtacttaagaaggctgccaaggataagtacgtgaaccgagtggagcaaaaggtcaagcacgaggccacgcgacctattagagcctacgatggcatggataacgatgagctattcgaggacgatgatcccgtggagacggccaagatactggctgcgatagccaaaaagaagaaggaggaagccgccaaacagacacccaaatcggcgctgaccaagaagatcaaggagaaacaactgcaggccgtgaaagatgtgattgaaagaaagaaggcaagaaccattaaacgcgtgaaaaaggtttaaacacctcattttacattaagatacaaaaacgattaaactttataaatacgtttacaaactgtgcatcctaagtttgaatatatcaatagacaagattaccagttattattagtcccactgttctgctttgtacgtcgcgacggagtaatggtatgtatataaatattaacatcctaatgagatgtgcgttgagtttcggggggttctgcgcttggaatacaaaagcgaaagcatctagctgcgtcttagaactaatccgccgacatgggagctacctcgggatcggactgagggagtcgggtaatactaaatggctgcttgttgatgggcatcatttgaacaacttcgatgggcggctcctcgccaggctgcagcggttcctcgcctaccagcttggccaagttactctgtgcccaacgaccagagcgaccattcagggtcttatcctcgcagacacagaggaataaggtatccactaccatctcaaaaagcgagaggataatgtgagcaataaagaaggagaatatgatgatgattatgacgggagccatgtagaaattcagaccgggcttatccttgagcaaaacgataccaatcaggccag

SEQ ID NO: 24264 - protein, 359 aa, DROSOPHILA
MGRKFQNKKKKAAPQLEIVPLDENPPLPPQRSSDDVVPKKARKEKWVNKQRVLVFSARGISHRDRHLMKDIKTLMPHHRPESKMERSKTLSVVNEMCEMKHCNKAMLFEGRRKRDLYMWISNTSGSTGPSAKFLIENIHTMAELKMTGNCLRGSRPLLSFDSKFDELPHLKLLKELFVQTYSVPNHHPKSQPFVDHVFTFTYLDKRIWFRNFQILSEDGGLSEVGPRYVMNPVKIFDGSFTGKTIWENPDYVSPSKQRQVLKKAAKDKYVNRVEQKVKHEATRPIRAYDGMDNDELFEDDDPVETAKILAAIAKKKKEEAAKQTPKSALTKKIKEKQLQAVKDVIERKKARTIKRVKKV

SEQ ID NO: 24265 - DNA, 6287 bp, DROSOPHILA
tgtccaaacaatcgcagccacaaaattatctagaggcagaggagcaggtggccaccacatccggcacttggccgccgcgattctcaacatttgcttcgggttgtgcaactctctcgattcgtcgtaaattttagcctaatcgaatctaattgaatacataaatacggaaataaatcaatttaattacaatacagccaacaacagtcatcgcaaatagtttacacgcacacaagcactcgaaccattattattacagatataaatttgtttaagccttggtaaggtattgagaaaacctcaagagttgcgggttcatatgctaattaaattaattgtcggcacaagtaggaccacttaaggttctttagctatacatatttttggaagttctattatcatatcttaactgagctttaaaaaatcgctggtaaacatgattgtacaagaagttgaaattcctggaaatggtttggtaattgcatacatatgtacgtacatatatgtacatagcttacaatttaaacgatagaaaagtacaaagtacagcactgcaaatatcatgatcggcaacatatcagaaaaccgttagaggtgatggttctctttcgttatctaagttcccctcctctcgcgctgtcttcatcttgtactttcgcgcttgccgctttggcttagcgctctgtccttttcgctctgcaattgagtcgctcattgtcatgcgcgcatcgacgccgaactttgctaaaaaaaaaaaaatataccatgatcgttcgaaatcgttaccagaaaaaacgtcttttaattttgcaaaaataagttaataaaagggcccaacagcccacttttcaatcgccatcggaaatagagcagttgggaataaaatctgcgtgagacttatctatgtggttgcccagtcaccagagcgaatacccctaagtaactaaatacatacatatctatctacagatcagtcgtgttggtcggtgaggtgattgcgagcttacagcgcttccggataaaagtcccgataggcgaatccctcaatgtactccggccggtggcaggcgaacagatggtggggtaactccttgcgggcgtacttctccagtgccttgcgcgtattttcctggagcacggcctcgtcaaatttgacccgctgcaccgtggtcttccgaaggatggtctgcaccaactgcgaccacacgcagccggactcctcttcacccaatccggagccgttttcggcaagctttcctttttgaatttgtgtcgactgcttctcttcctggctcggctccggctgctgtgcaggcgccgccatctgggctttggtttgagtgtagactgtggacgcatctgcggcctgagagtcggtagtggcctctttccttttgggtggcggaatgtcctgcatgagcgtctgcaatcgatcaactgtctccgccattcgtttccgaaagtccactattcgacgggcgtagctgaagagggctcgctcctccgccaactttaatggccttttacgtgcttcctcacttagttctccgtcttccaaaagtgggtgaatgcgaacaccggcctccgaagtgccactgaggtagattcggatagcaaattcctgcatggccgaagtattgaccatggctatggcataggcattacgtgcttttagaataacttctcttatatgagccaactggggcgaggaggtattggacactcttgtttcgagatcttgtagatccatatgctccaagtgagccgacttatccaggctgtccaacacctctgtcaaatggctaggtatccggtcaccgtccgccggaaaggttagcaaacctaatccttgaatcactcggatgttggccacatattgctgctgcagttcgtacagctgccaaagggtcctcattcgagactcatactctttctgggcgcctgtgcccaatacactactcatattagtatcgtacagttgcaagccccgtataaaggctacatccatggtatagttgcccatgaaggtctttacatagttaagagcctcggaggcgcttgcgaaactctcccgtcgctgagcaaagaattcatccaaatcgctgactgtcaactggtttcgtgccaccacgtttctgtgcaggctctcgtttagctcccgctcctcgcgtatctgctcgaagttgcttactaacagatcgccggcgggctgttgaaattcgtcgaacacctcaatatctacggccatggtagtgcttgtgccggattgctcgcgttcctgctctttttcagagtcctgcgcctgcacactctcatcctctttattaaagaactcgttgttctctgggtgacactgcggcacccactgttcctgaacagctacctgccgctttttgctcctctctaatatcgcccgtggactaaaccgctgtagatccagagaggtgtagatgtcctcgttgtgggcgtggcaacagtggagggctgacatgtccatgggatgagcctctgtgttgaagatgtacgcaccggcctgtaccacgcatacatcatcctcggttgacagcagctcgcctccggacccatcgttgtgcaggaagttttcctcgtcaaacagcagataaaggtacttgcttgtttccgccaggaagaatgactccatgcgattctccttttcgtgggtgacaacattgcgaatctggaaaataatgcaagtatatattaattaattttaagttcttaaaaagcttgttcacagaacttctcaccgttgcatatccgcatttggttttggcactgaactccaaggtctccagcatgtgctcaccaaactccagaagatactcgtttcctgtggctcgatagagatacatagctgactcgattagctccggtcgcagggggtacacctcccgattcggcgatgcctctccagcagcaatgttataaaactctggcagaaagccgtacttcttccagaccccaatgtaccgtgatatggtgcgcaaggccggctccgtgtcgccaataatgctcaggatgccgggccaaaacgcctccagggactgaaagacgggaagggtgacgcggcctttgttcatgcctacccacacgtaccagtcctccttccgcatgtacttatcaatggccgcgcgagcctcatggaataactccaagagttctgggcgattgagcaggacagatgccttaactaggtattcaaaaagggaatccactcctgctccgataccagagtcgagggcggtccaacgaccgctctgcacgtcgatgtgattgccaaaaagtccaatgggcgagcgatatgcccatagagcatgtaccgccttcatagcaacatcctcgtagatggttttcccggtcaaccggctaagggtaccaaattcgatgaggaatgtccccacgcccgccgtacaggttatagaggtctcgcccttgggcacgccatagcgcaggttcaccgtgccataaggcatacccgtgttcgtgacgaaggctggcaataatcgtcgggccacatcctccgccagtcgcagcagaggtcccttgcagggccatcctggctctagctctacgccagcacgcttggagagcagatgcgcggacagcagcccgcccacgatgcggatgtttgtctcgaacacggacacgttgatgtccctgtcaaaatccatcttctcctcgagcagtcttgccgcgcggcggaattccgtgaagttgcccatggtggccagcgtgtccagagcgtcgatcagtgtcaaggagtagctgccccaggtgtcgtggccatcgcaggtcagcggacgcagttcatcgtagttggaggcgtggcgcaggtaaccatcgtaggcgtgctggaacatgcgccgcacatcctccctgcagattcattgccggttaggattagtatgtccgagtttagccctagcaatgacccacctcagttccaactttcttgccttggaatactgcttctggccgctgacaccggtggacagcaggacgaggaggaccgcgcagatgagggtgcccggatagccgttgtttcggggtttttgctgcatcgtgggacagtcaatcaatcagggccgctaattcaattatgggcatggtcagtgttccatagccagcgtggatgtgggatgtgtggaagtcaaatgcggctacgttgacgcaaaatcacaacaagggctgattcggcggtggcatcgaccgccgaatgccctactaattccgttcggtgagtgtttttttatagagcgcttagagtagcaaacgggggaaagaacacaagccaaagagcttttttaaggtaacaaccaaacactataggctagcaaacactgtattctccgccaattctgaagtacgttaattttacccaacaaaatccctagcaataggatatgtcattccgtagggtgcaatcagctgttgctgatcgaataactatcgaaagggtggtcagatcgaatttgcatggtggtcattgcttgttaaaggaatacaacagctcagaatagccgtaaaatcagcgcggcaatattaaagtcgggttggaaaaattaaatggcaatttctttaagaattcaaaaagtttgtgatgacaaatataccgattgtttgtcactgctttgcgcggcacacgttcctttatacttttattcgcgtcgagttggcagcacataccagttttttttgtggccattcaaaagtgtgtgttcgtacgggtaaaaagtgatttaaattcaaaatattcagcgaaacgaccgcctccaatagaagcaactgtaccctatggtaagtaactgccctctgcacccgtttcacacccggacatcctccggatgagctgaccaagaaatccgcagcctttgttacgcttccgactgcgaattgcagttctggcgatgggcagcgatgtgtttcggttttgaatcattctccgcgtaaaaaaaactcagaaagagggtcgactataacctcgcggagtaactgcatcacggcccgtgtgccttttgtactccgcgtaaggcgatcgtttaaatgcaatcgcgtatgcttaattgtccgttgggcgaaaagtaacaacattgtgggtctatacatgcgggattgcctctggctgaccagaaaccacattgaaaccatcccgttgaccgtagatataagcgtgtgccatttgggatctggaaatcgtgtttccacccagttgtttgcatatttataaacaattaaagaaaaatattaaattttttggtcagggctgtcgcccctcgcatggcatcgatagaagagcgtccggagctgcggttgcaaccctatccgctcacgcaaatctatcgaaaaattttactccacggtcgattttcgttgcttttttttcacactcgtgtaaaaaaaaaggaaatagctaagtaaatcgaaagtacagtgcagtgttttgatcccgtggagtgcatgttccagcggaaagtgtgtgcaacaaatatgagcagttcgcaaaagtggcgagcaaaagcaataacaaagtagcaacagcaacgcaacgtgtgtgtgttgtaagcaatctgtacagcggaaaggtgttggtgtgttggtgtgctcggggggtggtgtgcgtttcgcccgtcccgtgtccataaattagaatcaaatcgaatcgaaatcgacattgaagtccgctgctccgccaccgcgatgtccgtcgaccaggatcaataagcagcgtcaccaccagtagcggaccatcattaagttctccatatcgagagcaggctgactcggaatcgaactcggattcggaattggaattggaattggcatcggaatcggaatccatagcggaggaatcacgcgcggcagccagcccaatacggaaaactgctgaaaaatgttagataaatgcccagttatctacaattattatggcttgtccctgtgtgcgtgtccaggtgtgagggtgtgtgtgtttgtgtgcgatagcagaagcaaaatccgctcaaattgcgatgccaaatagtcggccaattaattgatctttcaattggcgacatcaggcgccctcccatatacccagctccgcacgaaacccgatatatatccgcggattgagtctctgcttttgccgcacatatgtattgtataacccttgtttatctttggacaatccgaggtggagtggagtacagtggaggctggccaagttggacacatgtgccgataaggtggcgtgtgctggaacgagtgtcccctgtaatgcggtcttatct

SEQ ID NO: 24266 - DNA, 3625 bp, DROSOPHILA
cgacagccctgaccaaaaaatttaatatttttctttaattgtttataaatatgcaaacaactgggtggaaacacgatttccagatcccaaatggcacacgcttatatctacggtcaacgggatggtttcaatgtggtttctggtcagccagaggcaatcccgcatgtatagacccacaatgttgttacttttcgcccaacggacaattaagcatacgcgattgcatttaaacgatcgccttacgcggagtacaaaaggcacacgggccgtgatgcagttactccgcgaggttatagtcgaccctctttctgagttttttttacgcggagaatgattcaaaaccgaaacacatcgctgcccatcgccagaactgcaattcgcagtcggaagcgtaacaaaggctgcggatttcttggtcagctcatccggaggatgtccgggtgtgaaacgggtgcagagggcagttacttaccataggcgctctataaaaaaacactcaccgaacggaattagtagggcattcggcggtcgatgccaccgccgaatcagcccttgttgtgattttgcgtcaacgtagccgcatttgacttccacacatcccacatccacgctggctatggaacactgaccatgcccataattgaattagcggccctgattgattgactgtcccacgatgcagcaaaaaccccgaaacaacggctatccgggcaccctcatctgcgcggtcctcctcgtcctgctgtccaccggtgtcagcggccagaagcagtattccaaggcaagaaagttggaactgagggaggatgtgcggcgcatgttccagcacgcctacgatggttacctgcgccacgcctccaactacgatgaactgcgtccgctgacctgcgatggccacgacacctggggcagctactccttgacactgatcgacgctctggacacgctggccaccatgggcaacttcacggaattccgccgcgcggcaagactgctcgaggagaagatggattttgacagggacatcaacgtgtccgtgttcgagacaaacatccgcatcgtgggcgggctgctgtccgcgcatctgctctccaagcgtgctggcgtagagctagagccaggatggccctgcaagggacctctgctgcgactggcggaggatgtggcccgacgattattgccagccttcgtcacgaacacgggtatgccttatggcacggtgaacctgcgctatggcgtgcccaagggcgagacctctataacctgtacggcgggcgtggggacattcctcatcgaatttggtacccttagccggttgaccgggaaaaccatctacgaggatgttgctatgaaggcggtacatgctctatgggcatatcgctcgcccattggactttttggcaatcacatcgacgtgcagagcggtcgttggaccgccctcgactctggtatcggagcaggagtggattccctttttgaatacctagttaaggcatctgtcctgctcaatcgcccagaactcttggagttattccatgaggctcgcgcggccattgataagtacatgcggaaggaggactggtacgtgtgggtaggcatgaacaaaggccgcgtcacccttcccgtctttcagtccctggaggcgttttggcccggcatcctgagcattattggcgacacggagccggccttgcgcaccatatcacggtacattggggtctggaagaagtacggctttctgccagagttttataacattgctgctggagaggcatcgccgaatcgggaggtgtaccccctgcgaccggagctaatcgagtcagctatgtatctctatcgagccacaggaaacgagtatcttctggagtttggtgagcacatgctggagaccttggagttcagtgccaaaaccaaatgcggatatgcaacgattcgcaatgttgtcacccacgaaaaggagaatcgcatggagtcattcttcctggcggaaacaagcaagtacctttatctgctgtttgacgaggaaaacttcctgcacaacgatgggtccggaggcgagctgctgtcaaccgaggatgatgtatgcgtggtacaggccggtgcgtacatcttcaacacagaggctcatcccatggacatgtcagccctccactgttgccacgcccacaacgaggacatctacacctctctggatctacagcggtttagtccacgggcgatattagagaggagcaaaaagcggcaggtagctgttcaggaacagtgggtgccgcagtgtcacccagagaacaacgagttctttaataaagaggatgagagtgtgcaggcgcaggactctgaaaaagagcaggaacgcgagcaatccggcacaagcactaccatggccgtagatattgaggtgttcgacgaatttcaacagcccgccggcgatctgttagtaagcaacttcgagcagatacgcgaggagcgggagctaaacgagagcctgcacagaaacgtggtggcacgaaaccagttgacagtcagcgatttggatgaattctttgctcagcgacgggagagtttcgcaagcgcctccgaggctcttaactatgtaaagaccttcatgggcaactataccatggatgtagcctttatacggggcttgcaactgtacgatactaatatgagtagtgtattgggcacaggcgcccagaaagagtatgagtctcgaatgaggaccctttggcagctgtacgaactgcagcagcaatatgtggccaacatccgagtgattcaaggattaggtttgctaacctttccggcggacggtgaccggatacctagccatttgacagaggtgttggacagcctggataagtcggctcacttggagcatatggatctacaagatctcgaaacaagagtgtccaatacctcctcgccccagttggctcatataagagaagttattctaaaagcacgtaatgcctatgccatagccatggtcaatacttcggccatgcaggaatttgctatccgaatctacctcagtggcacttcggaggccggtgttcgcattcacccacttttggaagacggagaactaagtgaggaagcacgtaaaaggccattaaagttggcggaggagcgagccctcttcagctacgcccgtcgaatagtggactttcggaaacgaatggcggagacagttgatcgattgcagacgctcatgcaggacattccgccacccaaaaggaaagaggccactaccgactctcaggccgcagatgcgtccacagtctacactcaaaccaaagcccagatggcggcgcctgcacagcagccggagccgagccaggaagagaagcagtcgacacaaattcaaaaaggaaagcttgccgaaaacggctccggattgggtgaagaggagtccggctgcgtgtggtcgcagttggtgcagaccatccttcggaagaccacggtgcagcgggtcaaatttgacgaggccgtgctccaggaaaatacgcgcaaggcactggagaagtacgcccgcaaggagttaccccaccatctgttcgcctgccaccggccggagtacattgagggattcgcctatcgggacttttatccggaagcgctgtaa

SEQ ID NO: 24267 - protein, 982 aa, DROSOPHILA; identical to SEQ ID NO: 7368

SEQ ID NO: 24268 - DNA, 6797 bp, DROSOPHILA
tcgtatcgaatccatatcgagatcccctgattaccaataatatatggcccattgaaaatgtccgaaggttggacacgtttctgccaccgagtgagatctcagtagatatgctatattgttgggaaatcggcctggtaggcccgggcccttaaacgattaacattttatcataaattcaaaacctaaagctaagacaatggacgaaagtcgcaggaaaaaatcgcagatgcttttgtgcatagaatgttggtgccactgaacaaataaattatatttcattatgccaatgttgcaaataaatatttataattttccaaaaaaaaaaaatgttatcaataaatatcattttagaatgcaattttcagtttggtttcctcacgtatttaaacctaatgtaataatctggtaaggcaatgtaacttgcattacctgctgaaaatataagtgcattgcacttaagtcaaagtggccaaggtgtcaattgaccaaatggacacaatccaagccaacaagcgattgataaatatttgagctttgtttttgacatagatgcaccgaaagaaaatgaggtatggtacacaaaaatcaagcaaatcaaccatatacgaaaatgatatgccacaagttcaaaaagaacgtattaatcaaaaatatggtttattctaaagcaatattgcaacaaaacgttattctttaacaacgaatattttctaataatttctattaggatttatataatttctgttgcaaatttctatagttccacagtgaacaaaattaaaaatgcaccataaaaaaaaaacttggatgtgtaaccatatatttggccattgtgaactgtttgttatcacacggaggctttggcgagtgttcgctgtgagtcgtgcttttggccatttaataatccgcaccgaaatgagatgtgttttgcatgatttcattgttggccatctgcattagcattccccccgctccatggagttgttttaacatctggcagatggcatatgcctcatggtatggaggcatatcgcaccaattaaggggagagctgccaactataaatgcagacggggcctccaagatggtcatcagttaatcggttacgttcgctcggtgcacctctagcttccccagattcagtgacccccagtgaagatggtaagtggccatctcatatccctctcgtatatatttttttaaagtgattgatttaccaagtgatatgtgtcgtttttgctctcttgtccagaaaccctttgcatttatcgttgtggctgctctcagcctggttgtggtcagtggacgcccgggtgcccagtatctgccacctttgccggttaaggaggtgtccgcagcgcagagcttccagcaattggtgcagacccagctccagcagcacatccagtcgcaaatccatccccaagtggagtccattcaggcctcggttccgctggctagcttcaccatccagtcgagtggacagcagcaatatcagagtgccccagccccagctccagctccagtttccattccagcacctgctccagtggtaaactccgctccagctcccgcccctgctcccgtggaggttcaacagccggctcctcaggtgatctatgaggcacccaagccagtgattgccacccagacggcggcgaagaacgcctatctgccacccgctcccgtccagcaatttgtgcccgctccggagccagtggttgcgaacattgcaccacagcaggagaccatcacgaccacttacaacgccccagctgccgctcctgttccagcacccgcaccaattgccattccagttcctgcagtgcaggaacagcaccaagtgatccagcagacctactccgttccagctcctgctcccgcggtccagcagagctactccgctccggctcccgctccagtggttcagcaaacatactccgcaccagcaccagttgtacaggaacagacctacaccgctgccgctcctgtgcaggccgtgcagcagctgacttattcagctcccgctccagtgacccaggaacaatactacagcgctccggcttctgtggttcagcagacttcctccgctcctgctcctgctccagcaccagttcaggaacaattctatagtgctcctgccccagccattcagcagacttactctgctccagctcctgctcctgtcgttcagcagacctactccgcccctgctccggcaccgcagcagacttactccgctccagctccagcagtccaggagcaaactcaggtggttcagagctacagtgctccggctcccgctccagttgctcagcagacctattcctatccagctccagtggtccagcaagcgccagtggttcaggcagtggctcagcaagcacctgtggttcagcagagctactccgctccggctcccgctccagtggttcagcaaacatactccgctccagcccctgtggttcaagagaccattcagcaagcccctgttatccagcaggctcctgtggttcagcagagctactccgctccagctcccgctcctgtggttcagcagagctactcagctccagctcctgtggttcaagagaccattcagcaagcccctgttatccagcaggctcctgtggttcagcagagctactccgctccagctcctgtggttcaagagaccattcagcaagcccctgttatccagcaggctcctgtggttcagcagagctactccgctccggctcccgctcctgtggttcaacagagctactccgctccagctcccgctccagtggttcaagagagcattcagcaggctcctgtgattcagcagagttacaccgctcctgctcccgtttccattcctgagcccgtgcagcagattgtgcagcagccgcagtacagtggttactcctaccagactcctcagcaagctccagctccgattcagcagtcccttcctgctccagcacccgtggtgatctcggctcctgctccagctccagctcctgctccagttcaactgcagcagtcctttgtgccagcaccaccagctcccatccaaatccaacagccagcccaacccattgtacagtactcaccaccagtggtgcaacagcaggtgacctacacccagcccgctcctgctccaattcaagttgccgctgcagctcccgttgcggtttccgctcccgcagagatcggaaccaactacgccgccaatggtggttacctgtactaggatgcctgtgaacggaccccagcggaggtccgaactcgcatcaagttgggtgttcaacgatttagctgaacttagtgttacgtagccaatttctagcaccttataattttgttaatcaataaattgtttttgttttataaaaaatagttttgcatcttaatatttcagaaaaaaggagcaagtgagacatttgttgtcagtatgataagtttatctaatttggtgacatttagatatccgctcattcgagattgcttaaaaaataacacaaaaaacataatagtcaagtagctcgactacccgatacccattacaattcttagagttcacaggatggcacaggattacctacagcagtaaccagatggcattgatttcgaaactcaacgcataccgtttaaaatatatcccatatatttacaataaatcgtgaaattccagtccagtacttatcgttaaacttcatcttcaatgtgtgacttaaattatgaccacttcgctaaacgttaagccaccaatttataaatcaatccaaagcggttttaaattaaaataaattatcaagtagatacattatcatctaatagccaaatcgaataccaaatctgctgatatttatggatgtttctattgccaattaatggagtataattactggactcactagaactaagataatatattttttcagaaagaatgacccaatatgttacaaggttacaagaggtaacaaagcgatctcaagtgtgcaactttagtcaatttccatgccagtttcacccattgtaggccattgttttcccgggtaattccccgccaatgattaatggagtaactgctcagaactcggacttaatattactcttcatcgagggcttttggatatgtagatacatatatgtagcgttttggattccgctttgatggatgatggggtaagtaagacggaaccgcggacttatgaatggagttcaataacgagtttcataccgcctgtgtttgccatttctcatgtatagtatatagtatatcaacagcatcatcagcatctccgatcagcgaacagaattggatttagattcagaatgagaatcggaatcaaaatcaaaatcaaaatcagcagaagagtgaaacggagaaaagttgcggaatattatgggcgactaatgagcttcgcgggcgaaaagcttcattattatggctcttttattttctaatgtcgggtttttgggtatagacgatatagtttgtattgccatcggtgtgcgttttgttctggttttttttttttgtttttgttttgtatagcgccttttgacattcgtgtatcaagttggccagacattttcggtgactataaataggcagattggctgtgaagaaggtactagtgttctcacaacttcggtcccagcaacatggtaagctccagtgtcccagagtgatcctcgattcccggaataatataggatattctgctggccaaatgagatactaaatattgctccttacaatcgattctagaaattcttcgctatcctctcgctcgcccttctggctgtggcctccgccgatgtcagccacctgaccaacacctacctgcctcccaaatcggccgctgcatccaccagctacgagtcctaccaggctgctcccgtcgaggccgctgcctctgagacctatgttgctcccgctgccgctgctagcacctacgagagcgagtcctactccgccccagctgcatccttcaccagcgaatcctatgccgctcctgctgccgtcgaggccgccgttgagaccgccgctgaggagaccaacgagcagcccgctgccagctatgtggctccagtggtgaccaagaccacatactccgccccagccgtctcctcgtactcctcttactccgctcccgctgtggtggccaagacctacaccgctcccgctgttgtgaagacctactcggctcctgctgtgtccacctactctgctcctgccgtgtccggatactctcagacctacaccgctcccgctgtggtcaagacctactccgccccagctgtgtccacctacaccgccccagtggtgaccaagacctacaccgctcccgttgtggccaagacctacactgctcccgccgtgtccacctacaccgctcccgttgtggccaagacctataccgctcccgccgtggtcaagacctactctgccccagctgtgtccacctactctgctcctgctgtgtccacctacaccgcccccgtggtgaccaagacctacaccgctcctgtggtgaccaagacctacaccgcccccgccgtggtcaagacctactccgccccagctgtgtccacctacaccgctccagctgtgtccacctacaccgccccagttgtggccaagacctactccgcccccgctgtgtccacctacaccgctcccgtggtgaccaagacctattccgctccggctgtgtccagctactcggctcccgctgtggtcagcagctactccggatcctccggcaccgtgtacggctccaacggcggatacgtctactaaagactgcatcccaaaacgaagctaatcatacgacgaaaacctttttttttcttacaataaatcgaatatgcttaaaacagagaaatctttaattttagatttaaaattatgcaatttaatggatttttttttagacgattagctcgcattcttattaatggaaatacttggaatttagcggttgaatattaagttctgtaggggatttttttaatgtgaagcttaatttattgaattgatgggaatacctcgattattattcttaacatttgtcatttttatatataaaatgcttatatattttatctactatttaaaatatataccctaaatgctccatatttgctgacctaatcctggttctttgcaataaaagaaacaatttttctggtttgtcaagttccaagttgctattaggtcataaggagaattcccaacagacataatcgcgttttcatatatccgggaataaacaaaattacaccttttgttctttgaagacaataaaatattttatatattcctttgatttagaaaacaatgtccataaaatttaaatgtaaatcgccacttaaagaaacgtaaaatacaaggcaatcacagattcgatttcttttttaattagaacctggtttttatcgaatagatagttgttattttttgggtaatatcacggccattcagcttatagcacagcttccaaaaattgcaaatcaatgtttttagcataacaatgagtaaaaaagagaaacaacccactttcatttcaccatgtctctcctttaaatcctcctataaaattgtcattaaatcgcaacatcacagccaattaagcagtcaacggtgccaagacaatacaatttatgagtttataaaatcgtgaaaatgtgctagacaaatgctatacaaatctgagaccattgcgatagaggaaggaacgcatcccgagcactcataaatacatatatcgagcaaaattgataaataaacgcgtctagca

SEQ ID NO: 24269 - DNA, 3048 bp, DROSOPHILA
atggcatatgcctcatggtatggaggcatatcgcaccaattaaggggagagctgccaactataaatgcagacggggcctccaagatgaaaccctttgcatttatcgttgtggctgctctcagcctggttgtggtcagtggacgcccgggtgcccagtatctgccacctttgccggttaaggaggtgtccgcagcgcagagcttccagcaattggtgcagacccagctccagcagcacatccagtcgcaaatccatccccaagtggagtccattcaggcctcggttccgctggctagcttcaccatccagtcgagtggacagcagcaatatcagagtgccccagccccagctccagctccagtttccattccagcacctgctccagtggtaaactccgctccagctcccgcccctgctcccgtggaggttcaacagccggctcctcaggtgatctatgaggcacccaagccagtgattgccacccagacggcggcgaagaacgcctatctgccacccgctcccgtccagcaatttgtgcccgctccggagccagtggttgcgaacattgcaccacagcaggagaccatcacgaccacttacaacgccccagctgccgctcctgttccagcacccgcaccaattgccattccagttcctgcagtgcaggaacagcaccaagtgatccagcagacctactccgttccagctcctgctcccgcggtccagcagagctactccgctccggctcccgctccagtggttcagcaaacatactccgcaccagcaccagttgtacaggaacagacctacaccgctgccgctcctgtgcaggccgtgcagcagctgacttattcagctcccgctccagtgacccaggaacaatactacagcgctccggcttctgtggttcagcagacttcctccgctcctgctcctgctccagcaccagttcaggaacaattctatagtgctcctgccccagccattcagcagacttactctgctccagctcctgctcctgtcgttcagcagacctactccgcccctgctccggcaccgcagcagacttactccgctccagctccagcagtccaggagcaaactcaggtggttcagagctacagtgctccggctcccgctccagttgctcagcagacctattcctatccagctccagtggtccagcaagcgccagtggttcaggcagtggctcagcaagcacctgtggttcagcagagctactccgctccggctcccgctccagtggttcagcaaacatactccgctccagcccctgtggttcaagagaccattcagcaagcccctgttatccagcaggctcctgtggttcagcagagctactccgctccagctcccgctcctgtggttcagcagagctactcagctccagctcctgtggttcaagagaccattcagcaagcccctgttatccagcaggctcctgtggttcagcagagctactccgctccagctcctgtggttcaagagaccattcagcaagcccctgttatccagcaggctcctgtggttcagcagagctactccgctccggctcccgctcctgtggttcaacagagctactccgctccagctcccgctccagtggttcaagagagcattcagcaggctcctgtgattcagcagagttacaccgctcctgctcccgtttccattcctgagcccgtgcagcagattgtgcagcagccgcagtacagtggttactcctaccagactcctcagcaagctccagctccgattcagcagtcccttcctgctccagcacccgtggtgatctcggctcctgctccagctccagctcctgctccagttcaactgcagcagtcctttgtgccagcaccaccagctcccatccaaatccaacagccagcccaacccattgtacagtactcaccaccagtggtgcaacagcaggtgacctacacccagcccgctcctgctccaattcaagttgccgctgcagctcccgttgcgaaattcttcgctatcctctcgctcgcccttctggctgtggcctccgccgatgtcagccacctgaccaacacctacctgcctcccaaatcggccgctgcatccaccagctacgagtcctaccaggctgctcccgtcgaggccgctgcctctgagacctatgttgctcccgctgccgctgctagcacctacgagagcgagtcctactccgccccagctgcatccttcaccagcgaatcctatgccgctcctgctgccgtcgaggccgccgttgagaccgccgctgaggagaccaacgagcagcccgctgccagctatgtggctccagtggtgaccaagaccacatactccgccccagccgtctcctcgtactcctcttactccgctcccgctgtggtggccaagacctacaccgctcccgctgttgtgaagacctactcggctcctgctgtgtccacctactctgctcctgccgtgtccggatactctcagacctacaccgctcccgctgtggtcaagacctactccgccccagctgtgtccacctacaccgccccagtggtgaccaagacctacaccgctcccgttgtggccaagacctacactgctcccgccgtgtccacctacaccgctcccgttgtggccaagacctataccgctcccgccgtggtcaagacctactctgccccagctgtgtccacctactctgctcctgctgtgtccacctacaccgcccccgtggtgaccaagacctacaccgctcctgtggtgaccaagacctacaccgcccccgccgtggtcaagacctactccgccccagctgtgtccacctacaccgctccagctgtgtccacctacaccgccccagttgtggccaagacctactccgcccccgctgtgtccacctacaccgctcccgtggtgaccaagacctattccgctccggctgtgtccagctactcggctcccgctgtggtcagcagctactccggatcctccggcaccgtgtacggctccaacggcggatacgtctactaa

SEQ ID NO: 24270 - protein, 1015 aa, DROSOPHILA
MAYASWYGGISHQLRGELPTINADGASKMKPFAFIVVAALSLVVVSGRPGAQYLPPLPVKEVSAAQSFQQLVQTQLQQHIQSQIHPQVESIQASVPLASFTIQSSGQQQYQSAPAPAPAPVSIPAPAPVVNSAPAPAPAPVEVQQPAPQVIYEAPKPVIATQTAAKNAYLPPAPVQQFVPAPEPVVANIAPQQETITTTYNAPAAAPVPAPAPIAIPVPAVQEQHQVIQQTYSVPAPAPAVQQSYSAPAPAPVVQQTYSAPAPVVQEQTYTAAAPVQAVQQLTYSAPAPVTQEQYYSAPASVVQQTSSAPAPAPAPVQEQFYSAPAPAIQQTYSAPAPAPVVQQTYSAPAPAPQQTYSAPAPAVQEQTQVVQSYSAPAPAPVAQQTYSYPAPVVQQAPVVQAVAQQAPVVQQSYSAPAPAPVVQQTYSAPAPVVQETIQQAPVIQQAPVVQQSYSAPAPAPVVQQSYSAPAPVVQETIQQAPVIQQAPVVQQSYSAPAPVVQETIQQAPVIQQAPVVQQSYSAPAPAPVVQQSYSAPAPAPVVQESIQQAPVIQQSYTAPAPVSIPEPVQQIVQQPQYSGYSYQTPQQAPAPIQQSLPAPAPVVISAPAPAPAPAPVQLQQSFVPAPPAPIQIQQPAQPIVQYSPPVVQQQVTYTQPAPAPIQVAAAAPVAKFFAILSLALLAVASADVSHLTNTYLPPKSAAASTSYESYQAAPVEAAASETYVAPAAAASTYESESYSAPAASFTSESYAAPAAVEAAVETAAEETNEQPAASYVAPVVTKTTYSAPAVSSYSSYSAPAVVAKTYTAPAVVKTYSAPAVSTYSAPAVSGYSQTYTAPAVVKTYSAPAVSTYTAPVVTKTYTAPVVAKTYTAPAVSTYTAPVVAKTYTAPAVVKTYSAPAVSTYSAPAVSTYTAPVVTKTYTAPVVTKTYTAPAVVKTYSAPAVSTYTAPAVSTYTAPVVAKTYSAPAVSTYTAPVVTKTYSAPAVSSYSAPAVVSSYSGSSGTVYGSNGGYVY

SEQ ID NO: 24271 - DNA, 2727 bp, DROSOPHILA
tggctggagcattggtggctttagtacactatacgctgcctctgtgtatccggatgtcaagggagtggtactagacgccaccttcgacgatgtgctctacttggccgttcctcgcatgccagctgcactggcgggcattgtcaaggtagccattcgaaactactgtaatttgaacaatgccgaactggccaacgagttcaatggacccatatcctttattcgccgcactgaggatgagatcattgcagagtgagtgataacttttgcatttgggcagaggtctttcctaaaacgtaacccattgatttccattagggacaaccacattgacacaaaccgcggaaatttcttggtcttgtcagtgctcaagcaccggtatcccaacatttttggggcttcccagttgaataaggccaaggggctgctgtctaagcccctggaaccatacagtatccccgtcgccgacgagaagctgtgcatgtcgcgcctgatcacctacgcctctgacgagggcaagtcattccccatgaacattggagcagattactcggaggaggtgcgcaatctgatggctgtgttcttggtgggtttattcggcagtttaaatggtctatatatctaatactgttcacctttcagctgcgcaagcatttacgtgactataactcgacgcactgcacccagctgcccggggagttctttaccatgccgtgggacatacccactgagcagggatttgtgttcacctaagctcattccgcaggtgatccacggccgtatgcttagatttagtaaaatggtttttagtaatttttgccttctgactgcttattaaattattctaactgggaacagccgggtagctggtgtcttctgaactggtgtgaaattatatacaaaataaatgtcacaagctaaactagacgcgtcgtcttgtggttagtttctatttcatggtacagctaaaattggaggggaggggcagttcaacacttagttcctacgagttcttctttgatccaccgaagccggagaagcccatgatggcggccatgtcgtcgggcatgccgccggactcgaagtccgtgtcctcggccttgcgcttccgctcttttcgcttctccttgcggtgttccttgtagcgatcctcctcctccttggcctcccgcaggcggcgctcgagctcgtagtctttctgcttctcctccatcttcttcttgttctgctggaagcgctcctttacctggtcgacggtgctccgctccaccttcatggacatgcccagattgcgctggtgcttcttgccattgatgtggtccagaaagttgatggaatccttgaccacgcagtcgcaaacgttgcagtaatagccaccggattgcgaggtgggtgtgttcttgttgatgacaacgctcttgcccagcttgctgtccaggtccaccttatagtcgcgtcgcttgaggttctcccgctgtacgggttctggtgaaaaacaaaaagacttttattatgtgtgccttccagggaatttagacactgaccttcttccttgggtgccacctggttgagcagccgctccgccgccagcttctcgtactcgttcttgtcccatttccttcggtggtcatcaggtcgcatcgtcatggtggcgctgggatgacaattgcactaaaatctattcggtaaaagtaaggcaatgaaaatttgtaaatatttttgttagcgatgcggcggtttgcgtctgagctaagattttggacagggatgacaacttgatatttttttttaaatgttatcgatggaaccagaaggcggatgtgaaaatgtaaaagcagttgttaattttaatttaaaaaaattgtatttaaagtttaaattaaagcttatttaatagcatataagtccgaatctgtatacacaaaaaaatggacctaattttggacatcgacgataaccacaggtaggtaaaataatcgatgtgcgataaatattgatttttcgtatacagcagttaggaaaaaaacggtaggttgcaataaataccgtaaaatctgggaaattattgtattttaaagtttcatagccaaaaaaatgggtgccgctttctttcccgtgctgtttttcaccgccttgtggggcggtgtgggcatcgccatgcccataatgacccccaaaggacctcaccagaatctgatccgctgcatcctgatgctgaccgccgcctgctgctggctcttctggctatgttgctacatggcccaaatgaatcccttgatcgggcccaaactaaagcgcgatgtggtggccatgattggaaggtcctggaacaacccaattgtggctggttaggaaaatagagtgactgctaactaaattattctgcaataatcgtcacattagctgtttgttttacgttgtaaataagaagtaaaaatatcaagtgttctgttaacttcgaattgtttaaatatcagatattcaataataaattaaatatttagattgccttgtaaataaaatctataggcatcaactagtacatctgcagaatactattattgtttcaaaccaaatattctttctaccaatataaattgtataaatgaagacagtttgaataataggtctatttaattttttgaataatttaagttaaattaatattctttagttaattaatggctaccacacagttatgctgaataaattccaaaaacaagaaagtat

SEQ ID NO: 24272 - DNA, 668 bp, DROSOPHILA
atcgctaacaaaaatatttacaaattttcattgccttacttttaccgaatagattttagtgcaattgtcatcccagcgccaccatgacgatgcgacctgatgaccaccgaaggaaatgggacaagaacgagtacgagaagctggcggcggagcggctgctcaaccaggtggcacccaaggaagaagaacccgtacagcgggagaacctcaagcgacgcgactataaggtggacctggacagcaagctgggcaagagcgttgtcatcaacaagaacacacccacctcgcaatccggtggctattactgcaacgtttgcgactgcgtggtcaaggattccatcaactttctggaccacatcaatggcaagaagcaccagcgcaatctgggcatgtccatgaaggtggagcggagcaccgtcgaccaggtaaaggagcgcttccagcagaacaagaagaagatggaggagaagcagaaagactacgagctcgagcgccgcctgcgggaggccaaggaggaggaggatcgctacaaggaacaccgcaaggagaagcgaaaagagcggaagcgcaaggccgaggacacggacttcgagtccggcggcatgcccgacgacatggccgccatcatgggcttctccggcttcggtggatcaaagaagaactcgtag

SEQ ID NO: 24273 - protein, 194 aa, DROSOPHILA
MTMRPDDHRRKWDKNEYEKLAAERLLNQVAPKEEEPVQRENLKRRDYKVDLDSKLGKSVVINKNTPTSQSGGYYCNVCDCVVKDSINFLDHINGKKHQRNLGMSMKVERSTVDQVKERFQQNKKKMEEKQKDYELERRLREAKEEEDRYKEHRKEKRKERKRKAEDTDFESGGMPDDMAAIMGFSGFGGSKKNS

SEQ ID NO: 24274 - DNA, 2597 bp, DROSOPHILA
cgtgccttctcggaaacgccgccggtgtgcgagggtgtatcgtctttgtgctcgcgcagctggccgcgcagcttttcgaagctcttggtgtccggtttcttgaaggcaaactcactggaagcgccagaggcgttggcctgcggcgtggagctcccgccgccggtgtcatcgaattcgctgtccttgaaggagatcagtcgctcggatcgctccttttcggcccgtcgcttggccgccagcttgtccaggcccaacatcgatccctgcggcaccttgaatccaccgccaccgccagcgccggcatccttgggcttccggatgaccaggccgccgcgcgtctcctggccagcggtgccctccagccgatggacacccgactcgtcgtcgtcggacatcctgttgtgctggttagtctgttgctccttggctatttcgcgagtcttgctcgttgtcgcaaaaacgattcattcgcgttggcgttcttgggcacagctgatcggcggggctgccatcccgctaaaaaaaaaaatgctggacagcagtaatgccactctgggttaattgtcgttacgaatttacattttattctaatgcagaaaattagtttttaaatacttacttttaaatattatttagcttgaaatatttatgtgcatgtgcgcaactgtaaaattatatctatttcgtttttccacttattattttctttgttgcattttgttttgtttaatttattggtagaacttgtaaccgcataataagatggtaagttgtatttgaaatggaataactaagctttatatattgcaagatacaataattatgattatgtgatcaaatgtccatttccattttctcaaaacatttaaattacattaaaagtttacagctaaacaaagagtggcaatgctagaaaataaagcccttgttaatttttaaaaaaataaattaattttccagataaccgttttatttccattaaatggactgcaaattgaatttagtctttgctctcggcctttgtgggaaccgtctgcgcgatccaatcgagatacggcggattgccattctggatgggcagcgcgatgacctcggcgacgctgtagggatgattctcgcggatgaacttgctcagatcgtcgatgcggctggtgcgcgtcttgatcatcaacagatattcggagtcctcgctaatctcgccttcccacttgtagatagactcgacttgggacacaatgttcacgcatgcggccaatttcaactcaacgatgctgcggcccagctttctggctgactcccgatccggagtggtcacaaatgccaccgagctgctgcccgactgataggcattgcctgtcgccgctgattgttgctggtcgcccattttggagcattcactggaattggaattcgaattcgaattggtactggaactggcgttggcggcactggaagagaagcaacaacttttgtgactgctcgctgtggcgaatgccggcgggttggcgatggcggtggtgacgctggcagcgatcaacaggttgcgcaccagcgaccagcgaaggggcaagcaactggcggagatgcgatattgcattcagatgcactttgcacggtgaaaagcaaaacaataatgaaacaaaaaaccaagtgccacagtcggcggcgttgccagacattccagtcaaatgcgatgtttaacattagggctcctgcgcacgagacaagtgggattaacataaaatgtagtattttaggtatctatgttaacggtattttttttcttgaagagaaaagtaacggttcgttttttaatagatttcaaaactataaaaaataaacaaaaaaaaaaactttttcgggccacaagatgccatttaaaaaaaaaacgcatgtgttcgatttagtttttaatattttgctagctatataaactccaatcaccgattaacatttaaatacaatatcattttaacgctacaataaatacatagatataataaacagcaaacagcagcaataataaaataaataaataaccactgccactcatttacgacacaaatcgtgcattcgcatcattgcctgcgtaatttcccccgaactgtccggctgatttggcggcatcgtcgtccatgtcagccaccaggatgtccggcacctgccgcccaactccgcgtccgccatcgccatcgcctccggccccacctccgtccagcgcatgtagtttgctttcctgttgagcagacgatagtagtaagggggcaatcgtcacatatcttccacggccatctgacccccatcgctactcactctgctggggctctcgagaagcaattcctgagccatcggatcgccggacgccgactgtcgtggacggagcagtcgctggagcgcattcggcacactaaactgctgagccgcgaacgaggacgtggcgctggtggtggtgaatgtgtcgttgctgccgcggctggacaccgttcccgtttccgtggtgaagccgactcccgcctcggcgcgttcgtgctccaggaacgctttggtgccgccgagcgtcgccagcggattctggaaatgcatgttaatgttgagat

SEQ ID NO: 24275 - DNA, 597 bp, DROSOPHILA
atgcaatatcgcatctccgccagttgcttgccccttcgctggtcgctggtgcgcaacctgttgatcgctgccagcgtcaccaccgccatcgccaacccgccggcattcgccacagcgagcagtcacaaaagttgttgcttctcttccagtgccgccaacgccagttccagtaccaattcgaattcgaattccaattccagtgaatgctccaaaatgggcgaccagcaacaatcagcggcgacaggcaatgcctatcagtcgggcagcagctcggtggcatttgtgaccactccggatcgggagtcagccagaaagctgggccgcagcatcgttgagttgaaattggccgcatgcgtgaacattgtgtcccaagtcgagtctatctacaagtgggaaggcgagattagcgaggactccgaatatctgttgatgatcaagacgcgcaccagccgcatcgacgatctgagcaagttcatccgcgagaatcatccctacagcgtcgccgaggtcatcgcgctgcccatccagaatggcaatccgccgtatctcgattggatcgcgcagacggttcccacaaaggccgagagcaaagactaa

SEQ ID NO: 24276 - protein, 198 aa, DROSOPHILA
MQYRISASCLPLRWSLVRNLLIAASVTTAIANPPAFATASSHKSCCFSSSAANASSSTNSNSNSNSSECSKMGDQQQSAATGNAYQSGSSSVAFVTTPDRESARKLGRSIVELKLAACVNIVSQVESIYKWEGEISEDSEYLLMIKTRTSRIDDLSKFIRENHPYSVAEVIALPIQNGNPPYLDWIAQTVPTKAESKD

SEQ ID NO: 24277 - DNA, 2713 bp, DROSOPHILA
cacacagttccaggaattccgcttctttttacaattatctggctattattgggatttataatttatgtacaattatttcttaattctcgagcagtgctgttctgtggtaattattttttcccttcgagttactggcagctggtggctcgtgacccaaggctttctgctccgcactggcgactgcattcggctcggctctgggtctccggatttcacagctctctagtagtgctccagctctccggcttctcctcactgaccgccgacaacatggcacacatcgtggcgggtctcgtggaattcgctactctccgcttttggcataaatctcggctctgcgcgcgcacttttattgcaaaatcaatagttccgcattcacatattgctgaaaagagcaggacaccccgctcccctgctgctcctcgaataccccgctctctcgtttccctgcccacaaccgccaagttggctccgctcgggccattcccattccctgccagcgtttccattgattaagtcggcctccacatggccaagagtgcaagtgcaccgagtgcgccatgtgcggggactttgtgtttttgctccagttatggtcaaccaccgggcacgcccccttccacattaaggcgaaaatacaataaccctattcggatgcattgttctaaaaataacataaattgcacttccgaaatgaaacattttcatactaaacaaactaaactatataatgggaaaaaagaattctgaaaaacaaatataaattaagagaaacataatatttaagctaatatatgaactatagatttcgggaaaagctaaatggggcgtaaacttataaatatacattgctagacatttttggttttcaatgtaaatactaaaaactaataataaataaacacgaataggaaaataatacgaaaaaattgttctatatttgccaatagctaaatcacaaatacaatgactgattagtaaattatctacactacggaaaaataggtaaataataatctgactacaaaaatcgctcatgtggcaagtttgttgagaattaaattgcaataattggatttttgggtggaatacatggcttatgttttgcagtaaacataaagaatatggtgatcagagatattgagctataagcaacaacaaaatgtacagtgaaagtttacgtccagaggttaatgtggttagtttggaaatagtggggcgtatctggggcttggatagccgtagcccaaccttgtccacttgctgccagtattgaagtacaaaaagggtttggcgaagccactgcttccgtggtttcaccgactgtgtgtgatgtggcttaagatccggaaatacgcggaagaagcaaccgccaaagattagctaggtgggagattcctatgtgggctttccttatccctccttgatgggatttccccaggacgaggcaatgatccgaatggtgtttccattgagtttcggccccagcagtggattcagttgcgccaaatagcagcacagccagaaaagccagcagacgacggcggtcagaaggaaaatgcagcgcaccaggtcatcgtgcggttgcttggtgaacagaatgggtccgtacttggccaccgccgcccagaagatggtgaagaagacgattgttaggaaaacttccatgattgttgcttattttctccactttcctttatttacgtcaaattaaattcttttttaatcaatcatctgtgttggcggaaatctactaacgcgtctcaccaaaatcctcacacggcgcctgttgcccaacactaacacactgaatcactttcaacactggtcaacagttggtttcgcggcttaattttattacttgaattaattattgttaacaaactgtttttaatggatctcgaatttgacataaatcatagaaatacatagaaaaatcatttcaaaataatttaaataattttcgctatttaataaaattacagggcttaggtaaattttataaatccactttaattatacattttttaagtctcaacgcttatctaaggatatctatatatccgtctatttaaaaaaaatgtaattgtctagctatttttaaaatatgtaatggttatgggctgaccttttctaatattcacgactatatctagttgtttttagatttaatttaccataaatctatatctaggtaaatccatacctaggtttggtgattccaccacaagcctattaaatatttatggctaatagtgaatgacgggatctaagaatgacgcatttcataagtgtttgggggattggattgaattacacatataggattcgtggcatggtggttacatagtatcacaagattggctgcaatggctcttctactaacaaaaccactgaacatgctccgctttggttttatcacggaccaaatggaataatcaatggccgcagggagaaattctagttgcatgccaatcaatggaaagtgcgcttataagtaggcaatgattttgagggtcatcgaaggatcctacattcgattaccattttgaatttctcggtcagtactcacatgtaaattaaggatgttttagctccgagtgttgaggtttatttacgttcctgctactggggcacgcacacacgtggggaaaggggttggtggtcgtgggggctggttaaccacaccaatacacttgcagcaatcgcagtc

SEQ ID NO: 24278 - DNA, 713 bp, DROSOPHILA
taatttgacgtaaataaaggaaagtggagaaaataagcaacaatcatggaagttttcctaacaatcgtcttcttcaccatcttctgggcggcggtggccaagtacggacccattctgttcaccaagcaaccgcacgatgacctggtgcgctgcattttccttctgaccgccgtcgtctgctggcttttctggctgtgctgctatttggcgcaactgaatccactgctggggccgaaactcaatggaaacaccattcggatcattgcctcgtcctggggaaatcccatcaaggagggataaggaaagcccacataggaatctcccacctagctaatctttggcggttgcttcttccgcgtatttccggatcttaagccacatcacacacagtcggtgaaaccacggaagcagtggcttcgccaaaccctttttgtacttcaatactggcagcaagtggacaaggttgggctacggctatccaagccccagatacgccccactatttccaaactaaccacattaacctctggacgtaaactttcactgtacattttgttgttgcttatagctcaatatctctgatcaccatattctttatgtttactgcaaaacataagccatgtattccacccaaaaatccaattattgcaatttaattctcaacaaacttgccacatgagcgatttttgtagtcagattattatttacctatt

SEQ ID NO: 24279 - protein, 84 aa, DROSOPHILA
MEVFLTIVFFTIFWAAVAKYGPILFTKQPHDDLVRCIFLLTAVVCWLFWLCCYLAQLNPLLGPKLNGNTIRIIASSWGNPIKEG

SEQ ID NO: 24280 - DNA, 2551 bp, DROSOPHILA
ttgaaaacagttaaggaacatataagcaacatagttacccccactgtatttgttttctgacccggcttctattcgtattcaaatttctggcgaaaattatctgaaatatgggtcaaaaactacaggtttctggtttctcgcagcgaaatatgtgttaatcacttcccatgaattattcaataaatttcgcataaaaaagcagcgacaaatctatagaggaaggtgcgagtgagatggcgtgcagatttatgtgatttacaggtggcaattaagtgtaaaagtgttgccaaacataagcaaacaatttagcaggcgattctacaccgattttacgacgctcagaacacgtttacatcgcccggcgactgacgactggattatggcaccccaccgatcaagggttgccccacagccgcagctggcgcattttgaaatcaagtttgcagattggaggggggacgtaaatttatgggcattgcacttggtcccctttagcttaattagtgggggctacttggtagccacttaggagataattgctgcggctaattccctgactttgtctttggccaaaccagcaaaacaaaccgaacacactgctcctaaatcttaagcgcttcacataaattttgggtcgaggtcaggcggttatctatgggaagtatggactgatttacgacccgactaagggtgattgaatttcaagccaaagccggtgacaaagtgttgggaaaactctgggtgacatcatcgaaggcagtcaatagaaaatgatgtggtgaccacaagaccaaactgcattctctgaatatgcgaacacgacctatttcatacacacagcacataaaatatcctcaatattttgtaataatatcgatagtaaggtttttgaaattttattttttagctgcagcttagcatgccaagacttttgcttcggtagcttgtgtaagtaaatcctataggcacatcattttaaagacaacattcaaagcagttagaactctgttcgaataaaaaaacaaaaaaaaatttatatattttttaaataaaggtgagaaaagtacagcacaacgatttggctaaactttcaaaacaatactagaacctaaaaccctatgtataaaatacttatacactacaaaagtgaattgtcgaataagaaggattcgttttgatttacccctcagcccaacaatgccggtttcccctggagagggggaagtcaatggcggcggagatgtggccaagaacgactccaactcgcagcaatcggtggatggaatcgatgcgttcgccgcctgccagaagccgcgtccggacaccagttccatgccggttcgccagtacctcgaccagacggtggcccccattttgctgcacggactgcaggctttggcccgggatcgccccagtgatccgatcagctacctggccacctatctgctgaagaacaagaaccgctgcgatgaggtcaagacagaagaaaactagttacccttggcttgtgctcccttgttttagtttttatttttttttttgtcccttatcacgacgaactgttgccgattttaggtttcgcacaccaaaaattactcttgtacacaacttatcgctgattacaactgaaggccacttaccagccacgatttcatggtgatccttcgttgctttcgtcttgttattaattttcccgatttaatttgcaatttatttgccgttggcttttcacggctccgtacacacgcacaagattttccgaattatctattatctcagcggctgccaattttggcaatcctcattattggccaattagccgggggagactttcaattagttccagctccggctgctgcgctttttgtttatttttcaaatatttatctttgcttaacacttccgattgcagcccacgctcgttgcaatctgcgatcgctgctgtttggtttcgacggttttgaatttcagtttgggccaggtttttttttgtttagatttcaaactcgcgctcgtgtgtctggtcgactggctggctcgtttgccactaaattcgcagcgagcttagttgacggtttaaaaacttcaaattcgaaaccgcttcggttcaaaagcgagcgccaaagcttcggctctgggttcgtcgtattttcgattcagtcagttctgcttgggccaatttaatctactttgggggctggctctccagctctcgagtaagccgatttctcggttttgaggcccacccgcaattgtcacgcgccaaaatcgaaatgaaaaaaactacatatgtacatatgcggcacatattgcatagaataattacatctaattgccagcgagagctgggtctaaagatcacaccacatcgctggttcagtgcatctccgagccaaatgagtgataaatacttcactcattttcgaaagggtttgcgaacggccttggcatgttggatcttgaagtgcgaagcaggttcaagccgatgtgaagttagataacttggcgtctctacagtttccgatcagttttaaaatgattaaaatacccc

SEQ ID NO: 24281 - DNA, 415 bp, DROSOPHILA
gaactctgttcgaataaaaaaacaaaaaaaaatttatatattttttaaataaagcccaacaatgccggtttcccctggagagggggaagtcaatggcggcggagatgtggccaagaacgactccaactcgcagcaatcggtggatggaatcgatgcgttcgccgcctgccagaagccgcgtccggacaccagttccatgccggttcgccagtacctcgaccagacggtggcccccattttgctgcacggactgcaggctttggcccgggatcgccccagtgatccgatcagctacctggccacctatctgctgaagaacaagaaccgctgcgatgaggtcaagacagaagaaaactagttacccttggcttgtgctcccttgttttagtttttatttttttttttgtcccttatc

SEQ ID NO: 24282 - protein, 98 aa, DROSOPHILA
MPVSPGEGEVNGGGDVAKNDSNSQQSVDGIDAFAACQKPRPDTSSMPVRQYLDQTVAPILLHGLQALARDRPSDPISYLATYLLKNKNRCDEVKTEEN

SEQ ID NO: 24283 - DNA, 3168 bp, DROSOPHILA
ctatgcccgactgcgaatttatgttccacaaccggattttgaataaaatactgaggagaatttgtgggcttttcgttgtgagggtgtactgttcgaccttttttatgatcgtcaacggaaaattttcagatcacttgaacacagtgagtatcaaagtcgaatggtcaaaatatatattgtatttattctgaacattaacatttccagagtgcgattcctctgattgccgccacgcttccagcgggagtttcttcccgccagcccaagcacttcatccagctcacggacagcggcaggttcagaccattcgatttcgggatcctgaggaacttgatcaactacaggagcctcacacctcccgactacccgctacataacgtccgccccctgacgccagtccacatattttatagcgatgatgacctatccgccgcaaaggaggatgttgaaaacttcgccaccagtttgccggaggcggtgatgcatcggatctccacgccgtcctggcaccacatggacttcgtgcactctatgaccgtcgctaatgtgattaacaagccggtcattgaaatttttaaaaggtttgagcaacctatcgactgtaaaggaagtctataataaataatatcgagtaccagcccgccattatcgactacgtccggtcttttacggaagagtaggttttctttcatgtacaacatctttcacttaatgataagctgtaaaatgctgcattacctagagagttccccacaaaattttacgttaaagcgttacatattgatttttttttgatgaaatgtataaatgagattagatctaacgttaaaccgataaatattattcatatatcagcgtttttttcacttattcctcctcgatatgtcgtacaaagcgtttgtcttcttttgtctctatattgaccttgccaagggactaattacagtaagcacacgcatcattagtcgtagttcatgtcttttaaatcctcctatcaaagtccgaaattatagcctcgcacaactatccggtagaagtacacacagtgctcacacgagatgggtatttactcgacgcgttccggataccgggctctaaattttgtcagcaatctggaccaaagccggcggttctctttcagcacggaatgtccgcgtcctcggacgttttcctgctaaacggacctcaggattcattggcattcatgttggccgacgcctgcttcgatgtgtggctgagtaactcaaggggcactcggtattcccgacgccacgtgtctttggatccctctgatgaggccttctggcgcttcagctggcacgagattggaacggaggacgtggccgctttcatagactacattctggacaccacgaagcagagagcgttgcacttcttgggtcactcgcagggatgcaccacgctggtggtgctcctcagcatgcgaccggagtacaacaagttggtcaagaccgcagtcctattagctccggctgtctttatgcgccacacaagcaccctttcgcagaccgtcttcaggagtttcataatggccatgcccgacaaggagttcatgtaccacaacggagttttaaacaaactcttgagtaatgtatgcgggctattcgttgccagggtgttctgcacaaccttcttcttgatttccaacggaaaaatttccaaacacctaaacacagtaagtgcacaaagacaatatataatattatacataagtttatttaaaatatcattgttttcagagcgttattcctctgattgccgccacgcttcctgcgggagtttcttctcgccagcccaagcacttcatccagctcacggacagcggcaagttcagaccattcgatttcgggatcctgaggaacttgatcaactacaagagcctagaacctccagactatactttgagcaacgtccgtcccctgacgccagtccacatattctacagcgacgatgatagttcgacagcaaaggaggatattcaaaactttgccgccagagtgccggaggtggtgatgcaccggatctcaacaccgggctggcaccatacggacttcgtgcattccatgaccgttgctgacgtaatcaacaagccggtcattgaaatttttagaagctttgagcgactcagcagtcctacatttttatgaaagtagtttccatatgaaatgatgaatgtctttaatgttgaatgaaaaataacctttcacttcataaacgaatgttcattgaagctaaaatgcctttgttttacactctcacaacttcttcagcattagtcacttatatacttccttacagcttttgagatatgaagctttaaatcaaagttattatttatgttatattttatgcatgaattgtttctcattattttatgttatttgattatagcgcaactgaattttcttatggctatgtcgttcggcaaggtaaattgcaaattagttctactattcttaacatctctttacaatcaatcaattcaaaccattgcaatatgttgttgatggagctcgtgattttctttgactggctgttgatcgtctctggtatgccgaaggtgaagtttggcctccaaaattttacgggtcgtggtaaagattaccgcatcaaagtgattactggggtcagtagctggtattgttaggtgggaccacatattcgaagaccgttttcttagattcttataatagacaagtacggctactcagtggagacgcacacggttcgcactggagatggatacattctggatatgtttcggattccctcatcacccaactgcaaggaggacggtttcaagccgtctgttcttatccagcacggactgatcagcctggccgattccttcctggtgacgggaccgaggagcggacttccattcatgctggccgatcgctgctacgacgtgtggctgagcaacagccggggagtccgctactcgcagcgccacatccggctgaaggcttcccaggatgccttctggcgctttagctggcacgaaatgggaatggaggacctgcccgccatgatcgactacatcctgtccacgacaaacgaggaagcgttgcacttcgtttgccattctcagggatgcaccaccctactggttttgctcagcatgaagccggagtataaccggatgat

SEQ ID NO: 24284 - DNA, 1104 bp, DROSOPHILA
tccgaaattatagcctcgcacaactatccggtagaagtacacacagtgctcacacgagatgggtatttactcgacgcgttccggataccgggctctaaattttgtcagcaatctggaccaaagccggcggttctctttcagcacggaatgtccgcgtcctcggacgttttcctgctaaacggacctcaggattcattggcattcatgttggccgacgcctgcttcgatgtgtggctgagtaactcaaggggcactcggtattcccgacgccacgtgtctttggatccctctgatgaggccttctggcgcttcagctggcacgagattggaacggaggacgtggccgctttcatagactacattctggacaccacgaagcagagagcgttgcacttcttgggtcactcgcagggatgcaccacgctggtggtgctcctcagcatgcgaccggagtacaacaagttggtcaagaccgcagtcctattagctccggctgtctttatgcgccacacaagcaccctttcgcagaccgtcttcaggagtttcataatggccatgcccgacaaggagttcatgtaccacaacggagttttaaacaaactcttgagtaatgtatgcgggctattcgttgccagggtgttctgcacaaccttcttcttgatttccaacggaaaaatttccaaacacctaaacacaagcgttattcctctgattgccgccacgcttcctgcgggagtttcttctcgccagcccaagcacttcatccagctcacggacagcggcaagttcagaccattcgatttcgggatcctgaggaacttgatcaactacaagagcctagaacctccagactatactttgagcaacgtccgtcccctgacgccagtccacatattctacagcgacgatgatagttcgacagcaaaggaggatattcaaaactttgccgccagagtgccggaggtggtgatgcaccggatctcaacaccgggctggcaccatacggacttcgtgcattccatgaccgttgctgacgtaatcaacaagccggtcattgaaatttttagaagctttgagcgactcagcagtcctacatttttatga

SEQ ID NO: 24285 - protein, 318 aa, DROSOPHILA
MSASSDVFLLNGPQDSLAFMLADACFDVWLSNSRGTRYSRRHVSLDPSDEAFWRFSWHEIGTEDVAAFIDYILDTTKQRALHFLGHSQGCTTLVVLLSMRPEYNKLVKTAVLLAPAVFMRHTSTLSQTVFRSFIMAMPDKEFMYHNGVLNKLLSNVCGLFVARVFCTTFFLISNGKISKHLNTSVIPLIAATLPAGVSSRQPKHFIQLTDSGKFRPFDFGILRNLINYKSLEPPDYTLSNVRPLTPVHIFYSDDDSSTAKEDIQNFAARVPEVVMHRISTPGWHHTDFVHSMTVADVINKPVIEIFRSFERLSSPTFL

SEQ ID NO: 24286 - DNA, 3813 bp, DROSOPHILA
gcagctgtgccgccgaatcggaagcgagcgatagatgtactactctgttgatagttacgcatagtgttaagctatttattttatttgttggtactttgttggcacttagcatttatatcttctctgttttaactgttaattgtttgtgcccgccctccgttcattccaactcggttgtccccgcctgcatcacaaatccatggagacacgcaaccagcaacgcaaagataaatgaattgtgtaaataagtaattcgtttagcacgattgtttgttagtttaaattaatgaagtgaccctcttacatccccgtttcagttgcaactgaaaataaataacaccgttacatacagtatcaatattctgaaaaatctctacattggctgttcacatatttggccacgcccgccaaaattttcaaaattaaaagacgcgctacggatttgtgagtacggatggtatcgattaaattcccaaagttatcgacagtgtaaccagatctaaagtggcgacttcagttgacggcagagacgacagcagaatgcaaaggcaacggattactcccaggatttaaatagcatagattatcgttgaaaccgctgacgacgcgcccagatgagctccatggactgcgccacgttcccaatgcatcctaaaatggacgagcaactggcccgaaccttcgtcatcaacgaggaggaggaggagaagcacattcagaaggtgcagaacgccttcctttactatgggtaattgttattgtttttgcgctgtgttctggagcacatgctccaaacggacgcttgccaaccgatcgtcgttgagggggggcggtgcggtgacagcgacatgtgcagacaagctgccgacaaactaccgtttcgtttggcgccagtgctggcggtgcaggagtaatcacgccaaatctggctagtgttttcaaatggctcaccgttccttagaagacgcatcttctaaagtatccaatagagccaaactacaactgagtgttcattaccaccattactgacatttgggtgaaaaatatctgcataccaaagatatcagattgcccatacagcgtttgtaaacactgtagtgtgtcatcactggtgataagcgtgcttgctgataatggaaatcaattaatttctcccatgcaggccatatgcgtgtcagcggctaaagcgctccatggattacctgaacagcctgtctggcgaggaccaaatcatgctagccaagtaccgagggcatctggagtgcgtgcgcacgtgcatcgatcgcaaccaggcggttatccgggaaatattgcgcgggcgtgtcctctatccgacggatgaggcgactggtgatccctcggagtttgacgagccgccgccaaatgtgcggcacggtgacatggaccaggtaattgactacatctgcggttcaatgcggaagctagacggcgctccttcatcatcccacaaatcccaatctaatagaatttatgttcctctttttactttatcttctatttttcctaccgctttgtaaatggtcagttgaatttgtccctctttatattttcaaatattagaattacttttggtaaaacaagggaagagtaatatgtatctttaaactggtcattcttgtgcttaaaaattgtttctacatgtcaatagactactcaccttacgtatagtttaatgtgcttggttatcctccaatatcttcagtttctcttttaattattgattggaactattcggtattgtttcttttccatatctgtgcacgacacccaaaccatgcatctcgcacccgctctaattcaactcgcagattgatattccattcgatgaagctgacgttgaacctctaaaaattttaaaggcccagtcgacgttgaagttgattgcgcgcgactggagcactgaaggagccttagaacgggagcaatcgtataaaccgatcatcgacagcatcgttgcgtacttcaagcacagcgatttgtgagtgactactacactaagcgtactttagtggtcttactaattaattattcatctgctttatcttaaacagcgagctgaaggatataaagatcctagtgccgggagcggggttgggacggctcacctacgagcttgcctgcttggggtactcgtgcgagggcaacgagttttcctacttcatgctgatcgcctccaattttgtcctcaacctgtgagtccagctcagtacgttgctttctaatgctgggtattgaacgtgctctgttgtctctttcggcagctgcgacaacgagaacaagtacgtgttatatccgtgggtgcaccagtatgtgaataacttaaggcgtgaggatcaggtggcccccgttcgtttcccagacgtctgcccgcttaaaaatccacccaagggccattttgaaatagcagctggcgactttctggaggtctacaagacgccgaacgcctacaactgcgtggctacgtgcttcttcatcgattgtgccaataatgttattgacttcatacgcacaatttacaagtgagttgcacacatttgaacgggtataccggcgatgttgattttaacattatcgttgcagaatcctcgtgcctggtggcatttgggtgaatctcgggccgctgctgtaccattttagcgacgtcagcgggcaaaacagcatcgagccggctttcgaggacctttgcattatcatggaaagcgtaggattcgttatcgagaaatcacgcaccggcatccgtaccaagtacgcacagaacccgtcttcaatgaaacagagcgagtaccagagtcttttctgggtctgccgcaagccggatctatttgaggagcagcggggcaaacgcaaggcctccagggagccacacgatcttattgtgcgcgaggacagcgaggaggagggggagcaacagccggaacgaaatgaaacggaagaaaaacagcaactgaaaccgctggccacagccaactgcgagactgagataaaggagcagccatcgtgatagccattgaaccaaactcaacaacacatccaaacaccacaatcaagtccaagtgcaaacccacctacagatggcatcacgaacatcttaattaccacgtcacaggcaagacagggaatcgacactgcagtgcttcgatgttatagattacactttatacctattatttactcctacacactgttatatatgccagttttaatttttcaaaggatgcaaattttaggacaatttctcgctcattatgctcatcatgctaacttaaatgggaaaagcgtcccaactaggtcaaccaaatatatcaaaagaaaatttttaaaaattaagataaaaagtttttatttgttcaattactagtggctttaaaccgatacctaccaattcgatagccttattaaagttaacgcaagttccacttgcatcagggttctcggcactcgctgccgcatacctcaccttgatatgacaaccaacatgctgtggttctccaaataatagtcaagatagttaagagggttcgagtttacgattagctttattttaagattcagttcgcgatctgctagcggttccgttatgtgtccgttcgagactgggcctcttctcccgccccgctgcttttatatccgcttcccccgttgacccctcaccctgagtgcgaccaacggcacttgttccgaatgcacacatacacaaacatgttcctagacaggccccgagtcgcctgctgacggggcccgaaaacacgagagccgagcgctggtgagtcctgacgaagatcgcaagaagag

SEQ ID NO: 24287 - DNA, 1624 bp, DROSOPHILA
aactgagtgttcattaccaccattactgacatttgggtgaaaaatatctgcataccaaagatatcagattgcccatacagcgtttgtaaacactgccatatgcgtgtcagcggctaaagcgctccatggattacctgaacagcctgtctggcgaggaccaaatcatgctagccaagtaccgagggcatctggagtgcgtgcgcacgtgcatcgatcgcaaccaggcggttatccgggaaatattgcgcgggcgtgtcctctatccgacggatgaggcgactggtgatccctcggagtttgacgagccgccgccaaatgtgcggcacggtgacatggaccagattgatattccattcgatgaagctgacgttgaacctctaaaaattttaaaggcccagtcgacgttgaagttgattgcgcgcgactggagcactgaaggagccttagaacgggagcaatcgtataaaccgatcatcgacagcatcgttgcgtacttcaagcacagcgatttcgagctgaaggatataaagatcctagtgccgggagcggggttgggacggctcacctacgagcttgcctgcttggggtactcgtgcgagggcaacgagttttcctacttcatgctgatcgcctccaattttgtcctcaacctctgcgacaacgagaacaagtacgtgttatatccgtgggtgcaccagtatgtgaataacttaaggcgtgaggatcaggtggcccccgttcgtttcccagacgtctgcccgcttaaaaatccacccaagggccattttgaaatagcagctggcgactttctggaggtctacaagacgccgaacgcctacaactgcgtggctacgtgcttcttcatcgattgtgccaataatgttattgacttcatacgcacaatttacaaaatcctcgtgcctggtggcatttgggtgaatctcgggccgctgctgtaccattttagcgacgtcagcgggcaaaacagcatcgagccggctttcgaggacctttgcattatcatggaaagcgtaggattcgttatcgagaaatcacgcaccggcatccgtaccaagtacgcacagaacccgtcttcaatgaaacagagcgagtaccagagtcttttctgggtctgccgcaagccggatctatttgaggagcagcggggcaaacgcaaggcctccagggagccacacgatcttattgtgcgcgaggacagcgaggaggagggggagcaacagccggaacgaaatgaaacggaagaaaaacagcaactgaaaccgctggccacagccaactgcgagactgagataaaggagcagccatcgtgatagccattgaaccaaactcaacaacacatccaaacaccacaatcaagtccaagtgcaaacccacctacagatggcatcacgaacatcttaattaccacgtcacaggcaagacagggaatcgacactgcagtgcttcgatgttatagattacactttatacctattatttactcctacacactgttatatatgccagttttaatttttcaaaggatgcaaattttaggacaatttctcgctcattatgctcatcatgctaacttaaatgggaaaagcgtcccaactaggtcaac

SEQ ID NO: 24288 - protein, 401 aa, DROSOPHILA
MDYLNSLSGEDQIMLAKYRGHLECVRTCIDRNQAVIREILRGRVLYPTDEATGDPSEFDEPPPNVRHGDMDQIDIPFDEADVEPLKILKAQSTLKLIARDWSTEGALEREQSYKPIIDSIVAYFKHSDFELKDIKILVPGAGLGRLTYELACLGYSCEGNEFSYFMLIASNFVLNLCDNENKYVLYPWVHQYVNNLRREDQVAPVRFPDVCPLKNPPKGHFEIAAGDFLEVYKTPNAYNCVATCFFIDCANNVIDFIRTIYKILVPGGIWVNLGPLLYHFSDVSGQNSIEPAFEDLCIIMESVGFVIEKSRTGIRTKYAQNPSSMKQSEYQSLFWVCRKPDLFEEQRGKRKASREPHDLIVREDSEEEGEQQPERNETEEKQQLKPLATANCETEIKEQPS

SEQ ID NO: 24289 - DNA, 3105 bp, DROSOPHILA
tcctaaattaatagctgccaatgtcacaaatcataataatacaaattgctaattaagaatattaagaatatatatatatattatttgaaggcgtttgaatagcaggaatcaccctaataacaaaatccatttatttggcgatgctttgtgggctgccaactggtttttatcactattagtttaccagccctggaactgcggctttgtttgtagccgagaatattggtattaaaatttgcacttgatctctataaaatctatatatgcaactagttagttactgtgtgtctgaagattctgttgattataggctttcttctctttcttcttttctttctaggtgatatcatagtgtgttcaagagaggcaaagagaaactctcttgcgctctctccttaaaacggagagtgcgtggaaatgaaaacattgctttcaccatctcgccgattagtctgcatatcagtgtttagtcggcttttcgctttcgttagataaaaattaagtgcgtggtgtcgttgcaattcgcggattatataagggatttgagccgcgactgcattgattttccattggccatggcccgcatcgttgaaagcaatgtaagttaaatgcaactaattccgttcgctggtatgtttatataactcctcgattcgcatcaccacctgccccgcccacatccatcttgttctattccccctcacatttcatagttgtcagtgatgatcatttttctcttggccaaatgcctaatgcctcggtggttttgcattctcccaaatttgttggtcaacagtgatgggaactgtttgtattagttatttgttattattttaaattatgaataattgagagaactaaatgcttgcactgtagaaatagtttgtaacctagccacctgatcatttaactcatctattggctcataaactaacacaatatgtaaatagtttccttcccatcactgttgcccagtgacgtcgccgacttaagaatagagatgatgtctgccttgtgccccgaggcaatgaatgatgcggatcgtctggtggaaaatctgcgccatgtgccggtccgcctgcccagggagttggaggttcgccagctgtgccgctcgttgagtgacttgctcgtcggcgagtcgaatctactgagcctgcagagtccgcagatcgtatgcggtgacattcacggtcagttcgaggatctgctccacctgctggaattgggcggttcggtgcaggagcatcgctacttgttcctgggtgacctggtggatcggggcaagaacagcgtggagacctttcttctgctagctgctctcaaggtgcgacatccggcacaagttagcctgctacggggcaatcatgagtgccgcagtgccactcgatcctatggattctacgaggagtgcctttcgcggtacggctctgcgaatgtctggaggatgtgctgccgtgtcttcgatctcttgccgctggcggctatcattgatggcaatatattgtgtgttcatggcggcctgtcgccggatatgcaacgattggatgacttacgtagcctggatcgctgccacgagatacccgaaagtggaattatagctgatcttctctggagcgatccacaggaagcgcctggatgggcggcatcgccacgaggacatggaaaactcttcggtggcgatgttgttgaggagtttacgcgcgcaaatggaatctctctcatatgccgcgctcatcagttggcccaggatggcttccgttggcattttggccaacttcttgttaccatatggtcagcacccaactattgctatcgctgcggcaacaaagcggctattctgcgcttaaatgctgctggcgattatgattttaaagtgttcgaagcgcaggcgctgcactccaaaccgcagccaaggaaaccgaaaaagcgttgtcgtcaattttttcaatgatttaatcgctatctgaatcttatcccaagtattaatacggtttgaactggccgaacctaccgatcactccaaagcgacctttgccattccaaactactcatatactcataatttcgtaatcaataaaatacgtgtacttagtaaaacatgcagctagatttacgttttgactttggcggtctttttatatgcaggttataatgatcttattaaaatataatgaccttgttaaaatagtttttactatcgatcatttgaaatgcaactaagcaactaaaattaatgcacttatagaatatctactttatgaaacatttcatttgaaatagtaagatcgtatatgtacatagcataactgcattttatctgcttagcaagtgagtccatattttttgcagccactgtgccgactcgtgctgactgtgcatcttatcacagagagcaaaagagagcgatgagagagtcatcatagatgtagatgtagttgtatttgtagcggctttttcacgcgacgactgggcttcatttcaattggaaattggaatcggcggcacgcggtcgcacgtatttgttaacttacggagttcggtgtgcaattcaaatcggaaattagccaatttttaacaagtgtttttgttttaatatgacggaattcgatgtaagttcaagtgcaagccgctttttctctctctttctactgtcatttccatttctcttttacaattcggtctctctgtttatcaaccagtgctagtgctgtgacgtcatggctaatgggtctcggacttgtttccaaagcaaaaaaaatatatactcatgcttaataatggaaagctcaaggtcgcttttgatatggggttaaagttggaagtctcaacctagtaaaccaaattagcagctgttttttttaaagggcgccttcgctttgcaatcacatatatcagttttgagtgcgaataatctgtgtgcgagatgtgttttttatttttgtgactttcttatcactggcggtagtttccaccagccacagtgacctttcatagcccatcagcccatcggaagaccaaacgcaataccactgggctaaaaattagctcaactaaatatcagattattaatacagtacaatatacatgcttaccatttaaatg

SEQ ID NO: 24290 - DNA, 1105 bp, DROSOPHILA
atgatgtctgccttgtgccccgaggcaatgaatgatgcggatcgtctggtggaaaatctgcgccatgtgccggtccgcctgcccagggagttggaggttcgccagctgtgccgctcgttgagtgacttgctcgtcggcgagtcgaatctactgagcctgcagagtccgcagatcgtatgcggtgacattcacggtcagttcgaggatctgctccacctgctggaattgggcggttcggtgcaggagcatcgctacttgttcctgggtgacctggtggatcggggcaagaacagcgtggagacctttcttctgctagctgctctcaaggtgcgacatccggcacaagttagcctgctacggggcaatcatgagtgccgcagtgccactcgatcctatggattctacgaggagtgcctttcgcggtacggctctgcgaatgtctggaggatgtgctgccgtgtcttcgatctcttgccgctggcggctatcattgatggcaatatattgtgtgttcatggcggcctgtcgccggatatgcaacgattggatgacttacgtagcctggatcgctgccacgagatacccgaaagtggaattatagctgatcttctctggagcgatccacaggaagcgcctggatgggcggcatcgccacgaggacatggaaaactcttcggtggcgatgttgttgaggagtttacgcgcgcaaatggaatctctctcatatgccgcgctcatcagttggcccaggatggcttccgttggcattttggccaacttcttgttaccatatggtcagcacccaactattgctatcgctgcggcaacaaagcggctattctgcgcttaaatgctgctggcgattatgattttaaagtgttcgaagcgcaggcgctgcactccaaaccgcagccaaggaaaccgaaaaagcgttgtcgtcaattttttcaatgatttaatcgctatctgaatcttatcccaagtattaatacggtttgaactggccgaacctaccgatcactccaaagcgacctttgccattccaaactactcatatactcataatttcgtaatcaataaaatacgtgtacttagtaaaacatgc

SEQ ID NO: 24291 - protein, 308 aa, DROSOPHILA
MNDADRLVENLRHVPVRLPRELEVRQLCRSLSDLLVGESNLLSLQSPQIVCGDIHGQFEDLLHLLELGGSVQEHRYLFLGDLVDRGKNSVETFLLLAALKVRHPAQVSLLRGNHECRSATRSYGFYEECLSRYGSANVWRMCCRVFDLLPLAAIIDGNILCVHGGLSPDMQRLDDLRSLDRCHEIPESGIIADLLWSDPQEAPGWAASPRGHGKLFGGDVVEEFTRANGISLICRAHQLAQDGFRWHFGQLLVTIWSAPNYCYRCGNKAAILRLNAAGDYDFKVFEAQALHSKPQPRKPKKRCRQFFQ

SEQ ID NO: 24292 - DNA, 18574 bp, DROSOPHILA; identical to SEQ ID NO: 24223

SEQ ID NO: 24293 - DNA, 3831 bp, DROSOPHILA
aatccgaactgggaaggtccaactgtgacagcagcagctatctcgtctctttgtcgggtggtacagtacagctctgctcccctgccgcccgcccgccccctcggcgctggtgtgtgcccgctgctctgcttacacaataactgtgcatcgattgagtccagctccagcgagaagagaagcagcccaggactaactctcgttcgacataagaataaaaggatattacgttagcgtacagcagtcgtgtgtgatcagtatttgttgtatttgtctcgttccaacgcgaatcggttctagtgctgaaaacaagttcaatactgctaacggggtagttttctgcgaaagcccccaaaacacaatacgcaacgccaagcgcaaaaattgtgtaatagcacccaaacgtgtaaaagtcaagacgcaagatgccggccaaagttaataaaaaggagaatttagatgatctcaaacaggagttggatatcgattttcataaaatctctcctgaggaattgtatcagcgctttcagacacatcccgaaaatggtctaagtcacgccaaggccaaggaaaacttggagcgcgatggtcccaatgcgctgacgccacccaagcagacgcccgaatgggtgaagttctgtaagaacctgttcggtggcttcgccatgttgctgtggatcggtgctattctctgctttgtggcctattctatccaggccagcaccagcgaggagccggccgacgataatttgtatctgggtattgtactttccgctgtcgtcatcgtgacgggcattttctcatactatcaggaatcgaaaagttctaagatcatggaatcgttcaagaacatggtaccccagttcgccaccgtcatccgcgagggcgagaaactcacgctgcgcgctgaggatctcgttctgggcgatgtcgttgaggtgaagttcggcgaccgtatccccgctgatatccgcatcatcgaggcgcgcaacttcaaggtggacaactcctcgctgaccggcgagtcggagccgcagtcccgcggtgccgagttcacccatgagaatccgctggagaccaagaatctggccttcttctccaccaacgccgtcgagggcactgccaagggtgtggtcatcagctgtggcgatcacaccgtcatgggccgcattgctggccttgcctccggtctagacaccggcgagacgcccattgccaaggagatccaccatttcatccaccttattaccggcgtggccgtgttcctgggcgtcaccttcttcgtgattgccttcatcctgggctaccactggctggacgctgtcatctttttgatcggtatcatcgtcgccaacgtgcccgagggtctgctggccaccgtaactgtgtgcctgacccttaccgccaagcgtatggcctcaaagaactgtctggtgaagaatctggaggccgtggagacccttggctccacatcgaccatctgctccgataagaccggcaccctcacccagaaccgaatgacggtcgcccacatgtggttcgataatcagatcatcgaggccgacacaactgaggatcagtcgggtgttcaatacgatagaaccagccctggattcaaggcgctctctcgcattgccactctctgtaaccgtgccgagttcaagggaggccaagatggcgtcccaatcctcaagaaagaagtcagtggagatgcctccgaggctgctctgctcaagtgcatggaactggctctgggcgatgtgatgaacattcgcaagcgtaataagaagattgccgaggtgcccttcaactccaccaacaaataccaagtgtccatccacgaaaccgaggataccaacgatccccgctacttgctcgtaatgaagggagcccccgaacgtatcttggagcgctgctctaccatttttatcaacggcaaggagaaggttctggacgaggagatgaaggaggcgttcaacaatgcctacatggaactcggtggactgggtgagcgcgtgctcggtttctgtgactttatgctgccatccgacaagtatcccaacggctttaagttcaacaccgacgacatcaacttccccatcgataatctgcgtttcgtcggccttatgtccatgattgatcccccacgtgctgccgtgcccgatgccgttgccaagtgccgatcggccggcatcaaggtcatcatggtcaccggcgatcacccgatcactgccaaggccatcgccaagtctgtcggtattatatccgagggcaacgagaccgtcgaggacattgcccagcgcctcaacatacccgtctctgaagtgaatccccgcgaggccaaggccgccgtcgtccatggcgctgagcttcgtgatgtgtccagcgaccagctggatgaaatcctccgctaccacaccgagatcgtcttcgcccgtacctcgccccagcagaaattgatcattgtcgagggttgccagcgcatgggagctattgtggccgtgactggtgatggtgtcaacgattctcccgctctgaagaaagccgatatcggtgttgccatgggtatagccggttccgatgtgtccaagcaggctgctgacatgattttgctggacgacaactttgcctccattgtgactggtgtggaggagggtcgcctgatcttcgacaacctgaaaaagtccatcgcctacaccctgacctccaacattcccgaaatctcgcccttcctggccttcatcctctgcgatataccactgccactgggaaccgtgacgattctttgcatcgatctgggcactgacatggtgccagccatttccttagcttatgagacggctgaatccgatattatgaaacgccagccgaggaaccccttccaagataaactggtcaacgaaaggttgatttcgatggcctacggacagatcggcatgatccaggccgccgccggcttctttgtgtacttcgtcatcatggctgagaacggcttcttgcccaagaaactgtttggcattcgtaagatgtgggactcaaaggctgttaacgatctaactgattcctacggtcaagaatggacctaccgcgaccgcaagaccttggagtatacctgccacacggccttcttcatctcgatcgtggttgtgcaatgggccgatctgatcatctgcaagacgcgtcgtaactcgatcttccagcagggcatgcgcaactgggctttgaactttggcctcgtctttgaaaccgtgctggccgcgttcctctcatactgcccgggcatggagaagggtctgcgcatgtaccccctgaaactcgtctggtggttcccggctattccatttgcgctggccatcttcatctatgacgagacccgtcgtttctacttgcgccgcaaccccggaggctggttggagcaggagacctactattaaacacccacactgctacactcccacacacacagccacatgcccacacacgaatgcacaccacaacaagagcaaccaggaacacccgcaaacaacacctacaaaccatggagagcaacaaatagaaatgtttatgaaccacaaaacccacaaaagcaacacaaccacagtaatagcaacagcagcagcaacggcaacaacaacagcaacagctacgtctacaacaagctacagcaagaacatattacaatatattttatttttttaatttaattatttaaagtaaacgaggataaacaaaaatgcaagcgataattattttaaacgttaagtaaatttaaattataaattaaagctaaaaataagatttaaataaagtataaatgaaaataaaacaaacaac

SEQ ID NO: 24294 - protein, 1002 aa, DROSOPHILA
MPAKVNKKENLDDLKQELDIDFHKISPEELYQRFQTHPENGLSHAKAKENLERDGPNALTPPKQTPEWVKFCKNLFGGFAMLLWIGAILCFVAYSIQASTSEEPADDNLYLGIVLSAVVIVTGIFSYYQESKSSKIMESFKNMVPQFATVIREGEKLTLRAEDLVLGDVVEVKFGDRIPADIRIIEARNFKVDNSSLTGESEPQSRGAEFTHENPLETKNLAFFSTNAVEGTAKGVVISCGDHTVMGRIAGLASGLDTGETPIAKEIHHFIHLITGVAVFLGVTFFVIAFILGYHWLDAVIFLIGIIVANVPEGLLATVTVCLTLTAKRMASKNCLVKNLEAVETLGSTSTICSDKTGTLTQNRMTVAHMWFDNQIIEADTTEDQSGVQYDRTSPGFKALSRIATLCNRAEFKGGQDGVPILKKEVSGDASEAALLKCMELALGDVMNIRKRNKKIAEVPFNSTNKYQVSIHETEDTNDPRYLLVMKGAPERILERCSTIFINGKEKVLDEEMKEAFNNAYMELGGLGERVLGFCDFMLPSDKYPNGFKFNTDDINFPIDNLRFVGLMSMIDPPRAAVPDAVAKCRSAGIKVIMVTGDHPITAKAIAKSVGIISEGNETVEDIAQRLNIPVSEVNPREAKAAVVHGAELRDVSSDQLDEILRYHTEIVFARTSPQQKLIIVEGCQRMGAIVAVTGDGVNDSPALKKADIGVAMGIAGSDVSKQAADMILLDDNFASIVTGVEEGRLIFDNLKKSIAYTLTSNIPEISPFLAFILCDIPLPLGTVTILCIDLGTDMVPAISLAYETAESDIMKRQPRNPFQDKLVNERLISMAYGQIGMIQAAAGFFVYFVIMAENGFLPKKLFGIRKMWDSKAVNDLTDSYGQEWTYRDRKTLEYTCHTAFFISIVVVQWADLIICKTRRNSIFQQGMRNWALNFGLVFETVLAAFLSYCPGMEKGLRMYPLKLVWWFPAIPFALAIFIYDETRRFYLRRNPGGWLEQETYY

SEQ ID NO: 24295 - DNA, 3313 bp, DROSOPHILA
cttcaggagtttcataatggccatgcccgacaaggagttcatgtaccacaacggagttttaaacaaactcttgagtaatgtatgcgggctattcgttgccagggtgttctgcacaaccttcttcttgatttccaacggaaaaatttccaaacacctaaacacagtaagtgcacaaagacaatatataatattatacataagtttatttaaaatatcattgttttcagagcgttattcctctgattgccgccacgcttcctgcgggagtttcttctcgccagcccaagcacttcatccagctcacggacagcggcaagttcagaccattcgatttcgggatcctgaggaacttgatcaactacaagagcctagaacctccagactatactttgagcaacgtccgtcccctgacgccagtccacatattctacagcgacgatgatagttcgacagcaaaggaggatattcaaaactttgccgccagagtgccggaggtggtgatgcaccggatctcaacaccgggctggcaccatacggacttcgtgcattccatgaccgttgctgacgtaatcaacaagccggtcattgaaatttttagaagctttgagcgactcagcagtcctacatttttatgaaagtagtttccatatgaaatgatgaatgtctttaatgttgaatgaaaaataacctttcacttcataaacgaatgttcattgaagctaaaatgcctttgttttacactctcacaacttcttcagcattagtcacttatatacttccttacagcttttgagatatgaagctttaaatcaaagttattatttatgttatattttatgcatgaattgtttctcattattttatgttatttgattatagcgcaactgaattttcttatggctatgtcgttcggcaaggtaaattgcaaattagttctactattcttaacatctctttacaatcaatcaattcaaaccattgcaatatgttgttgatggagctcgtgattttctttgactggctgttgatcgtctctggtatgccgaaggtgaagtttggcctccaaaattttacgggtcgtggtaaagattaccgcatcaaagtgattactggggtcagtagctggtattgttaggtgggaccacatattcgaagaccgttttcttagattcttataatagacaagtacggctactcagtggagacgcacacggttcgcactggagatggatacattctggatatgtttcggattccctcatcacccaactgcaaggaggacggtttcaagccgtctgttcttatccagcacggactgatcagcctggccgattccttcctggtgacgggaccgaggagcggacttccattcatgctggccgatcgctgctacgacgtgtggctgagcaacagccggggagtccgctactcgcagcgccacatccggctgaaggcttcccaggatgccttctggcgctttagctggcacgaaatgggaatggaggacctgcccgccatgatcgactacatcctgtccacgacaaacgaggaagcgttgcacttcgtttgccattctcagggatgcaccaccctactggttttgctcagcatgaagccggagtataaccggatgataaagacggccaacatgatggcccccgccgttttcatgaagcacgcaaggaacaagctaatgaaaatgtttgggaacatcattatgagcatgaaggacagtagtttttttggccccttagatgctataagattcctgctatccgttttttgcaaatgctcgaagtttaaaaaattgtgcgcctttatgttcatattggccagtgaagaaccaacatcgtatatgaacaatgtaagccacaatgtattccaacttccaaattgtaccttgattaacatttttagaccgccataccattgatattagcaacgcatcctggtgcgatttccactcgacagccaaagcactttcttcaactccggaaatctggaaaattccgtccgtatgacttcggagtcatgagaaataaaaaactatacaatcaggacacgcctcccgattatccgttggaaaacgtccgccctcagtcgcccattcatatataccacagccatggtgacgacttggtggcgcgcaaagacatccacatactgatcagcaagttggacaaggcggtgttgcatgacgttgtttttgaaaaatggagccactcggactttctgttcgccaaattaatcaaaaaagttgttaatgaaccaattatcaaagttattgatcactttgagaatagacagcaatagacatttctattaggaatgtaggaatattctacattaaatcatggtatctttttgcaaagtctttacttaaatagtctaaaataaaaaactatatatatatttattgttatgttttcatgacgccaaaataaatattgtgtaaaaaactgttccttagcattagtatatatagttattttttccataatctgcctgcgactttagattacttttcttcctttacgcactgcttggcaagcagtttacatgtatgtaagtgtataaaaataatgtaaaatgtatacattatcaaaacgatggcatacatcgatggtgcttccgcgtcttgaagtacttctgcatctaatctgtaggctctacaagtccacaacttggctaatatttatctcgtcctcagaaatggccaatcgacgtgcctacttttgggccgagataaatgatgtcccaaagacaatctaccttgcacattttaatccacgagtaacgggtaaaactagcacaaatgtcagatacgaaatgaagttgcagttctgtaaaaataataaataataataaataaaacggattagttcggccttttcttacaatcatccatgaaaaatgcagtcatttctcatccaaatgctgccgatattgcttggaattttttttgtgtggctatcgaacagcacagccttatctgaggtaggtgcaatagttgaagaaaacgtaaggatattaccaaaaggacgctttataggtgaactggaagaatcactcgcttcaccgcattcatcatcgcacaaaagtaataactgcggtaagtacgttgaagttgactccagttgaaagcgttagtaatcccttttcctataggtggacatcataagcagtcacaactatccggtgcaaacacacactgtggtcaccagggatggctacatactgtcggtcttccgaatcccatcatcacagctatgtgcaagtagcgaaccaaagccagttgttttgattaaccatg

SEQ ID NO: 24296 - DNA, 1065 bp, DROSOPHILA
ctcgtgattttctttgactggctgttgatcgtctctggtatgccgaaggtgaagtttggcctccaaaattttacgggtcgtggtaaagattaccgcatcaaagtgattactgggattcttataatagacaagtacggctactcagtggagacgcacacggttcgcactggagatggatacattctggatatgtttcggattccctcatcacccaactgcaaggaggacggtttcaagccgtctgttcttatccagcacggactgatcagcctggccgattccttcctggtgacgggaccgaggagcggacttccattcatgctggccgatcgctgctacgacgtgtggctgagcaacagccggggagtccgctactcgcagcgccacatccggctgaaggcttcccaggatgccttctggcgctttagctggcacgaaatgggaatggaggacctgcccgccatgatcgactacatcctgtccacgacaaacgaggaagcgttgcacttcgtttgccattctcagggatgcaccaccctactggttttgctcagcatgaagccggagtataaccggatgataaagacggccaacatgatggcccccgccgttttcatgaagcacgcaaggaacaagctaatgaaaatgtttgggaacatcattatgagcatgaaggacagtagtttttttggccccttagatgctataagattcctgctatccgttttttgcaaatgctcgaagtttaaaaaattgtgcgcctttatgttcatattggccagtgaagaaccaacatcgtatatgaacaatgacacgcctcccgattatccgttggaaaacgtccgccctcagtcgcccattcatatataccacagccatggtgacgacttggtggcgcgcaaagacatccacatactgatcagcaagttggacaaggcggtgttgcatgacgttgtttttgaaaaatggagccactcggactttctgttcgccaaattaatcaaaaaagttgttaatgaaccaattatcaaagttattgatcactttgagaatagacagcaatag

SEQ ID NO: 24297 - protein, 341 aa, DROSOPHILA
MPKVKFGLQNFTGRGKDYRIKVITGILIIDKYGYSVETHTVRTGDGYILDMFRIPSSPNCKEDGFKPSVLIQHGLISLADSFLVTGPRSGLPFMLADRCYDVWLSNSRGVRYSQRHIRLKASQDAFWRFSWHEMGMEDLPAMIDYILSTTNEEALHFVCHSQGCTTLLVLLSMKPEYNRMIKTANMMAPAVFMKHARNKLMKMFGNIIMSMKDSSFFGPLDAIRFLLSVFCKCSKFKKLCAFMFILASEEPTSYMNNDTPPDYPLENVRPQSPIHIYHSHGDDLVARKDIHILISKLDKAVLHDVVFEKWSHSDFLFAKLIKKVVNEPIIKVIDHFENRQQ

SEQ ID NO: 24298 - DNA, 5131 bp, DROSOPHILA
gtccccaaaatggagactggtgatctggacgccagaagtgtggtggatgaacaggagcttacggaaatcaatttggaaacctgcgaggcggacaccgacgaggagaccatctaattaagattctcaaaaataagacatagaaacctgattcgaaagcaccaatggagcatcacgtataatctgatgtacaattttaagattgtgtgttctatatatgtatattaatagatctgcttattaaagtatttgttatgattacattataaatgttcctgggcgcagatggtccagtaattaactctatttacaagttgtaggcggatctgcgtgaatattttcggatattattgttcagtgaatcaattactaacgcacaatcgatgcatcgcgtgtaacgaaagggcaaagaaccaagagagcacctgataattttaccaggtaattcagttagcggtgccttttgtcgcgatggccttgttccttgaccttcacagggggtggattggtggtgatgggaccgggaaacgatagttgccattagctgcgaagatatttccagaagcctttgtcccccggctcataaatgtggctcatgtgtatccgtatctattcatagacacgcttgggaaggcacgtgcctcccccagttgccataggatatgaatccgtagatatgcacggatctagggacgtgggacggaggcgtaccgatgcggattaagcgaccgctttcggatttcattttagcttctgccaattcattctgaagtggaaatactttgtactacggcgattgagagtgcgggtgataagcgcaccttatcagtttcaaagcgaaagcgaaaatacatacagtgaacagtcgagcatgttgtagcaatactttgaagagtttcacgattgtttggaggtgtgcttagtgagtgactactgtatgcaatcgtatattccttgctgctagtgactggactctggctactccacaatcagtacatatctggcaccaggagattcaacatggccaagcccaagtcaaaatcgactagcaaaggttccacttcgccgggttttaacaaggcggtgcagttgctcctccattttacagccgtgctgcagttcaactatggcgtgtacatcttccacacactcgacatgcccaacacggtgcccttcggcggaaaatttaagttcctaacttttatttgtgcggtaagccgatgcgttcatatcgaaaatctctacaccggttaaacgaaggcgatgcataactggtttttgatttgtaatggtctgatgttctagttcgatcccatacactcaaatctaatcgcttgtagtcagtaaagatacctttggcctagaacaatgtattttgatacaacctgaatgatatgtggcttcatacggtagacgagagtgaatattttagatttcgttcatgattatcgtcaaagaattgacttcaacatcaatttctgaatggttttgaagaaaataatattttcataaaattacatcacgaatttataaattaaaaacaaaaaattcatacaaattcaacaaagctagtcacaatttaaaatgaatccacatcttcacagatgtattcagcccacaatcaaaatgttaaaactttagctcatattaaatctcgatgtagcttacaaccctacaagggggtacatacatatatgtgtatatccgaacacctggtattgcggccctgcttcggctcgggcacactgttccaccgctcgcccctttttttggggtggttccgactcgcaagcagtagtactttcggagcgacagaccagaccggtttgtttgtgttttggtgccgtgaaaaatcaatcgagagcagagcagctgcagcaggaaaatggcatccgtgcgaggcaactccgtgtaccagggcgtctacggggctctgaggaccctgctccacctgacggcagtcgtgcaatttggctacggcatctattacgactacaactacgtgcagttccccaccagcgagccagagatgaggatccatcatccctgggggggcaaattcaaatacctaacgttcctggatgcggtaatatccatctcccattagaatcacgaacgcagcgtggtttaaagttcactccgattgttacttgtacgcacgcatctattaagatacacagagaaaatgaataggacagtagttagaatcatgggcttttcttgagtgatgaagaggatttgtcaaggtctccagtgtataaaagttagagctttttgaagatcttatatggagaactttcgctaaagcagtttttacaataaatatatatatataccattccactgcaaagcaactaattgaatccctccaaattcagtgctttactaacaaactcacatctcgcctcctattgtcgctgaaattgtacaggaaatgcttgtgcaacgttttttcgctaactgtaattccttccacttcacttaagcaacccttcaaatctagccgctttcgcattatctcacacacgtcaaatgctcttgcacttacagataattcaggcactgtactatattgtatcgctggtcaacgatttcgtgggcactaatgagctgacacccaagaaacctccggcggttcgcaggttcaaggactggctgatggctacattggcctttccagtggctatcaatgtgggcgtgaccttctggacactgtacgctatcgacagggagctagtcttccccaaggttctggaccccgtgttccccaggtaagacctcgaaagctggtgatatcaaggtggcctggctggcataaggcatattctgctcaacaaattgaatcatgaccagattagcattctaagcatgtctaattcaagccatatccattttctataccactgacatgcctatttacggtattgtgttaattgtgtttctttatatccaggctttttaagttcgatttaattggaactatatctttcaattatatatatatcctaacaagtactcatacatttgaaggaattagatcaacgtttttcctttcatttcagtaataaaccatcttcataaaatgctacttagacactaaaccttaagaccctataatctcgttttggggctctggttttactttcaaagtaattaatttattcagatagcttgctacgacaaagcttgaaagatgtgtacgtcataatatatttagggataaaattaaaaaagtggtctgaaaagtcttgatttcacccattgttttttcatgacactctgataatatcttcgctcgactctttcagctggctcaaccacgtcctgcacaccaacatagtggttttcatcatcctggagctgttcatctcgtacaggtcgtacccaaaacgaagccaaggactcgcaggactggccattttcatgggcgcctacctggtttggattcacgtggtgaagcactactcgggtgtgtgggtgtatccagtgctcgaggttctccagcttccgcaacgcatcctgttttttgcggccgtcgttggattcacgctgtcactttacctgctgggcgagttcctcaacaataccgtctgggccaaggaagtgaagttggccaagcgcaaatccaactaggaggctgtgacccgtttctgttcgatgtagttgcgttaattagccacaaaatacaaatagtgattgacaggtctcgattatacattttgctcatattgttcgatcttctcagccaaagaaatttttcataagtatgtaaaatcgtactgcaaagttaactgaagaaggcgtacaaaatatgtgagaaataataaacgaaacttgaaacatcaactcgataatatattttccagtaatattgaattcggagtctttaatcataatatggaaacccgtttgctaatgatattcattatatttttattacgcatacattgtaactgaaattatagccgtagtttccattgagcgcgcgcgtctttcgataagtttactagactaaccaaaatacaaaaatgccttctcgattaaacttctcatatcaagcacactgattcaacgccatctttgaataccactgttattcaattctagtaccataataaagcgattaaactcttcatcagctgcgaaaactgttttaaggtgggaagcttggaataaactgcttttcaagatcagagaaacgtcaagtggcgctatcatatcgatttggctttaaaaagctagttctagcttaaaaacgcctccttgctggaatgaaactcgacgtgtgttgcgccctaatcagctgttggctagctttatttgttttgttttgctcagcgtgcggtgccctttgcaccttttctggaggaaatgggcaagagcaagaagcaggtgcgcgagttcaacgccgccaaggaagctgtcgaggccactaaagcccagttgaacacttgcaacgatgcctatacgagcggtgccttcaaatacctgagattcctggtccatctcctggcggcagcgcagttttcgtatgggatatactttcactacttccgggtgcattggcccacggatttgctagacgaggatgaactgaaggcgcggtggggcggcaagttcaagtaccttaccttcttggacgtcattctacaggccatctaccactcattggctctgctgaacgatctcttcggcgataacaatgtctccggggattcaaaatccatgttgcgatcggtgagggactatgtgttcgccgcctttgcctttcctgtcgcccacaatgtctgcctctcgttttgggtcatctacgtgtgggaccgtgagctcatctttccctcagcgctggatgcgattttccccaggcaagtgtttatgtttttccgccggtttaacttgcgtacaatgcacaatgttagtctgctggagtctcttttgtttcgagcctgtctaaactttctgttcatcaggcgaggcgagttttgatttacctgtgtttctcaatatttgcagctggttgaatcacgtggtacacacgaatgtggcccttttggccattatggacctgtttacctgcttccgccgctatccgagtcgattggcaggcatcacgggcaacgtctccttcatcctg

SEQ ID NO: 24299 - DNA, 1256 bp, DROSOPHILA
gcaccaggagattcaacatggccaagcccaagtcaaaatcgactagcaaaggttccacttcgccgggttttaacaaggcggtgcagttgctcctccattttacagccgtgctgcagttcaactatggcgtgtacatcttccacacactcgacatgcccaacacggtgcccttcggcggaaaatttaagttcctaacttttatttgtgcgataattcaggcactgtactatattgtatcgctggtcaacgatttcgtgggcactaatgagctgacacccaagaaacctccggcggttcgcaggttcaaggactggctgatggctacattggcctttccagtggctatcaatgtgggcgtgaccttctggacactgtacgctatcgacagggagctagtcttccccaaggttctggaccccgtgttccccagctggctcaaccacgtcctgcacaccaacatagtggttttcatcatcctggagctgttcatctcgtacaggtcgtacccaaaacgaagccaaggactcgcaggactggccattttcatgggcgcctacctggtttggattcacgtggtgaagcactactcgggtgtgtgggtgtatccagtgctcgaggttctccagcttccgcaacgcatcctgttttttgcggccgtcgttggattcacgctgtcactttacctgctgggcgagttcctcaacaataccgtctgggccaaggaagtgaagttggccaagcgcaaatccaactaggaggctgtgacccgtttctgttcgatgtagttgcgttaattagccacaaaatacaaatagtgattgacaggtctcgattatacattttgctcatattgttcgatcttctcagccaaagaaatttttcataagtatgtaaaatcgtactgcaaagttaactgaagaaggcgtacaaaatatgtgagaaataataaacgaaacttgaaacatcaactcgataatatattttccagtaatattgaattcggagtctttaatcataatatggaaacccgtttgctaatgatattcattatatttttattacgcatacattgtaactgaaattatagccgtagtttccattgagcgcgcgcgtctttcgataagtttactagactaaccaaaatacaaaaatgccttctcgattaaacttctcatatcaagcacactgattcaacgccatctttgaataccactgttattcaattctagtaccataataaagcgattaaactcttc

SEQ ID NO: 24300 - protein, 245 aa, DROSOPHILA
MAKPKSKSTSKGSTSPGFNKAVQLLLHFTAVLQFNYGVYIFHTLDMPNTVPFGGKFKFLTFICAIIQALYYIVSLVNDFVGTNELTPKKPPAVRRFKDWLMATLAFPVAINVGVTFWTLYAIDRELVFPKVLDPVFPSWLNHVLHTNIVVFIILELFISYRSYPKRSQGLAGLAIFMGAYLVWIHVVKHYSGVWVYPVLEVLQLPQRILFFAAVVGFTLSLYLLGEFLNNTVWAKEVKLAKRKSN

SEQ ID NO: 24301 - DNA, 2976 bp, DROSOPHILA
gtacaggtcgtacccaaaacgaagccaaggactcgcaggactggccattttcatgggcgcctacctggtttggattcacgtggtgaagcactactcgggtgtgtgggtgtatccagtgctcgaggttctccagcttccgcaacgcatcctgttttttgcggccgtcgttggattcacgctgtcactttacctgctgggcgagttcctcaacaataccgtctgggccaaggaagtgaagttggccaagcgcaaatccaactaggaggctgtgacccgtttctgttcgatgtagttgcgttaattagccacaaaatacaaatagtgattgacaggtctcgattatacattttgctcatattgttcgatcttctcagccaaagaaatttttcataagtatgtaaaatcgtactgcaaagttaactgaagaaggcgtacaaaatatgtgagaaataataaacgaaacttgaaacatcaactcgataatatattttccagtaatattgaattcggagtctttaatcataatatggaaacccgtttgctaatgatattcattatatttttattacgcatacattgtaactgaaattatagccgtagtttccattgagcgcgcgcgtctttcgataagtttactagactaaccaaaatacaaaaatgccttctcgattaaacttctcatatcaagcacactgattcaacgccatctttgaataccactgttattcaattctagtaccataataaagcgattaaactcttcatcagctgcgaaaactgttttaaggtgggaagcttggaataaactgcttttcaagatcagagaaacgtcaagtggcgctatcatatcgatttggctttaaaaagctagttctagcttaaaaacgcctccttgctggaatgaaactcgacgtgtgttgcgccctaatcagctgttggctagctttatttgttttgttttgctcagcgtgcggtgccctttgcaccttttctggaggaaatgggcaagagcaagaagcaggtgcgcgagttcaacgccgccaaggaagctgtcgaggccactaaagcccagttgaacacttgcaacgatgcctatacgagcggtgccttcaaatacctgagattcctggtccatctcctggcggcagcgcagttttcgtatgggatatactttcactacttccgggtgcattggcccacggatttgctagacgaggatgaactgaaggcgcggtggggcggcaagttcaagtaccttaccttcttggacgtcattctacaggccatctaccactcattggctctgctgaacgatctcttcggcgataacaatgtctccggggattcaaaatccatgttgcgatcggtgagggactatgtgttcgccgcctttgcctttcctgtcgcccacaatgtctgcctctcgttttgggtcatctacgtgtgggaccgtgagctcatctttccctcagcgctggatgcgattttccccaggcaagtgtttatgtttttccgccggtttaacttgcgtacaatgcacaatgttagtctgctggagtctcttttgtttcgagcctgtctaaactttctgttcatcaggcgaggcgagttttgatttacctgtgtttctcaatatttgcagctggttgaatcacgtggtacacacgaatgtggcccttttggccattatggacctgtttacctgcttccgccgctatccgagtcgattggcaggcatcacgggcaacgtctccttcatcctgctttacatcatctggctgcacattgttcgctacttcagtggcgagtgggtgtatcccattctggaagtgctgcccgcatacctgcgctacgtgttcttggcactacttgtggggttcaacctggtttgctatctgctcggggagttcgccaacaacgtcgtttggggtccggagtttaagctcctaaatcaacagaaattaaagcaaggctaggactcgaggatttaaaatcgtttattagttacacaaattattatgtataattttgtaaacttgaaggcactttctgaggtacgatttgtgtgcccaagaggcttatttatatcgtacttaaatctataatctacaatctaaagtcctgtacccacggcaaagaaaaataatgaaaataaattattatcctctttggcatttactttggcgtgagtaccaggattaaggaaacagtcattcacaaacgtacacagagattcgaatgcttacaagctagatggggtgatgaatctgtaaaataaagttgcagcctaatgactatgagtattcgtaattcgtagttctagtttcgctcagtctgttccagtaatcgattaagaagaatctaaatgttcatcgcatgtaaactgctctggcttgtgtactacaatttcgtatttgtttgttttaaatatcatttgggtttccaattctagtgaagcgatatattcttataaatcgttgaacagtgaacataacaatattacgatttcgtaaaatagataagattgtacgattattttcagcgctaacaatttgatttcttagaacaaaaactacaatattgtaagagtttttgaaccttaagtaaatgcatcaattgcttatttagtcttgctattttgaaggcagcaataacattttgagtttgtccgactcgctcataaacgtgggctccctttgatgccgatgggaatgacccaacaagccctgcagctccgttcctccgaaatcctcattggctgcttcagttctttgtctgctggctgcgtttaggagtcgcatggcctgctgcagttcgtcttctccgtaactgggaactagctcgaaaggattagcctgtatgcccacatcgcagctggttttgctgtttctactatgtggtttgcccatggatattccagaaaaagagctgttaagaaggcttcctacgtccaaagccacatccagctcttcagag

SEQ ID NO: 24302 - DNA, 828 bp, DROSOPHILA
atgggcaagagcaagaagcaggtgcgcgagttcaacgccgccaaggaagctgtcgaggccactaaagcccagttgaacacttgcaacgatgcctatacgagcggtgccttcaaatacctgagattcctggtccatctcctggcggcagcgcagttttcgtatgggatatactttcactacttccgggtgcattggcccacggatttgctagacgaggatgaactgaaggcgcggtggggcggcaagttcaagtaccttaccttcttggacgtcattctacaggccatctaccactcattggctctgctgaacgatctcttcggcgataacaatgtctccggggattcaaaatccatgttgcgatcggtgagggactatgtgttcgccgcctttgcctttcctgtcgcccacaatgtctgcctctcgttttgggtcatctacgtgtgggaccgtgagctcatctttccctcagcgctggatgcgattttccccagctggttgaatcacgtggtacacacgaatgtggcccttttggccattatggacctgtttacctgcttccgccgctatccgagtcgattggcaggcatcacgggcaacgtctccttcatcctgctttacatcatctggctgcacattgttcgctacttcagtggcgagtgggtgtatcccattctggaagtgctgcccgcatacctgcgctacgtgttcttggcactacttgtggggttcaacctggtttgctatctgctcggggagttcgccaacaacgtcgtttggggtccggagtttaagctcctaaatcaacagaaattaaagcaaggctag

SEQ ID NO: 24303 - protein, 275 aa, DROSOPHILA
MGKSKKQVREFNAAKEAVEATKAQLNTCNDAYTSGAFKYLRFLVHLLAAAQFSYGIYFHYFRVHWPTDLLDEDELKARWGGKFKYLTFLDVILQAIYHSLALLNDLFGDNNVSGDSKSMLRSVRDYVFAAFAFPVAHNVCLSFWVIYVWDRELIFPSALDAIFPSWLNHVVHTNVALLAIMDLFTCFRRYPSRLAGITGNVSFILLYIIWLHIVRYFSGEWVYPILEVLPAYLRYVFLALLVGFNLVCYLLGEFANNVVWGPEFKLLNQQKLKQG

SEQ ID NO: 24304 - DNA, 12246 bp, DROSOPHILA
tacggcagatcagaataacaaaatatttccatataattctttgttcttttccagttctctctgaagcgggtattgagataagtgaaaggaggatagtggtcaattcacgatattgcaccaatgatcgcaatatattcgccgctggtataaatgtgatcatgataccgaagccaaactttcagtatacctatggcagtccgcaagaaatggctgaaaaggtgagagtttatctaattttaggtatagtacatatacaaacaaatttagcttctttagttggcctacgaattgaacatgattaaggttgtgatgcagtcgcgatactccaagccgtacatgtttacgggaatcctgccaatgggctatcagatcatcaagatcacccaaccaaagcccctgcttataggacaactaccgattgaattttctgagaccttgactacctacgatgatggcgacttttgccgcattcgacttaacaataaactgattgtcatagagattgtctgcgtcaccaagaaggtaaacagtacgaaatttctattctacatataatttattacatttttctagccgaagagactttactttatggagtacttttgtggcaaacacgccatgctactcaatgatctgcgcggtcgctttcaagcaggttggattcagaattttctggatttctttcaacaaccctggacagagctcctgatgcacgacagattcgaggatctgcagttaaagaaccgcagacttctgctctcaatgctgctgatgaacaacaaggataccaataatcccaggaacagtttggaaaacacgcagaggctaaggctggaggaaaacgtgatcgattttgtgcgaacctatcgaaaggatttcactcacgaatttgcgctgccggaggattggggtgtctttaatctatgagcgggatgactttggatgtaccatacataaatactccgaaatgtataaataataatattaaacgcagatttttatttatatgtgtattttgtattgcatacaatgctaattaattaaaccaattgcaagtttttacattgctcaacatattaaaactataaataatcaaaagcgaatgctttcatttgggattagcctaaagatttcgttattcggttcattttgtttttaagttagctagctcgattagtataacatgttactctttaggtctcgttgttagcttaattacacatacatagtatactacaaggttttatgggcttctagaggggagagcaagtggaggcacgtcgtcgggattgatcgcgcctaattggtagcggactaaggccactggggaagacaatgacatggtggttgagctggcctcatatgccctgtaagtaccttcgtaactcctcctcagtgtcgaagatcatgacggggaacggcgatcctggcacgaattcgcctgcccatttgacctcaactcgatagtcacccggttcggttggatcgtactagagattgttgggagaatagttagatatctgtggcgcgatcgagatatagctgatcttaccttgcacagtatggtgcgatctttctgactctcacgctgcatctccacgcggaaagctcctttgggtccacggaccctaactgtcagctgaccagctccagctcctcgagtgtcgcagatgaagcgcgactggaaggtggccagcacgccatgctcgattccaggcccataaacgcggacctgtgagattagagatgaggattagctaatgctatgctattatgtatatacatatatgtatgtgaaccgaccttactggcatccggtgcaccggccactttcagtgcgaatggcgagccgggaacattttgtcctccgtacttgatggtcaggatatggcgacctgattcctggggcttgatgttcagtgtgaatgtagcatctccatgatcgtatagttcgcagtaggctactttccgtacaccagcacaatgggcggtgagttcgccgggtcctgctcgcctggtgtctatccaagacttaatgtccttgcccacaataccgtgacgcagtccctcaccggagactatcacctttgaggcatccattgaagagccgactgccaccgttagcggacatcccttgaccaaacgaccattccactttacagagagatttagagtgccagttgtggatttcagtggagtgtatgaggctaaccagatgttttcacttggtctcggttgcgccaagctcactggcagcgacgtgttgtcctggctggtgaggatcacctccggtctgccagccggcgcattggaggcatcgattgtgaagtgcgcagcctctccagcttgagctgcagccagaccccgacccatgagctgaaccttatccgccgcctgttgacctgtgacgaaggcactcctgggacattgggtgatggttaagccgctccaagtcaaatccaagtcatgctcgccggcagccaggttctcgccagtgatgttcagacacatcttgccgtcgaccaacttgtccaccggtatctcgatgccatcgatgctgcaaaccagttttcccggccccgcattttccacgtcgaaaataattcgagcgggcagaatcagacggccatcgtgatctacgagagtaccccaaccacccacaggtgttaccttgttggattccacgcaactgatgtgccacggcgatcccggcaagcttcccctgtttggacagctagctctgatctcgtatttgcccacggacagaattgtgtaggagatgcgccactcattgttgcccagagccttgatctttggctcaatccgctcaccatactcgtccaatcgttcaatctggacgttcggggcgatggggcagtagacaacgaaggatgcctccttgttccggtggcacacctccagtccgtgtccagcggcacgggcgtcattccttacgccactggacgacgcggtaaagttcagtggtgaactaggaatcgtctctccaccgtacatgagggtcagcttgtagttgcctggctgcgagggcacaaactcaacgttgtagactccatcagattgctcgctaattagaacgggaatgctctgattgcttggcgatatggcgaacgcctccagttcggcggttccggcattatccgtgcgtactgtgaaactgtttggactgtgaagggccaatggttccttagtgactccttgggtgctgaccttgctgctgtcaaaggattcacacgtaaatgggcttcccggcagaggcttcgattggtggagtacctctgtaaagaagaaaagcatgccgattagattctcagtctgaagtatgttaactcttcaacttaccaatgacacactgtcccggcttgttgatagtgaactccgcctgcaggtgtccgttcttggtctgataacatctgaccggaagagcttgtcctcctggtccggagaccaccacatcgaactccctagctggccttttgactgtatcgatggcaaacgaagtggtctttcccacacgcgactggtataatcccagaccactgacactgatttctttgcctgcactggcgggcaggacattgatctccaggggtttcagggaaatgggcacttcgttaaagaggatgctgatcttgtgaggagcaacacgcgtgggctggtaaactatctcatatactcccgtcttgctaggtccgcgaatggtgtggggtacttcggtggcgccacaacgcaccaaagccgaaaggtctccctgcccagcttcgttcaaggacactccaatgctggctggacgatggcagaatgcctcgctcacctcggtgatcttcaccagcgtgggatcaaagacgcacaacgtgcgagatccaatgtgctgacgggtctcgcgatcgatgaaacgcaaagtatagttcccggtcatgtgggtccggaactcggctgtctgccggttaatcgaatacggaacagacttctgatcgggcgagaatatctcaacgatctgatcgtccgctgggaaatcaatggccgccaaactaccgatctgaatatgctgcgtgtgctgctggatgtccacgcggaaggggcttccgtccacggccacctcgttaaaagtgatgttcacgtagtggggttccgtgctctggggcacgaaggttacatcgtacagaccgcgagcacaggccaccacctctgccttaacggtgctgctgtccgtggaaaccaccagttccagggttccttcaccagctcctgcagcgtcaacgctgaaggtaactggaacgcccaggttggctggcccatactgctgctccagtccgctgatgctcaccctggagacgtcgaacacgttgcaactgaagggtgatccgttgatgtgctgatcgttggctgtcacactgatcaggtggcgacccacagtggtggggcggaacgaagcggagtaactacctccgtcgtgctgactcaactgacagtgctcattgtcccccgatggcgaggtcacaaagatctgaggctccacgccatcaaagccttcgagttcaaaggtgttgtccatcttgacggcagcttgcttcaggcattctcccatggccatcgcccgtggcaatcccatcgagggcgaggccgcagcagcggcgatgtgacagctaaatggtgagcccggcaccggatgtccattgaatcgcaccgacagcgagtgggtggccgcctctgtgggcttgaagttaaccttgaaccgggcattgccctcagattggacaaagttgggcacgttcttgccatttacggccacaattatctccagattgccggctcctgcctgcgaggcattgatcccgaagctcacactcttgttgaccacgccagcacggatatccgtgactataaccttctcggcggagtaggccttcagtaggaacggactgccctcgacgtgaccaccaccgggcagacgaacctctaccgaatggtcgcctacttccattggctcgaacttgacattgtagcccagggtggaggagcccaacgcatcgatcttcacgggcacactacgcctggcaggaccgagtacctccaccgtcggctttgtgtccgattcaaccacaaactcgaacagtcgacccacgctgaccttgtccatggtctccggcgattggatacgagcggcagcagccacacggcaagtgaacggggatcccggaacatcctggctattgaagcgcagctccaccgtgtgactctcagcctcgcggggagtgaagctaatggcataggtgtgctgaccctgggcttgggctgaagttggaaccctgcctccgttgacggtcacctcaaggtttccgggtccagcctgtgatgtctccacgaggaatgtgacagccttgcccactgtgccactactaacattcttcaccttgatggcgctgacatcgtagacctgaatgaagtaacattttaatggcatttggatatcaaaacgaaattcattaaattcattacacttaaagttaatacatggtatgagaagattctgtactcaccttggctgcatatggacttccggcggtgggtaatccgttgaccgtgacattaacccggtgctcacccacgactctcggcacgaactccgccttgaagacaccatctgcggactgatgcacttgcgccggaaccgattggccagcaggtcctgatttggtcagcgattttgcgttggtttttgtttgtttatcatttcgattggattttagtattgattaattattgcgtgtttgatttgattttgattttcggttgcgacgcggccggaaacgagtttgagattgatttcgtttgtttgttttgttgaaattcgataattgggcaacgattcagttgggtcagatgtgtgttgttgggttagtgtttagtttcagttttcaatcgcggatgaagcgaaaaatttggaaaaatgttcaattgattagtcattttaatctttaaaatgttcggatagtcggggggagttgtttgtgattaatcgtgtttaagattagttcgagtcatttacttggagtgcggttagttttgtttgattattgtattgagtgtgtgccagaaacggttagtaaacggatatgtggggtaagggtcagagacaatactgtatagataatatatagatataattagagcaatcccaagtggatctgtacactctgcatacagagcactataaacgagcctgctggatatacaacctattgagtttgttttaaaccattttctttatttttgttcgagtaattctacacattaatcagtatgaaacaaattagtaaacaatcggacattagtaaatactttgtttgttattgtgctggcatagagtctcgctcattcgaagactcagtctggggttattttgtggttcggactgttagcaagtacaatatatatacacctggatgatagtatatatatatttgtaggggagagcgcggagactactccctcgtttaatagtataggtaatataagtatatgcatagatttatatatattctagtacaaaagatttcgccgtcctgaaatataatacagatacaaaagtgagcaacattattacaaaaggacatataattacaaacaaaggtaagacacaatcataaatgcacacaaaacacacaggagactagtaagctggaactacatgagtaatagcaactatctatgggtactaagattccataactggccctttggcatatttgcatacattctactacttcataatacccaaaacgcattgtattacagtcgaactttcctaaaaaaccatagctcagcaaagtacttgggtatatttttctatcaataaataaatatcctgtgggatcttctttttcttaaatttttatataattagaaaacctgcaaacaaaaaaaaccgtattaaaacatgctatacttcacatgtgtataaagatatttaatatactacactgaagctctttaaacgaagttcgactgtaaaagcaaatgatgtatgtgcaacataattacaaaagcacgcagaaactacacgactaggctgcgcatctcataaatccagtctctaagtgcagcaccttgtctttggactctgggattcagctggagacatcaaccacatgtgggtctggtgaatgggggcggtgaaaagtggggtgtggcatgcttgggagtttccacaacgatttccgctcatacaaattgcctgtacaagtttttgtgcgtgaggtgtgagagtgggtgcgatgcggatacagatacagctacagatacgagttgcagatacgagttacagatacagttacagatacggttactgctaccagatacggatatgtttatgcaaatggatcccctcgaatagaacgcttagcagacacaaacagtaagccaatcgagcaattaaattacgagccttacgactaaaaccaatgcacaagacacatataaggggaatgaagtggaccatcggggcagatagccccacacaaacagatgacttttggttagcagagttgggatttgggcccaaggagcactccactggctaccggtgcctacataccttccacgttcacctcgatgtcttccaaacggccgccattgtgattgattacaaaagaattggtctgatgcacgggtcctgggccacccagggacacctggggcccggccacgcccccactgatgctaaccgtaatcggacagccgggaacgggcattttgttgaatgacacgttgatcgtgtgctcgcacgactctgtgggcacaaacgaaaccgaaaatctgcaaaagagaaaagatacaaaatgttaaatgttgcaaccacaatatttaaaggtagtttaacaaattgcggccgagtgcaagatacttcttacacagtttgtcggtagctctcattaaagctctaaaaaaagttataaatgtagagaattattaatagatgagaataattttgataattgaatagaaaatttagcacttatagtaattcaagcaattatagtaataagaaaaaaagaagcgcaataaaaaagaaaactaaacaaattatccccatcagacataaaaataattgtactctattagcaaataaatgaaagtttaaattgccacacacacacatatttagccaattgaaagcatttcgactcaccttgcactgccttgcggatgcacctgcgtgggaatgttctgtcccttggccgaaatcgttatctccaggttgccctcaccggcatcgcccgcatccacggtgaactgcaccgggcgtcccatggttccccgcgagacactgcccaccaccaccttgctggcatcgtatgacttggccaggaagggggttccctgcacggcgaatccgttgtactccacattgatcgagtggccgccaacggtggtgggcgtaaactcggccgtgaagccagcgtggatatctccggtcacccggacaggcaactcgccctggggaccgcgcacgctgacagccagctcggcagctccacctccgctcacggtgatgtgaaaggaggagggccggttgactgggattagctccagattggagagattcaggagcactcgcgaggtgtccgccacggcgcagacaaagggacagccgcgcaccgtttcgccattgaatttgatgtcaatcagatgcgacttggcctgctccggcgtgaaggagaccaggcagcgaccaccgcccaccacctggacatgattgggcacctcgccctcgttgatggatatctccagctggccctcgccggcggcgctggcatctacgcggaactggcacgcctggccgaccacgccgccattcacctccgtcacctggatcaggctggagtcgtagaccttggcgatcagcgggccgccagcgatcttcgtgccgttaatggacgcatcgatcacgtgggtgcccacctcggtgggcacgaactcgatgcgagcagcaccatttgccgcctcgtgggtgactctggcgttcagctttgacttgctaggagtcaaaactgtcgccacgcactcgcccttactcaggctttgtccaggaggcggcagtatctcaaaaaccgccggcgtattggcgggtaccaggcgcgtggattcgcccagagcggttaggccgggtgaggacatgatttcagcgtgccacggtgaacctgtaggtgcggagagcaaatgaaccaatcgattagtatcttgaaaacaataaagattgcatggcaaattgcattttaagcagctaacttaacgacccaagtagattgtagtcatatttgaccccaaaacaacggtgtgtatgcatatgcaactcaggtaattgaggcggatgccacattggcagtttcccagtgagtgggttaaatacgtaaagtacggaacgcttagctctacttgctaaatgctaaagtagctctgctctgatacattaaaattggtttccatctatttatgacttagcatcgaaagagacatggtaacacacaactttacgaccgaacctcgcattcttcagttgacaaggtttccgctgcgactttgcattgtttctcgctgcgtcgtctcattataattgtcggcaatctcaatctgtgccgcctggttgccggcgacaagtgcgtatctgtggctctgaatctgtatctgtatctgaatctgaatgtgaatctggagctgcgtatctgtgcctcgactttcctcagagtggctttggtatcgctagttggtaacgtagtttacgtttagtgcgactagtccaggaatgtttcgaaatgagcccgaaagcatcattaaatcgttttgagaagccgcaatcgagtggctctaaagccaatttgcgatggtggggcagattggcaattggctcgttaaacgctcgcttatttgttggcactcgcatctcacaactcacagcattttttattggacacggcggccgtcgtctttttttccccattttttagtgtttgctgcctggcgctcaaatttacttttgtttgcaactttccatgcatttctcttttagcaattgttgcacttttccttttagtgctcgtttgcacttgctgctgtattgctgtattttatggctttccatgaaaatcgctgaaacggtcagtcgccagttcgatggaaaaaaagtcgagttgcagcactgtcatagctcaaacttgcttcgttttggattctctgctggcgcgacttttctttccctgggaaacttttgctcaatcacaaaaactcaaataggaaaagaaaacaaacaattttttatttgcccgagctgtgaaaatctcatagtggaaggaagacacttgccatcgcagcactttggcccaaacacttttcgtaactgttcctgactgttgctgtctgtgtttgttttcggtattctaccaattgaggccatcattaatcagttatcgcactctcataactctgcgcatggccagcggctatgcaaaaagatacagttaggcgaccgtcgcaattcaaagagtccaacgcacccgacaaaacttggtcgccttcctcgccgcaagtcgcacggttgctgcgagccaagttgtaaatcgctagtaacaaatagcaagtggctagagcaactgcaattcggccaaatgaaaagctgactttttgccacttttctgcccggtttcccagctggagtgctaatcgcagcggtgaattgttgcccggcggtcggagaacaagtgcaggtatgcggcatctaacgctgttattcaatctgcataggcatccatagtggagctacactcaaataaaagccgttgaagaaagcaagtaacagcctgtgagaaagttcattcaatttgtttgattttaatttcatacaactaaacctaaagataaacataaagaaagtcgcttatcttagagaaccatcatcaatgatttcacaaatttgaataagtatgtattggtttttctttcagtgcaggcacttgtgtgttactttttgcctgcggttacgtgactcgccgcaagagcccgttagatggcctgcagctgtcgcagaggtttgaatctgattcttattttaattcggattctccgattcccgatgctgaaccccaagctgaaccccacattgaaacccaaaaacagaacctgaccgttacaccaaactattttccaaatgttacaaaggaggatttacgttttggtggctggagactgagaagcgatgctgtcgacggtgcaagatggctgggtaatcaaaatccgattcgtttgcgagctgtagaatcaacaatcaaatcacaatcgctggcgggacgtctgaacttgaaagaggtgaagattatttcgtgtagcgattatgtcagcgggttgtaaattatttatttatgtgtgcatttttttcgtagctggaatctgaatttcaacaagacaacaacgattaagcgaaaacgcttataagaatttgcggagcgttgcacaaaatgacatcgcggcacgaccacgattcggcgcacgttttaatcgcgtttttaccacacgacactttagtttttttcttttgatttttctttcgttttatcagtatttataatcacttgagttaagctccggctctctgtgctttttgggggttaaatggggtatacagggttaaaggggcgcgtcgaaaaccagttaatgctgctgcctttcgacaattttcgttattaaattatgcacaagccagacgggctggcagtttcactttgaatggcgttggctcataaaaatcccaaacagccgcgccgagctggaagtgggaatgtgtgccaatatgctgagcggaaatggccaaaagcggcgggtaaaagcggctaaaggaggctaattccgatgagatggagttggagagaggtgtggccgacgctcattgttaaacataaaaaaaaaagaaacgaaactaaacgaaatgcggccaaacgaaatcgaaatgtttgctcacgatgcctaaactttggctatatgtatgaaggtaaggtatgcatatatttcgtgagcttcaaaatcggtggaaagtggtggacgtggccaagaaatcgcaatctggcccggagatctggcgcatacctgtcgcgccctccatggcataccataccatcgtacctgcacacctgactgacaacctatcccaacgggttttcggctgcagcaggagcagat

SEQ ID NO: 24305 - DNA, 5894 bp, DROSOPHILA
cagattccagctacgaaaaaaatgcacacataaataaataatttacaacccgctgacataatcgctacacgaaataatcttcacctctttcaagttcagacgtcccgccagcgattgtgatttgattgttgattctacagctcgcaaacgaatcggattttgattacccagccatcttgcaccgtcgacagcatcgcttctcagtctccagccaccaaaacgttcaccgtggcacgctgaaatcatgtcctcacccggcctaaccgctctgggcgaatccacgcgcctggtacccgccaatacgccggcggtttttgagatactgccgcctcctggacaaagcctgagtaagggcgagtgcgtggcgacagttttgactcctagcaagtcaaagctgaacgccagagtcacccacgaggcggcaaatggtgctgctcgcatcgagttcgtgcccaccgaggtgggcacccacgtgatcgatgcgtccattaacggcacgaagatcgctggcggcccgctgatcgccaaggtctacgactccagcctgatccaggtgacggaggtgaatggcggcgtggtcggccaggcgtgccagttccgcgtagatgccagcgccgccggcgagggccagctggagatatccatcaacgagggcgaggtgcccaatcatgtccaggtggtgggcggtggtcgctgcctggtctccttcacgccggagcaggccaagtcgcatctgattgacatcaaattcaatggcgaaacggtgcgcggctgtccctttgtctgcgccgtggcggacacctcgcgagtgctcctgaatctctccaatctggagctaatcccagtcaaccggccctcctcctttcacatcaccgtgagcggaggtggagctgccgagctggctgtcagcgtgcgcggtccccagggcgagttgcctgtccgggtgaccggagatatccacgctggcttcacggccgagtttacgcccaccaccgttggcggccactcgatcaatgtggagtacaacggattcgccgtgcagggaacccccttcctggccaagtcatacgatgccagcaaggtggtggtgggcagtgtctcgcggggaaccatgggacgcccggtgcagttcaccgtggatgcgggcgatgccggtgagggcaacctggagataacgatttcggccaagggacagaacattcccacgcaggtgcatccgcaaggcagtgcaagattttcggtttcgtttgtgcccacagagtcgtgcgagcacacgatcaacgtgtcattcaacaaaatgcccgttcccggctgtccgattacggttagcatcagtgggggcgtggccgggccccaggtgtccctgggtggcccaggacccgtgcatcagaccaattcttttgtaatcaatcacaatggcggccgtttggaagacatcgaggtgaacgtggaagtgcatcagtccgcagatggtgtcttcaaggcggagttcgtgccgagagtcgtgggtgagcaccgggttaatgtcacggtcaacggattacccaccgccggaagtccatatgcagccaagtgtaatgaatttaatgaatttcgttttgatatccaaatgccattaaaatgttacttcattcaggtctacgatgtcagcgccatcaaggtgaagaatgttagtagtggcacagtgggcaaggctgtcacattcctcgtggagacatcacaggctggacccggaaaccttgaggtgaccgtcaacggaggcagggttccaacttcagcccaagcccagggtcagcacacctatgccattagcttcactccccgcgaggctgagagtcacacggtggagctgcgcttcaatagccaggatgttccgggatccccgttcacttgccgtgtggctgctgccgctcgtatccaatcgccggagaccatggacaaggtcagcgtgggtcgactgttcgagtttgtggttgaatcggacacaaagccgacggtggaggtactcggtcctgccaggcgtagtgtgcccgtgaagatcgatgcgttgggctcctccaccctgggctacaatgtcaagttcgagccaatggaagtaggcgaccattcggtagaggttcgtctgcccggtggtggtcacgtcgagggcagtccgttcctactgaaggcctactccgccgagaaggttatagtcacggatatccgtgctggcgtggtcaacaagagtgtgagcttcgggatcaatgcctcgcaggcaggagccggcaatctggagataattgtggccgtaaatggcaagaacgtgcccaactttgtccaatctgagggcaatgcccggttcaaggttaacttcaagcccacagaggcggccacccactcgctgtcggtgcgattcaatggacatccggtgccgggctcaccatttagctgtcacatcgccgctgctgcggcctcgccctcgatgggattgccacgggcgatggccatgggagaatgcctgaagcaagctgccgtcaagatggacaacacctttgaactcgaaggctttgatggcgtggagcctcagatctttgtgacctcgccatcgggggacaatgagcactgtcagttgagtcagcacgacggaggtagttactccgcttcgttccgccccaccactgtgggtcgccacctgatcagtgtgacagccaacgatcagcacatcaacggatcacccttcagttgcaacgtgttcgacgtctccagggtgagcatcagcggactggagcagcagtatgggccagccaacctgggcgttccagttaccttcagcgttgacgctgcaggagctggtgaaggaaccctggaactggtggtttccacggacagcagcaccgttaaggcagaggtggtggcctgtgctcgcggtctgtacgatgtaaccttcgtgccccagagcacggaaccccactacgtgaacatcacttttaacgaggtggccgtggacggaagccccttccgcgtggacatccagcagcacacgcagcatattcagatcggtagtttggcggccattgatttcccagcggacgatcagatcgttgagatattctcgcccgatcagaagtctgttccgtattcgattaaccggcagacagccgagttccggacccacatgaccgggaactatactttgcgtttcatcgatcgcgagacccgtcagcacattggatctcgcacgttgtgcgtctttgatcccacgctggtgaagatcaccgaggtgagcgaggcattctgccatcgtccagccagcattggagtgtccttgaacgaagctgggcagggagacctttcggctttggtgcgttgtggcgccaccgaagtaccccacaccattcgcggacctagcaagacgggagtatatgagatagtttaccagcccacgcgtgttgctcctcacaagatcagcatcctctttaacgaagtgcccatttccctgaaacccctggagatcaatgtcctgcccgccagtgcaggcaaagaaatcagtgtcagtggtctgggattataccagtcgcgtgtgggaaagaccacttcgtttgccatcgatacagtcaaaaggccagctagggagttcgatgtggtggtctccggaccaggaggacaagctcttccggtcagatgttatcagaccaagaacggacacctgcaggcggagttcactatcaacaagccgggacagtgtgtcattgaggtactccaccaatcgaagcctctgccgggaagcccatttacgtgtgaatcctttgacagcagcaaggtcagcacccaaggagtcactaaggaaccattggcccttcacagtccaaacagtttcacagtacgcacggataatgccggaaccgccgaactggaggcgttcgccatatcgccaagcaatcagagcattcccgttctaattagcgagcaatctgatggagtctacaacgttgagtttgtgccctcgcagccaggcaactacaagctgaccctcatgtacggtggagagacgattcctagttcaccactgaactttaccgcgtcgtccagtggcgtaaggaatgacgcccgtgccgctggacacggactggaggtgtgccaccggaacaaggaggcatccttcgttgtctactgccccatcgccccgaacgtccagattgaacgattggacgagtatggtgagcggattgagccaaagatcaaggctctgggcaacaatgagtggcgcatctcctacacaattctgtccgtgggcaaatacgagatcagagctagctgtccaaacaggggaagcttgccgggatcgccgtggcacatcagttgcgtggaatccaacaaggtaacacctgtgggtggttggggtactctcgtagatcacgatggccgtctgattctgcccgctcgaattattttcgacgtggaaaatgcggggccgggaaaactggtttgcagcatcgatggcatcgagataccggtggacaagttggtcgacggcaagatgtgtctgaacatcactggcgagaacctggctgccggcgagcatgacttggatttgacttggagcggcttaaccatcacccaatgtcccaggagtgccttcgtcacaggtcaacaggcggcggataaggttcagctcatgggtcggggtctggctgcagctcaagctggagaggctgcgcacttcacaatcgatgcctccaatgcgccggctggcagaccggaggtgatcctcaccagccaggacaacacgtcgctgccagtgagcttggcgcaaccgagaccaagtgaaaacatctggttagcctcatacactccactgaaatccacaactggcactctaaatctctctgtaaagtggaatggtcgtttggtcaagggatgtccgctaacggtggcagtcggctcttcaatggatgcctcaaaggtgatagtctccggtgagggactgcgtcacggtattgtgggcaaggacattaagtcttggatagacaccaggcgagcaggacccggcgaactcaccgcccattgtgctggtgtacggaaagtagcctactgcgaactatacgatcatggagatgctacattcacactgaacatcaagccccaggaatcaggtcgccatatcctgaccatcaagtacggaggacaaaatgttcccggctcgccattcgcactgaaagtggccggtgcaccggatgccagtaaggtccgcgtttatgggcctggaatcgagcatggcgtgctggccaccttccagtcgcgcttcatctgcgacactcgaggagctggagctggtcagctgacagttagggtccgtggacccaaaggagctttccgcgtggagatgcagcgtgagagtcagaaagatcgcaccatactgtgcaagtacgatccaaccgaaccgggtgactatcgagttgaggtcaaatgggcaggcgaattcgtgccaggatcgccgttccccgtcatgatcttcgacactgaggaggagttacgaaggtacttacagggcatatgaggccagctcaaccaccatgtcattgtcttccccagtggccttagtccgctaccaattaggcgcgatcaatcccgacgacgtgcctccacttgctctcccctctagaagcccataaaaccttgtagtatactatgtatgtgtaattaagctaacaacgagacctaaagagtaacatgttatactaatcgagctagctaacttaaaaacaaaatgaaccgaataacgaaatctttaggctaatcccaaatgaaagcattcgcttttgattatttatagttttaatatgttgagcaatgtaaaaacttgcaattggtttaattaattagcattgtatgcaatacaaaatacacatataaat

SEQ ID NO: 24306 - protein, 1763 aa, DROSOPHILA
MSSPGLTALGESTRLVPANTPAVFEILPPPGQSLSKGECVATVLTPSKSKLNARVTHEAANGAARIEFVPTEVGTHVIDASINGTKIAGGPLIAKVYDSSLIQVTEVNGGVVGQACQFRVDASAAGEGQLEISINEGEVPNHVQVVGGGRCLVSFTPEQAKSHLIDIKFNGETVRGCPFVCAVADTSRVLLNLSNLELIPVNRPSSFHITVSGGGAAELAVSVRGPQGELPVRVTGDIHAGFTAEFTPTTVGGHSINVEYNGFAVQGTPFLAKSYDASKVVVGSVSRGTMGRPVQFTVDAGDAGEGNLEITISAKGQNIPTQVHPQGSARFSVSFVPTESCEHTINVSFNKMPVPGCPITVSISGGVAGPQVSLGGPGPVHQTNSFVINHNGGRLEDIEVNVEVHQSADGVFKAEFVPRVVGEHRVNVTVNGLPTAGSPYAAKCNEFNEFRFDIQMPLKCYFIQVYDVSAIKVKNVSSGTVGKAVTFLVETSQAGPGNLEVTVNGGRVPTSAQAQGQHTYAISFTPREAESHTVELRFNSQDVPGSPFTCRVAAAARIQSPETMDKVSVGRLFEFVVESDTKPTVEVLGPARRSVPVKIDALGSSTLGYNVKFEPMEVGDHSVEVRLPGGGHVEGSPFLLKAYSAEKVIVTDIRAGVVNKSVSFGINASQAGAGNLEIIVAVNGKNVPNFVQSEGNARFKVNFKPTEAATHSLSVRFNGHPVPGSPFSCHIAAAAASPSMGLPRAMAMGECLKQAAVKMDNTFELEGFDGVEPQIFVTSPSGDNEHCQLSQHDGGSYSASFRPTTVGRHLISVTANDQHINGSPFSCNVFDVSRVSISGLEQQYGPANLGVPVTFSVDAAGAGEGTLELVVSTDSSTVKAEVVACARGLYDVTFVPQSTEPHYVNITFNEVAVDGSPFRVDIQQHTQHIQIGSLAAIDFPADDQIVEIFSPDQKSVPYSINRQTAEFRTHMTGNYTLRFIDRETRQHIGSRTLCVFDPTLVKITEVSEAFCHRPASIGVSLNEAGQGDLSALVRCGATEVPHTIRGPSKTGVYEIVYQPTRVAPHKISILFNEVPISLKPLEINVLPASAGKEISVSGLGLYQSRVGKTTSFAIDTVKRPAREFDVVVSGPGGQALPVRCYQTKNGHLQAEFTINKPGQCVIEVLHQSKPLPGSPFTCESFDSSKVSTQGVTKEPLALHSPNSFTVRTDNAGTAELEAFAISPSNQSIPVLISEQSDGVYNVEFVPSQPGNYKLTLMYGGETIPSSPLNFTASSSGVRNDARAAGHGLEVCHRNKEASFVVYCPIAPNVQIERLDEYGERIEPKIKALGNNEWRISYTILSVGKYEIRASCPNRGSLPGSPWHISCVESNKVTPVGGWGTLVDHDGRLILPARIIFDVENAGPGKLVCSIDGIEIPVDKLVDGKMCLNITGENLAAGEHDLDLTWSGLTITQCPRSAFVTGQQAADKVQLMGRGLAAAQAGEAAHFTIDASNAPAGRPEVILTSQDNTSLPVSLAQPRPSENIWLASYTPLKSTTGTLNLSVKWNGRLVKGCPLTVAVGSSMDASKVIVSGEGLRHGIVGKDIKSWIDTRRAGPGELTAHCAGVRKVAYCELYDHGDATFTLNIKPQESGRHILTIKYGGQNVPGSPFALKVAGAPDASKVRVYGPGIEHGVLATFQSRFICDTRGAGAGQLTVRVRGPKGAFRVEMQRESQKDRTILCKYDPTEPGDYRVEVKWAGEFVPGSPFPVMIFDTEEELRRYLQGI

SEQ ID NO: 24307 - DNA, 3212 bp, DROSOPHILA
cagcaagttggacaaggcggtgttgcatgacgttgtttttgaaaaatggagccactcggactttctgttcgccaaattaatcaaaaaagttgttaatgaaccaattatcaaagttattgatcactttgagaatagacagcaatagacatttctattaggaatgtaggaatattctacattaaatcatggtatctttttgcaaagtctttacttaaatagtctaaaataaaaaactatatatatatttattgttatgttttcatgacgccaaaataaatattgtgtaaaaaactgttccttagcattagtatatatagttattttttccataatctgcctgcgactttagattacttttcttcctttacgcactgcttggcaagcagtttacatgtatgtaagtgtataaaaataatgtaaaatgtatacattatcaaaacgatggcatacatcgatggtgcttccgcgtcttgaagtacttctgcatctaatctgtaggctctacaagtccacaacttggctaatatttatctcgtcctcagaaatggccaatcgacgtgcctacttttgggccgagataaatgatgtcccaaagacaatctaccttgcacattttaatccacgagtaacgggtaaaactagcacaaatgtcagatacgaaatgaagttgcagttctgtaaaaataataaataataataaataaaacggattagttcggccttttcttacaatcatccatgaaaaatgcagtcatttctcatccaaatgctgccgatattgcttggaattttttttgtgtggctatcgaacagcacagccttatctgaggtaggtgcaatagttgaagaaaacgtaaggatattaccaaaaggacgctttataggtgaactggaagaatcactcgcttcaccgcattcatcatcgcacaaaagtaataactgcggtaagtacgttgaagttgactccagttgaaagcgttagtaatcccttttcctataggtggacatcataagcagtcacaactatccggtgcaaacacacactgtggtcaccagggatggctacatactgtcggtcttccgaatcccatcatcacagctatgtgcaagtagcgaaccaaagccagttgttttgattaaccatggcatgactggctccgcggactcatggcttctaactggaccgcggaatggactgccctttttgttggccgatgcttgttacgatgtgtggctgataaactgtcgcgggacccggtactccaggaagcatctcaaactcaaggcctggctcttgcagttttggcgttttagctggcatgaaatcggaatggaggacttgcccgccactgttgaccatatcctggcctccacgaaacggaactctttgcactatgtgggtcactcgcagggatgcacatccatgctggtgatgctcagcatgagaccggagtacaataaacggatcaggaccaccatcctactggccccgcccgtcttcttgaaacattctctttcgatgggtcataagataatgaagcctctgttcaacctcctgccggacattgagttgttgccccatcacaagatgctgaattccgcggtatcagccatatgcaaaattcttggcgtgaaggacgtttgcactgcactgtatctcctaaccaatggacgagtatcccagcacatgaacagggtgagtgaaaagttgagagcaggctaatcaggcttatgtatacaacttaactacctttttcagaccctcattccgatgttgattgccactcatccggctgggatttctagcaggcagccgagacacttcttccagctcaaggactccgggagattccgacaatacgactttggatttggaatgaactatcttatttacagacaaaacactccaccggaatatcccctggaaatggtgcgtccgcactccgccatccacatcttctacagcgatgacgatggaaccatctctccgagagacgtcctaacccttgccagcaagttgccttacgcagtcccccatcatatcacggatgaaacctggaaccatatggactttcttctagctaacaacataaatgaattgattaataatccagtaatcaagattatcaagaccttcgaagaaaatattaagcacaaaattgggaatataaagggggaaataagtattgatgcacttttaaatgaattttaatagttggggaaacataattgttttaaagagtgttgataaataatgtatatattgctataatgtcgcatattaaagagtagttaaagtgaagctcacatttgtggtcataattaagtatctcaaggaaatgatgcgaaccgaattgtcaaataattatttgcatgattataccaaaaaagagttgtcttcttagcaataaaaggatttgtatttttatttggtctaaactataaattatttatttattaatcagtacatatatccatggttgatttagccgattcaacgcggactccgtttcgtaattctacaatttgtttttggcactagtgatagttctggctttgatccatctacatcctccgacatcctggttatcatcgaacgcttccatcagcgtcgccgctgctcgtagcggttcatggaaagcacaatgttgtcgaatatgtactccctgacccccaatccgcagatgaagtcaaagtggttccatcgcttccagggaaccttgtacacggcttccacgttgggcaaccgggtgagcaatcgccagatgtccgccggcgccacaatgtagtcgttttccgagaagaagaccgtaactggcgtggacacgttctccagcgcgtactccggtggctccagttgctgatagtgcagccagttccgctcgggaccgtagtcatactgccggaatctggtggacacatagccctggaagtagtgcatcagctgcttcaccgatccgcccgccggaaagttggccatcaggtcgggcaataacgtcttgttaaggaatcgggtgtcatagccaacggctggccacaggcgactgatgcagaccagtggcttttcgttctccagacacgtcatcgataggaacttcttgaagaacttgttcgtggagaacatctcgacgccctcaagcatcttagagacatagttccgtgtgccaagcactggaccaatgaccttggccagcccactctttgtattgctc

SEQ ID NO: 24308 - DNA, 1149 bp, DROSOPHILA
gtggacatcataagcagtcacaactatccggtgcaaacacacactgtggtcaccagggatggctacatactgtcggtcttccgaatcccatcatcacagctatgtgcaagtagcgaaccaaagccagttgttttgattaaccatggcatgactggctccgcggactcatggcttctaactggaccgcggaatggactgccctttttgttggccgatgcttgttacgatgtgtggctgataaactgtcgcgggacccggtactccaggaagcatctcaaactcaaggcctggctcttgcagttttggcgttttagctggcatgaaatcggaatggaggacttgcccgccactgttgaccatatcctggcctccacgaaacggaactctttgcactatgtgggtcactcgcagggatgcacatccatgctggtgatgctcagcatgagaccggagtacaataaacggatcaggaccaccatcctactggccccgcccgtcttcttgaaacattctctttcgatgggtcataagataatgaagcctctgttcaacctcctgccggacattgagttgttgccccatcacaagatgctgaattccgcggtatcagccatatgcaaaattcttggcgtgaaggacgtttgcactgcactgtatctcctaaccaatggacgagtatcccagcacatgaacaggaccctcattccgatgttgattgccactcatccggctgggatttctagcaggcagccgagacacttcttccagctcaaggactccgggagattccgacaatacgactttggatttggaatgaactatcttatttacagacaaaacactccaccggaatatcccctggaaatggtgcgtccgcactccgccatccacatcttctacagcgatgacgatggaaccatctctccgagagacgtcctaacccttgccagcaagttgccttacgcagtcccccatcatatcacggatgaaacctggaaccatatggactttcttctagctaacaacataaatgaattgattaataatccagtaatcaagattatcaagaccttcgaagaaaatattaagcacaaaattgggaatataaagggggaaataagtattgatgcacttttaaatgaattttaa

SEQ ID NO: 24309 - protein, 333 aa, DROSOPHILA
MTGSADSWLLTGPRNGLPFLLADACYDVWLINCRGTRYSRKHLKLKAWLLQFWRFSWHEIGMEDLPATVDHILASTKRNSLHYVGHSQGCTSMLVMLSMRPEYNKRIRTTILLAPPVFLKHSLSMGHKIMKPLFNLLPDIELLPHHKMLNSAVSAICKILGVKDVCTALYLLTNGRVSQHMNRTLIPMLIATHPAGISSRQPRHFFQLKDSGRFRQYDFGFGMNYLIYRQNTPPEYPLEMVRPHSAIHIFYSDDDGTISPRDVLTLASKLPYAVPHHITDETWNHMDFLLANNINELINNPVIKIIKTFEENIKHKIGNIKGEISIDALLNEF

SEQ ID NO: 24310 - DNA, 2279 bp, DROSOPHILA
aatcaatcaattttattgtgcaccttgggaattcagaaaatgaattatattggtagtttgtttgaatcgttctgtcgtcggcacctggctattgttcttttgaagtagttaaatataaaagttcagtattatggcttaaattctataagagattattaaaaaccttctagctcgctggtctgtaatatctaaaattaaaacttgcacgaagaataatcattactaacttttttgcacttttctaattacttaaagtaaaaagagaactaaaatttcctaaagaaattaggcattgcaagcagaataacgcacagatacagattctttctgattgtattttgtttctcacttaatattcacaaaattgctttcagtgtctcaatgagatggcatccaaagcaaactcctgactgcgtctaaaacaaatttacaaagttatagggaattactatcagagagaacaagaactaaaagtgtcttaaaaaattaaacgaatattgtaaaatatataataagagcacacacacaccgcaaacaacaaattatatttttatagaaaaaagaaacattcaaaagctacttctgcctgagcatttcaaatagtactttgatactgattaaaaactacctaagacgtatctgatgttttcataaaattataattaataggaaaaaattaaatttctgtaagtgttgaggaatcgtaaaaatgttagctggcggtaatcacttttggcacaaatatatgagcataaaaaaaggcatacaaccaatgcagttttgattataaaccgggtttgcaactacctaagtctgctgattcttctattcacatttacaagctaaaacgaatctacattgccttagaagtattatttttgttgaaacgtttgtaatatttgagaaacagtcagctgtgttccttctgtctgagttttgcttaaagcgttcaaattttgtgatattataaatttaaattgtttaacgagcaaacaccgaaatggcggctgccaacatggagaagggtgagctgatgaaccaggtgaaacaacagatcgcattggccaatgcccaggagatgctctcgaagatgacggagaagtgcttcaagaagtgcatccagaagccgggaaaatcactggactccaccgagcagcgttgcatttcgcagtgcatggatcgcttcatggacgcctggaatctggtgtcgcgcacctatggcaatcgtctgcagcgtgaacagtacaggaccatggaatcgttggagatgaccagctaggactagcagctaggattagcagctagattgcactcatcttgcaattaaaatcgaatttattttgtttgtgatccaatctcgagtcgctttttaatctactgacagtccagcccttaactgcacgcttatcgcagcagaggtgatagccggctgattatagggaatgcaattgcaagtgaagaccctcccggggattgagggtgctgtctatgggtctaagccgatagcttccagcttgatatgagcacttttcctgatcgttatcgtgtttggaatggtctcgttagctaacggatgagcaagtgctcggctcactggcccaaatgcagtttgcccggagacgccggttaacccagcactgaaatgtgtagtttcgagaccactctaatccattgcagcattttcaacaatatgcaaattcatcccgattttcttgccaactaactccgttgggttttttcttacattgccatttggacattggcgatttgaccagaatatatgtaacaaatgcatgttaaggttatttgagaccaatatacataagccaggcattcttattttcgtaaaatgctcttgaggaattgattttcaaggaagggatattattacgaattttagaacaaaattcgttttgtattatgtgtttcgaaaaaagccataattaccttaatcatatacgcatgacaacgaatttatttcccggagatcgcaggtctggaacaacaagcacaacttcctgataggcaaaccgatttagagccacttaaatcaaaattaaactgactgcattaaattttgttggtggggccaagtggtaaacctcgccaagaaccaagcagaaaatccactgatatcggtgctagcgaacgtacggacattgaacattatggcaaatttagtgggtgcaggtgaccccgtgcactggccaaaaaaaatgatacgctgcaggtgatttacaaattattaaaaaaaaaaaaaccaaaaaatcgaaaataat

SEQ ID NO: 24311 - DNA, 279 bp, DROSOPHILA
atggcggctgccaacatggagaagggtgagctgatgaaccaggtgaaacaacagatcgcattggccaatgcccaggagatgctctcgaagatgacggagaagtgcttcaagaagtgcatccagaagccgggaaaatcactggactccaccgagcagcgttgcatttcgcagtgcatggatcgcttcatggacgcctggaatctggtgtcgcgcacctatggcaatcgtctgcagcgtgaacagtacaggaccatggaatcgttggagatgaccagctag

SEQ ID NO: 24312 - protein, 92 aa, DROSOPHILA
MAAANMEKGELMNQVKQQIALANAQEMLSKMTEKCFKKCIQKPGKSLDSTEQRCISQCMDRFMDAWNLVSRTYGNRLQREQYRTMESLEMTS

SEQ ID NO: 24313 - DNA, 3617 bp, DROSOPHILA
tttttaatactaaatgccaaggttgcagaacagacaacacgagcgtttcaaacgcagacgactcgcttaccaccaccagcaatagcacagtcaagaccataaaaccaagttttcagttggacatggacgagtttaaattggacagctcggaagatcagataatgcccccaccgaacacgccgccaggtttaaagatcagcaacacctcggatagtgtagttttattgacgcctgcgacccaggatataatctttgtgaatgatacactcgaagatgtgagcaaactgggcaccatggatgttctggccgaaattatgaaggacgatgacgacacgtgctcgagtgctttaagacagtacgagaaggttataattgaccagcagaagcaaaacctaccaaatgccccaaaagttgagagcgtcattccaattaccaaagtcgtgaaaatggaacctatatcccagccagaaacagacttaggcaacgaatcaacaaaactgcccgaggatattgaaaagtatcttatggatatcaaagaagaggatagtaggcattcggaggaggagtttccgcgaccgattttgatcaaggaggaacctgaggcgacggtcaaagaacgttttaacattgagtgcgtcgagtgcgaaaaggtatgtacaattttctcgaccatccacaactaaataatatttatttcaaattcgatccacttagttcatcaattttatgggttcaaatctgacagacgagaagatcaaagattatttggcaaagtgccggcatgaagacgctcgcagttcaactccgccgggattctggaatccacacatggtttccttcgcagaaggcgatccacgcaacgaagtgttgatagacactcggttttgggaccagagataaaacaaatgacatttaggcaatcaatttacaaatagtttttcagtttagaccatttcatttattattgattttgttagttctcaatttgatcacatttgattcacaagtttcctcgcttggcttgttcaatttcaatggccgtgaacaaggacttaaagttgccagcgccaaatccctgaaatagtaatgatcatgatttacttgttcttagcaacagtaggttaagcaataaatcttacattgtgattgtagcgttggataacttccaggaagagggtcggtctatcctggcagttctttgtgaagatctgcagcagatatccgttctcgtcgaagtcaatcaaaatgttcaacttcttcaagacctccatgtcctccttgatcttggtgcggctgtgcgagagctgctcctgaaggatctcgtagtacgaggatgggatggtcaggaactcggttcctcgagcctttaggttgctcaccgcctcgataatgtcatccgtattaagagcaatgtgctggacaccaccgccgccgtagtactccacgtactcctggatctgtgacttctttttcccattggctggctcattgatcggcatcttcaccgtctcctcgtagtttgccatcacgatggaccgcagggcggagtattccgtgtgaatctgcgagtcatccacggaccagaagcggtggaactgcaggattctctcgtaccaggaggccacgctctccatctgcagatccggctggttgcccaccacgtgatcaatgaagttcagcttggtggagggcaatccgtttagaaggacatctttgggcgaccgctggaatccaggcaggaaatctccagcgtacccattgcgctccacgaaagtgtgggtagtgtcgccgtactgcattcaagttaaggattaatccttaaatattccagaatgaaatccacggacttaccgtcttgatggtagcgaatctcacgaatccctgatcatcgctctcctcccagatgtcgcggaccacttcggccccacgggacacggccagtgtgaaaatggcattcaaatcctccacttcgaaggctacatccttgacaccgtcgccgtggcgcatcaggtggagtccatgctcctcgtcatccggcgtgtaggcggagacgaacacaaagacgatcttgttctggcggacggcatgcttggcgaagcgtcgctccccggtctctaatccctgatagccaagtggttcgaagcccagtcgagtggtatagtagctggccgcctgcttggcgttgccaacgtagaaggttaagtgatcaaagcttagaaatttgccggcttcaggctgaaagtagtgaagaaagtaggttggcattatacgctccaatattggcatacgctttcgaacttactttggttcctttgtcagtatagctggtctgttggtagttaaaaagaaataatagaagtcattagaattagatcaccttgaaatggatccttagaaagtctgtataattatcattggtttatccgcttttgttagacagtatttgttataaatcctgtttgagaactctttaaagtccatttaattcgcactaaagggctgttacataaccacatagccaccacatgtcccatcgtctcatttaccattatcactcagactcaatttatgcaaatcctctcctcgcacgcgatatagatttcttcgttccgtcgatcttacacgatcttcaaattgattatggcctgagctcagccagtcggaggctttttatagggcgctcaggtaggtggatcaggtgaaaatcctgtactaatttaaatataagccaaactagtattttgtttatttcgaatgccatattatcggaatatcttagctagctggttattgatcgcatatttaagctaaacctgcatggatttgtttactagaacaggtggattacttaattaatgcaatctcgagcggaatgaattgcaatattgtaatgcgggtcgggcctccaatctgtttacttcgtatctgagcggcgctttgcaagttctgcgttcgaaatttcacttccttaagctcgttacatgaagatacagataactatgtgttcgttatgcaaaagttcggcccatgtcagaattcagctaaatattcatgaagtcaagtctagtgagttcgaaaatcggttgccaagtcgtactaaacttgattccagtttcgagcccccaaaaacgcaaacaatgggccaactgagtgttaatgctatctgaattgttattgttattgccattgttacacagtgcataatgtggggcgttattgaagttgttttgcattagaaccgctttgcaaggttctcaaaacaaatgtacaaaaactggttaacaaatctgtttgttgttacgatctaataaagcggcacacgctagtcacaaatcatctaaattgatgattgcctttatcggtttttaattgcggggataatagctctaagaggattggaaaaggatttcaaatcattagcttgatggttattttctttatttgaaagcgcataattcagttgtatttaaatatagcaagactggttttgggaactggattagttatttaagcaagttctattatttttataggtatttaggaatatcttgcttatagatgaatgagcgttttagtgatcgttattctttagtttaaagttagacaacatcactata

SEQ ID NO: 24314 - DNA, 1428 bp, DROSOPHILA
atcgacggaacgaagaaatctatatcgcgtgcgaggagaggatttgcataaattgagtctgagtgataatggtaaatgagacgatgggacatgtggtggctatgtggttatgtaacagccctttagtgcgaattaaatggactttaaagagttctcaaacaggatttataacaaatactgtctaacaaaagcggataaaccaatgataattatacagactttctaaggatccatttcaaggtgatctaattctaatgacttctattatttctttttaactaccaacagaccagctatactgacaaaggaaccaaacctgaagccggcaaatttctaagctttgatcacttaaccttctacgttggcaacgccaagcaggcggccagctactataccactcgactgggcttcgaaccacttggctatcagggattagagaccggggagcgacgcttcgccaagcatgccgtccgccagaacaagatcgtctttgtgttcgtctccgcctacacgccggatgacgaggagcatggactccacctgatgcgccacggcgacggtgtcaaggatgtagccttcgaagtggaggatttgaatgccattttcacactggccgtgtcccgtggggccgaagtggtccgcgacatctgggaggagagcgatgatcagggattcgtgagattcgctaccatcaagacgtacggcgacactacccacactttcgtggagcgcaatgggtacgctggagatttcctgcctggattccagcggtcgcccaaagatgtccttctaaacggattgccctccaccaagctgaacttcattgatcacgtggtgggcaaccagccggatctgcagatggagagcgtggcctcctggtacgagagaatcctgcagttccaccgcttctggtccgtggatgactcgcagattcacacggaatactccgccctgcggtccatcgtgatggcaaactacgaggagacggtgaagatgccgatcaatgagccagccaatgggaaaaagaagtcacagatccaggagtacgtggagtactacggcggcggtggtgtccagcacattgctcttaatacggatgacattatcgaggcggtgagcaacctaaaggctcgaggaaccgagttcctgaccatcccatcctcgtactacgagatccttcaggagcagctctcgcacagccgcaccaagatcaaggaggacatggaggtcttgaagaagttgaacattttgattgacttcgacgagaacggatatctgctgcagatcttcacaaagaactgccaggatagaccgaccctcttcctggaagttatccaacgctacaatcacaatggatttggcgctggcaactttaagtccttgttcacggccattgaaattgaacaagccaagcgaggaaacttgtga

SEQ ID NO: 24315 - protein, 294 aa, DROSOPHILA
MRHGDGVKDVAFEVEDLNAIFTLAVSRGAEVVRDIWEESDDQGFVRFATIKTYGDTTHTFVERNGYAGDFLPGFQRSPKDVLLNGLPSTKLNFIDHVVGNQPDLQMESVASWYERILQFHRFWSVDDSQIHTEYSALRSIVMANYEETVKMPINEPANGKKKSQIQEYVEYYGGGGVQHIALNTDDIIEAVSNLKARGTEFLTIPSSYYEILQEQLSHSRTKIKEDMEVLKKLNILIDFDENGYLLQIFTKNCQDRPTLFLEVIQRYNHNGFGAGNFKSLFTAIEIEQAKRGNL

SEQ ID NO: 24316 - DNA, 9895 bp, DROSOPHILA
gcacactcggttgtctcactcgcttttcattttaatagtattaaagtatcgtattttatatgatttatatccatagatttatgcattcggttttcatttcaagttctccctagctcgtatgaaaaatgtttaccggggactgttggctgggaatcgagggtatgcagctggtcgagagacatggttgggggggttgtgtgagagcgcgaaagaagaccttagatttgagtttagctaaaacgtagaagccatcaaacgatggccaactactcattacgctatcgttaggaaaatgctgataatgacaataaatataccggattcccgggatcagaatgagtaatcctagtgcagtcgatggaatatggataatggcaaacatcgaacggagaatgagagaggcacctacttatagactggctggcaatggaaaacggaatctgaatatgaacacctaccacatctgatacttcagttttggatatatcgttcggagttcaacccactcgacttcatatgtgtataaaaattcacgattcttcttccatttgggcttcgtccctccaccaccacatatataaaaatagagcatcgtggatctccaaatagtttacgtatataaatatatatgttgagagatatttatttatactggttgctactctccatctctgcccttcttctcctctcagttcccttcgcatccctccttcctttccggtcaaatcgaaatcttctctcactcacttcactctttctatataaaacctgcgtgtggatttatgtacgagtatacataaactgtatcggttgtgtaaatattgctatacaaaaaaatcgttccaaaaaatgcctgcgttgctttgcgttgttgttctcggttgttaatctgttaatttttcgattttcggttggtttggttgcatttgcagttcttttcgcttacaatttaggttgccgaatacatgttcttatttttttttgttttattcttttttttatgatttttttgtttttgtaaatttcgttcaaagctgaggactgaattcttaactattgattggggcgttttatagttttgtgttttccttttatttttatcgtataaaccaaaaagttttaaatataataatgcagaaatttataatttttttgtagttgggtagttatttgcgttttttgacattttttttttctttcaagcatatgcatttttactcgatccatttcctctgctacacacaaaaaaccgcaaattctttcttggccgttggtttttcttttcccataaatttaaatattaataattactttttatgtgttattagttcatttacggttcgctcttatcaaatttgttgctgctgttgttgttgtagttgtagttgttggtgtgtgtgtgttgttgttgttgtggttgatgggggtgtttgtgttgatctattctcctagtacccgcaagtaatcagataatctccaagtttctctaccacggaagcggcctgctggggctgaacgggatcctcgtagatggaaacgatcacggctgcaaaagatgaaagaacaaaaatgtattaggaattgtgacatcagttattgagatgtaaacagatattgctggggaagtcttacatatggatattaatattcgtagaaaaaggaaaatatacctctcccatctgccttcctatatacctatctacattatctacactatccgttggtaaacattttcatcgccattgtcacatcagacatttattacatttcgcagcggtccgtccgcttgacaaagctctcgaaagcgaggagaaagccaccgtcagcggcggagaaataagaactaaccgttgctttacaacagcagtagccagcagcagcagcatctctacggccagctggaaattatgaataaagctatcaataaagagcgagccagtccgccgcaattccaggtgaaaactggacggacgactggacaactcgagagcaaacgagaacggacccgattgacaggtctcgagttgagtggctaggctaatgcattaatcaaatgagcagccaactctgatggacacccaattgtttgtgtgtcgagttgggacgccagctcagcagccgaatcgaatcatatcgcccgggggtcaataaacctggttcgtatccacgagccatactagccgatgagccagaagagcgccacatttgcaccaccacctccggtgacatgtcggcggctatcaacagtttgcgggagagcccacaagtcaatattgaattcaataggtgataacgccagtctatttacatgccaattatgaccgtaacaataaccaacttgttaataacgctagtttccgacagctttgtatgttttatatacatatataaaagatttatatatatatatatagggcttggcagcgtttaatggttcaaattccaatgaattccagtattcatttagtgttatagcaaattaatgaatatgtatctatggtttgaaaaaataactttgttagctaaatcaattcaacttagctacctgctgaaaccatattttaaacagcagcagtgcagcagtatataatgtgaaattgtaagctttgcattcttcccagacaaacagtttttcgagcatgaaaaaaaaacaaaacaaggtcttatcgagagttgttttgctcaaaagtgactatttgatgacacatttaaggcgactagtcaacgctccagcaaatctggctggtgggtcactcgggtggtaattcgagtagggcgcatgttgcagtgtaccaatgcaacaatgtggcagtgcgaacgaagaatccgatcagctgaaaggcgcctttggaacaagaggcacaagacagtagtacttgggccgcctgctgaccaggtccaaagcggaccagggaatgagccaaggagcggcgagctgacaacaaacagcatttgccatttgtggccaatttttctatttttactccactgtctcggcgtttggctgcacagcacacactcacacgcaccgtgcaacacatttgcacttgaaatggattatggcaataaccttgagcttgtggatgcagcggtgggcggcgggtggcggccgtactggtgggctggccgccttgtccgtgttgacgtgaaaatttgtgtgagtgtgtgtgtgccagtgcgcaacagttgccgcaaaaactgtacaaatatggaagcgcggctggcgcgtcagcaaataaactggtcgtcgtcgtagacgtaaacagcaaaaacaaaaaccaatttggccgagagagcgcgaatggggttttcaaacatttggccatctcgagaggctgaaaaacgaaaaaaaaaaaaaaaacaatgaggcatcactgctcgttgaccccgtaaatggagcaaggcatcaacagcagcagcgaccgtaaaatcgtaatgataactctcattttccttgaattcttcgcgctaaatgtcacagatctgaaagctgagaaagatcttaagtaggtttttccaaactcactcaaaaaaccaacgggcgagaattcgctcaatagaactttcgaatttatttaacggccttactacttatctatcttcttttggtgtgttgggctttggattaaattcttttcaccagcgataagtcacataagtctgtgagaacgagtggcattaaacattttgtagaatgtcttttccccgtttgctttggctccggttataaaaaaaaaaacatctgataatggttatcggggtggggcagacaacgcatcgataacagcggaaccactttgcagaaatttccacgctcaaactagaatttttagtttccataaaactggatggcaaaattttactactttcggtatgcataatttgcgggattttaatgtttctttttttttacatatttaaactaattttctgcaggcaagtgacgaaatcttataacaacttaaaccacaataaaatcaaatatcaaccaaaaagcatcaagtttctagaattaatatacacttttaaaatccatatattaagtatgtcgttctctgttttcttttttttgctcaaaatggattaggatatcttcaggaaatacattttgtacttaaaacggcaaacagattagtaatgtcgaaactgtgagtaacctgatcaaatttgggaaacacattcccagaaccaatgaatcacaacacatttttggcaaaacaaaaattattaaacaattactgagcaatcggattaaaccttctgtatgtgattttagtttcgttcttaacgcaataaataaaccagaatattaatgaatattaatttcttaatgaaatatatagcaagctaaccaattggtgctaactgaacaacagtaaaaaagtcgaaggtgataagcggaaaactttctgacttggaaaatttatcgcagagtggcggaggattacatgagtagacctacttatttgaatgccaactcaccttgtgttgtcttcatgcagtgcactccgctccggccgagcttggcgcgcaccacgcggtctgtgccggaaaggtaaatgtaccgctggccggcgagtgtcacgccgttgctggtgagaccgtcctgctggtcaaagccgctgatcagtttggagagctcctcttttgtcacctgcaagatggtaaggaaagtttggagttagtgcccgctgattgtggatagttgttttgtagtaataaggtggactagtggtcatgttggtctttagttaaccatatgcattagaaatcaaatgaactcagacatactgtcatcaaatctttagtaaacccattgtatgaatcagaaaccagtacctaataaattcaactatattgaaaactttaatcaagtagattgagagagaatttcatcatattgcgttgatcccacttgcaaaatcatcattttgaaaaaggctcaacaattcaaaggaccataagagagcaaaaaaacgaacattttgaacggtggtatgaaatattggttgtgttgggttcaattaatgggtagtcgcctgcaggggaggttgcatgttttcggggcaaaaagacatgcgagacatgtgtgtaaagtaaaaccttctgttgaaatatcgcactaatcagctgcagacgacccacgcaaacaaaggcaaacccaccaccaccaccaccactacaagcaccaccaccgcgagcaaaccaccacccatttgaaaacagtaggcaccatcgacgacgactgccaactcattagcaaatgtggtccactcgataccggggtggaaacagaggggtgtggcacaaggaggctgtagagttggctaagggatatgatactgtgggtctcgggatgcgtgcccggcttgattttttggattttaaaaacaagttttgcacacttgagcgacttgtccgttcagagaaagagagagaacaaaagagatggagacaaagagggagagagagagtagcaccaatgtcaatagccttggtcaaatgcataacaagttggcagccccatcccccaggtaacagctgcttttgccggggggtgagtggggaaattaatttgaaaatctcgcacaaccgatagttactcatttgcggctgccgaacggtgacacatccgaatgccactcgaattgggcatcgagaagtttccattgagcgcaactcgcgtcgcgtgagagaaagaaatgcgaagaggagagcagagcagaagagcagtaaagtcgcgaaaagccggttttgcgtagacagctatgccaaaaacgttaataactaagcggagctcattatgcggcgatagcgaaaattccacaagtgccaaaaatctcctaaattggtagtttttcaatgaatgaacatgccacacgatggcactcagattctgtcacccaaagtcggttttctcaatgcaaagccatgtatataaatgtgtttatcataaacttttattagcagcccaaaaacacaactctctcacaaggtccagctcagctgatcaatcggaaaaggaaaaagctaagtattcacaatgattcatccgaatcaagatcaaaactgggtaacttgggtaatgcgaagttgggaaaaacaacaaaggcacctgcgaaggcagcgagagataataaaacgaaagtgatgcgcgtgcagaaatggcaggtagataaaagaatgagtgtgatggtgaggtgacgtaggcagcggatcgaatttggccaaaatcggttcctaatctaataagcggcgagatgaacttcattcgacggacaaagcactagggagtggctgcccgaatcgagtggaatctcgctgggagagcgagcaggataagagcacatggattcgtatttgtattcggattcggagtcgacaggaagttgcacacgcacacagacagccacactcacaaaagggcgaaaacgtggcgcgcatacgagaaatactcagagcattcgcattcgaaggtagcagattcagattcagaatcgaaatcagtaaaagaagccgaagcggagtcaactccactcaattcgattcactctgcgctggtgacgcggcatcgcatgctcaagatattttctgtacttctgttcgtttcattttggttctgttctgtttggttctgtatttcgctccgataaagagcatttattttggccgtcgccgcagaggaaacggtccgtctgtattgagtgcgataaaggcgagcgatagcgaaggggtggggctgatgccaggcgcctgtgggctgcattatcaggaaccagtgttgcacagcaccgcagacattcgaaccggctgcgctgatatcagatttcccggtcccggccccgcccccgctctccacaccacacactcatcgccgcatgcaagtgcattggtgattaccgcgaagcgaagctgcacctccttagtcaccgataaacagaaatccatccgtatcggctaggtcgcccaattggtctccctgctgggttgtatgatcacgcacactccctcaaaagcgtaggcgggagaggagggggtagcgggcctgcgcaggagtggcgctgcagggggtgaaactgacaagggcgagggcgaaggggtgggagttgctctttatcaaatgaaagttatcatggcggccgcgagaggaagacagcgcgagagtcacacccttgaacttgcgaaaattcattgtcaactatccgtttttccgtccgaattccattctatgggttttcccaaccgctttccgtccattagtccattccgttcgacgtactcacctcaaagccactggactgcgcccaaatgttgccgtcgtggccggcgatgcacgccttggtcacgcactgcgaggccaggagttggttgtccacataatcttgccagctcatggtgctttgtttgtcgtgggtgcggattaagttgaactgatatatatggatctggatatggatcgctgttgctttaccgcacggcgagtcgcactttcgtttcgggggtcacacgaaattggcagggagacaaagaaaaaccgcaacaccgacgattttttcttggggtaacttactttcaactgcaacgagaggtggagaaagagagagagagagagagatggattaacatttatcaaatcgtatcgtattttatcatgcggcagtgggtgttgcatccgcccttgacaaattaccgggtatcggcggaattgtgttatgcacatttatgtatatacatataagtatatatatctagtgattttgattgtgatgcattgcacaaagcgcctaattttccgcctccgaaaaactcacatatatacacacacacgcacgggggatgagaccaagagcaagagcaagaccaaggagaccaagacagacagaaacagaaaccgtacgccgcagctccacacacacgtccgactcgctgggaattttcgaagcgttcgaggcggatttcaaaagtcgaatgagcgcaaagcagaaccataaaccgattttgaattcgagaaaacccactcgagagagtgagagatggagagagagtggcgaaagagtgcgcgctgcagggggctgcttgccttgcctctgctccaaagcgctcaattccaagccgtgagtcacccgttcactcacccactgccactgctttcgagtggggcagagagtgagcgagcgagagccgtagccagggcgagtgcaacggtgcgcctggagtgggtgtgtgagcgagacggtcgtacgaggcgggccgttattaatcagccggctgcggacaatgcaaatgagcgagtgagagcagacgatgactcaacggcggctctccgagtgagtgttatgaatcgtcactttgttggccggcactgagtaactgtcataaattaaaaatagcctttaatttcaacgcctatatgttcgaatcccatctcacatatcataatgtgctgcgctgcaccgcacccgcaatatgttagcattggctgcttgacaaatcgaatggaataccgagtaccgaatgccgtatgccgaataccgaccggctgctgctgaacttttcccacttaattttttgcacacttatacacacaggcatacacacacacacacccgcagacggcgacgcacagccaacgcggttggccaagtagcgcgtacatgtgtgggttttcgccatttaaggcgtgcacccagcacgaaagtcgctttgtacgcaatttacccaaagtgttggtcggttttcgatttttgtcgaaccaccccacgttcagtaagtctagagaaatctctttctaaacggatttccaggaaacccacggcactcacactgttcacacgctgcggtaaaaattcagagtgaccgtcgacaagcggtagtactggaacacaagtcgctgttcgctcgaaacaatcgatgtgtgccaaaattcgatcacgatattcctcgcaatcgattgtattcgctatttgccttcgtaagtcccggttagaccagcggcatgaaaagtttaaattcacttccacattcgagtactatgagataagattactgtacttaaactcaaaaagattcaaaacaacactgatcgttaagctactaagacaaatagctggccggttccagtcccacgatttaaaaacagttcactgaatagcagcatatgtaaaattccatactttcatatatttgtataatatgattcacataaggttgttgttcaaatggttgaatactacaattaagtctttacaacaagagaatgtaatctgttggaaaacaatattacaatcaaatttattaaacaaatataagattcgggtttaaatatttatactggtggaaaactttgatgggcgtaatatcgatagcaaataaaatagcgaagtcaggcaccccagctctgggtctgcagccctgaacttcaagtggcacctccaaaataacgtaaaaaagtgcaaaataatacaaattgaattcaaaatatttgcattattttatgctttgtttttctttaccatacacactgcgaagccgcagcgaaattgccggatatccgctaacatctggcgatagttggcgatcgatctatcgatagtcgctaatgttttcttacatcactaaaacttttgcaagatggagcctcttttgcttggttttaacaaatcagtagcagcacgtgtataaaaagtgccaaataattttcagaaaatgttagtatataccctagattaagcgtttgaaatgtaaaaagccgcaaggcgatcttgtgccgcatcgattccgcaactgcttagcataatttccgcgtgttttaatgcaaaaaacgcgattttaaatttctgacggtcaaaatgagtggaaaaaaattacacgcccgtatgacagtgcagggagtggg

SEQ ID NO: 24317 - DNA, 1084 bp, DROSOPHILA
aacagcgacttgtgttccagtactaccgcttgtcgacggtcactctgaatttttaccgcagcgtgtgaacagtttgaaagtaagttaccccaagaaaaaatcgtcggtgttgcggtttttctttgtctccctgccaatttcgtgtgacccccgaaacgaaagtgcgactcgccgtgcggtaaagcaacagcgatccatatccagatccatatatatcagttcaacttaatccgcacccacgacaaacaaagcaccatgagctggcaagattatgtggacaaccaactcctggcctcgcagtgcgtgaccaaggcgtgcatcgccggccacgacggcaacatttgggcgcagtccagtggctttgaggtgacaaaagaggagctctccaaactgatcagcggctttgaccagcaggacggtctcaccagcaacggcgtgacactcgccggccagcggtacatttacctttccggcacagaccgcgtggtgcgcgccaagctcggccggagcggagtgcactgcatgaagacaacacaagccgtgatcgtttccatctacgaggatcccgttcagccccagcaggccgcttccgtggtagagaaacttggagattatctgattacttgcgggtactaggagaatagatcaacacaaacacccccatcaaccacaacaacaacaacacacacacaccaacaactacaactacaacaacaacagcagcaacaaatttgataagagcgaaccgtaaatgaactaataacacataaaaagtaattattaatatttaaatttatgggaaaagaaaaaccaacggccaagaaagaatttgcggttttttgtgtgtagcagaggaaatggatcgagtaaaaatgcatatgcttgaaagaaaaaaaaaatgtcaaaaaacgcaaataactacccaactacaaaaaaattataaatttctgcattattatatttaaaactttttggtttatacgataaaaataaaaggaaaacacaaaactataaaacgccccaatcaatagttaagaattcagtcctcagctttgaacgaaatttacaaaaacaaaaaaatcat

SEQ ID NO: 24318 - protein, 126 aa, DROSOPHILA; identical to SEQ ID NO: 20334

SEQ ID NO: 24319 - DNA, 5795 bp, DROSOPHILA
ggtagagcattatgctctccttgatgtcggggaaggtctcgcacagggtgccaaagttttgggcccgcaagaagagcgttttatccaatggcagatactgaatggaatgcagcatatcgatgatatcacattgcgcgggatccctcaggttggtcagatgctgatcatagaactggagtagcttctggcagagcagttccctacgcttatccggattaggttcttcacttccgcaggaggagaaacatccgttttgaaagcgaaacatttgatagcattgtctaagtattgctctataaatcctgtcggagatctcggcaccccgataatcggccacctccacgccctcctttaagcgcacctccttgggaacattcaggaccagtactaaccaataccctggctcgggttggtagaagagttgtgtggttttctgggtatgcaaggcctggcaatcatcttcagatgtaaaagttctgcaagtacagcaaactctgtattattacccacttccctctatgtaaaaagttccataaatacccagtgaaccttatgatggcctcacttagtcccacatctttgattttcgtatttaattcaatgtcatttggatggtaaaacaaaaccttcttgtgttcctgaaaaaaattactcattaggggcgtttcttagccttaaaattgatttgccaacctcgccttcaacttggccaaaagtcgagttaaaaatgtaaaagctgcgtaacgtaatttctacgcgttgcaataatttagccatttctttccgcacagaattaaaagtatttattttggccaaaggtaaataatgaaaaggtactaacgcgtccgtgtttgccaaccagggttacattttaccaaatgtagtgtgctagtatataccaaacgtttccagtaccaaattaaaaaaaataccacacaattaataagcgaatttaaagctttttcatttattttggaatttaatagatttaataaaatttatgtcatggcgtttactgaaatttagaatttttctgatgtcttcccttttgacaatgcagaaaggaaagtggccatccataatctcctcatatttatttagagtgaagtgcgtgctaaattgtgtttatttggaaatgtatttagtttaagcctggattcctccacggagacggagcaccaagtgaagggtcgattccttctggatgttgtaatcggacagggtgcgtccatcctcaagctgcttgccggcgaagatcagacgctgctgatctgggggaattccctccttgtcttggatcttagccttaacattctcaatggtgtccgagggctctacctcgagggtgatggtctttccggtcaaagtcttcacgaagatctgcataccaccacggagacgaaggaccaagtgaagggtggactccttctggatgttgtaatcggacagggtgcgtccatcctcaagctgcttgccggcgaagatcagacgctgctgatgctgggggaattccctccttgtcttggatcttagccttaacattctcaatggtgtccgaaggctctacctcgagggtgatggtctttccggtcaaagtcttcacgaagatctgcataccaccacggagacgaaggaccaagtgaagggtggactccttctggatgttgtaatcggacagggtgcgtccatcctcaagctgcttgccggcgaagatcagacgctgctgatctgggggaattccctccttgtcttggatcttagccttaacattctcaattgtgtccgatggctctacctcgagggtgatggtctttccggtcaaagtcttcacgaagatctgcataccaccacgaagacgaaggaccaagtgaagggtggactccttctggatgttgtaatcggacagggtgcgtccatcctcaagctgcttgccggcgaagatcagactgctgctgatctgggggaattccctccttgtcttggatcttagccttaacattctcaatggtgtccgaaggctctacctcgagggtgatggtctttccggtcaaagtcttcacgaagatctgcataccaccacggagacgaaggaccaagtgaagggtggactccttctggatgttgtaatcggacagggtgcgtccatcctcaagctgcttgccggcgaagatcagacgctgctgatctggggggattccctccttatcttgaatcttggccttcacattctcaatggtgtccgatggctctacctcgagggtgatggtctttccggtcaaagtcttcacgaagatctgcataccaccacggagacgaaggaccaagtgaagggtggactccttctggatgttgtaatcggacagggtgcgtccatcctcaagctgcttgccggcgaagatcagacgctgctgatctgggggaattccctccttgtcttggatcttagccttaacattctcaattgtgtccgatggctctacctcgagggtgatggtctttccggtcaaagtcttcacgaagatctgcataccaccacgaagacgaaggaccaagtgaagggtggactccttctgaatgttgtaatcggacagggtgcgtccatcctcaagctgcttgccggcgaagatcagacgctgctgatctgggggaattccctccttgtcttggatcttagccttaacattctcaatggtgtccgaaggctctacctcgagggtgatggtctttccggtcaaagtcttcacgaagatctgcataccaccacggagacgaaggaccaagtgaagggtggactccttctggatgttgtaatcggacagggtgcgtccatcctcaagctgcttgccggcgaagatcagacgctgctgatctgggggaattccctccttgtcttggatcttagccttaacattctcaattgtgtccgatggctctacctcgagggtgatggtctttccggtcaaagtcttcacgaagatctgcataccaccacggagacgaaggaccaagtgaagggtggactccttctggatgttgtaatcggacagggtgcgtccatcctcaagctgcttgccagcgaagatcagacgctgctgatctggggggattccctccttatcctgaatcttggccttcacattctcaatggtgtccgatggctctacctcgagggtgatggtctttccggtcaaagtcttcacgaagatctgcataccaccacggagacgaaggaccaagtgaagggtggactccttctgaatgttgtaatcggacagggtgcgtccgtcttccagttgcttgccggcgaagatcagacgctgctgatctgggggaattccttccttgtcttggatcttagccttaacattctcaatggtgtccgagggctctacctcgagggtgatggtctttccggtcaaagtcttcacaaagatctgcattttggattattctgcgggaagaaaatagagatgtggaaaattagtacgaaatcagacgagtttcgttgaaattacaaaactattgaaactaactttctggctggggaataaaaatgggaaacttatttatcgacgccaactttgttgagaaacccctattaaccctctacgaatattggaacaaaggaaagcgaagaaacagggaacaaagggtagttgagaaacctttgttccgttgcttcgtcatcgttttcgtgttgcgagtgtgtgcatgtatgtatacacagctgaaatgcatgcatacacattattttgtgtgtatatggtgacgtcacaactacaagcaataagaaattttcagacgtggctttgtttaagcaacctactctatttcagctaaaaataagtggatttcgttggtaaaatacttcaattaactaaacaactaactaataacatgcacacaaatgctcgagtgcgtatgtgatttctcgaattttcaaatacgtcactgcgaatttcacaatttgccaataaatcttggcgaaaatcaacacgtaagttttatttatagatttgtttgcgttttgatgccaattcattgggaaaacgagatgcgtggctgccaatttcttattttgtaattacgtagagcgttgaataaaaaaaaatggccgaacaaagaccttgaaatgcagtttttcttgaaattactcaacgtcttgttgctcttattactaattggtaacagcgagttaaaaacttacgtttcttgtgactttcgagaatgttcttttaattgtactttaatcaccaacaattaagtataaatttttcgctgattgcgctttactttctgcttgtacttgctgctgcaaatgtcaattggttttgaaggcgaccgttcgcgaacgctgtttatataccttcggtgtccgttgaaaatcactaaaaaataccgtagtgttcgtaacactttagtacagagaaaaaaaattgtgccgaaatgtttttgatacgtacgaataccttgtattaaaattttttatgatttctatgtatcactttttttttgtgtttttcgtttaaactcaccacagtacaaaacaataaaatatttttaagacaatttcaaattgagacctttctcgtactgacttgaccggctgaatgaggatttctacctagacgacctacttcttaccatgacattgaatgcaatgccacctttgatctaaacttacaaaagtccaaggcttgttaggattggtgttttggaatttaagacccttgttagtttgcttttgaaatagcactgtcttctctaccggctataattttgaaactcgcagcttgactggaaatttaaaaagtaattctgtgtaggtaaagggtgttttaaaagtgtgatgtgttgagcgttgcggcaacgactgctatttatgtatatattttcaaaacttattgtttttgaagtgttttaaatggagctatctggcaacgctgcgcataatcttacacaagcttttcttaatccatttttaagtaaaatttgtttatactctttcggcaaataattgttaaatcgctttaagtgggcttacatctggataagtaatgaaaacctggataatatattaatacatataatccactgtgctttccccgtgtgtggccatatacctaaaaaagtttattttcgcagagccccgcacggtcacactacggttcggcgattttcgattttggacagtactgattgcaagcgcaccgaaagcaaaatggagctggagattttgaacgcgaagaacagcaagccgtacggcaaggtgaaggtgccctccggcgccacgcccatcggcgatctgcgcgccctaattcacaagaccctgaagcagaccccacacgcgaatcgccagtcgcttcgtctggaactgaagggcaaaagcctaaaggatacggacacattggaatccctgtcgctgcgttccggcgacaagatctatgtgaaggatctgggtccccagattggctggaagaccgttttcctggccgagtacgccggcccactgattgtatacttgattttctacttccgaccggagttggtgtacggcaaagctgccagtctgccgatttccctaaccacccagtgagtttgtagaaagtagtctctgaagtctttcgattgtcgacctaatcgacctcgtcgcttatgcaaactaaaacgcaacggctctgcataattatccccgaactttggatggtggttcacccagtaacccgctttcttttctcttttgccccagcattgccgccggctgctatacggtccactatgtgaagcgtctgctg

SEQ ID NO: 24320 - DNA, 2428 bp, DROSOPHILA
aagctgcgagtttcaaaattatagccggtagagaagacagtgctatttcaaaagcaaactaacaagggtcttaaattccaaaacaccaatcctaacaagccttggacttttaataatccaaaatgcagatctttgtgaagactttgaccggaaagaccatcaccctcgaggtagagccctcggacaccattgagaatgttaaggctaagatccaagacaaggaaggaattcccccagatcagcagcgtctgatcttcgccggcaagcaactggaagacggacgcaccctgtccgattacaacattcagaaggagtccacccttcacttggtccttcgtctccgtggtggtatgcagatcttcgtgaagactttgaccggaaagaccatcaccctcgaggtagagccatcggacaccattgagaatgtgaaggccaagattcaggataaggagggaatccccccagatcagcagcgtctgatcttcgctggcaagcagcttgaggatggacgcaccctgtccgattacaacatccagaaggagtccacccttcacttggtccttcgtctccgtggtggtatgcagatcttcgtgaagactttgaccggaaagaccatcaccctcgaggtagagccatcggacacaattgagaatgttaaggctaagatccaagacaaggagggaattcccccagatcagcagcgtctgatcttcgccggcaagcagcttgaggatggacgcaccctgtccgattacaacatccagaaggagtccacccttcacttggtccttcgtctccgtggtggtatgcagatcttcgtgaagactttgaccggaaagaccatcaccctcgaggtagagccttcggacaccattgagaatgttaaggctaagatccaagacaaggagggaattcccccagatcagcagcgtctgatcttcgccggcaagcagcttgaggatggacgcaccctgtccgattacaacattcagaaggagtccacccttcacttggtccttcgtcttcgtggtggtatgcagatcttcgtgaagactttgaccggaaagaccatcaccctcgaggtagagccatcggacacaattgagaatgttaaggctaagatccaagacaaggagggaattcccccagatcagcagcgtctgatcttcgccggcaagcagcttgaggatggacgcaccctgtccgattacaacatccagaaggagtccacccttcacttggtccttcgtctccgtggtggtatgcagatcttcgtgaagactttgaccggaaagaccatcaccctcgaggtagagccatcggacaccattgagaatgtgaaggccaagattcaagataaggagggaatccccccagatcagcagcgtctgatcttcgccggcaagcagcttgaggatggacgcaccctgtccgattacaacatccagaaggagtccacccttcacttggtccttcgtctccgtggtggtatgcagatcttcgtgaagactttgaccggaaagaccatcaccctcgagatcagcagcagtctgatcttcgccggcaagcagcttgaggatggacgcaccctgtccgattacaacatccagaaggagtccacccttcacttggtccttcgtcttcgtggtggtatgcagatcttcgtgaagactttgaccggaaagaccatcaccctcgaggtagagccatcggacacaattgagaatgttaaggctaagatccaagacaaggagggaattcccccagatcagcagcgtctgatcttcgccggcaagcagcttgaggatggacgcaccctgtccgattacaacatccagaaggagtccacccttcacttggtccttcgtctccgtggtggtatgcagatcttcgtgaagactttgaccggaaagaccatcaccctcgagcatcagcagcgtctgatcttcgccggcaagcagcttgaggatggacgcaccctgtccgattacaacatccagaaggagtccacccttcacttggtccttcgtctccgtggtggtatgcagatcttcgtgaagactttgaccggaaagaccatcaccctcgaggtagagccctcggacaccattgagaatgttaaggctaagatccaagacaaggagggaattcccccagatcagcagcgtctgatcttcgccggcaagcagcttgaggatggacgcaccctgtccgattacaacatccagaaggaatcgacccttcacttggtgctccgtctccgtggaggaatccaggcttaaactaaatacatttccaaataaacacaatttagcacgcacttcactctaaataaatatgaggagattatggatggccactttcctttctgcattgtcaaaagggaagacatcagaaaaattctaaatttcagtaaacgccatgacat

SEQ ID NO: 24321 - protein, 719 aa, DROSOPHILA
MQIFVKTLTGKTITLEVEPSDTIENVKAKIQDKEGIPPDQQRLIFAGKQLEDGRTLSDYNIQKESTLHLVLRLRGGMQIFVKTLTGKTITLEVEPSDTIENVKAKIQDKEGIPPDQQRLIFAGKQLEDGRTLSDYNIQKESTLHLVLRLRGGMQIFVKTLTGKTITLEVEPSDTIENVKAKIQDKEGIPPDQQRLIFAGKQLEDGRTLSDYNIQKESTLHLVLRLRGGMQIFVKTLTGKTITLEVEPSDTIENVKAKIQDKEGIPPDQQRLIFAGKQLEDGRTLSDYNIQKESTLHLVLRLRGGMQIFVKTLTGKTITLEVEPSDTIENVKAKIQDKEGIPPDQQRLIFAGKQLEDGRTLSDYNIQKESTLHLVLRLRGGMQIFVKTLTGKTITLEVEPSDTIENVKAKIQDKEGIPPDQQRLIFAGKQLEDGRTLSDYNIQKESTLHLVLRLRGGMQIFVKTLTGKTITLEISSSLIFAGKQLEDGRTLSDYNIQKESTLHLVLRLRGGMQIFVKTLTGKTITLEVEPSDTIENVKAKIQDKEGIPPDQQRLIFAGKQLEDGRTLSDYNIQKESTLHLVLRLRGGMQIFVKTLTGKTITLEHQQRLIFAGKQLEDGRTLSDYNIQKESTLHLVLRLRGGMQIFVKTLTGKTITLEVEPSDTIENVKAKIQDKEGIPPDQQRLIFAGKQLEDGRTLSDYNIQKESTLHLVLRLRGGIQA

SEQ ID NO: 24322 - DNA, 4814 bp, DROSOPHILA
gtagtagttctttcgctgacgctgttcccgaacgtgctctctcagcagctgctgcacatactcatcttcggtgatagtgggatcgtcgctttccgtgtcgctcaagaggagatcgtatagccactcccgatcgctggtcagatcgttgaagttataaagctgtgctttgacactttgtcgctctgttgggggaaattttaggaggtgtactaaactgctccagataccaactcaccttccttgctggccaacagacgactcttccgcttgctggactgtttcatccggaccacgcccacggtggaggagtcatcagagtcttgtacatcgtgttccctcttgaccacatgctcgtcgtccgtttcctcgtcgctactcagtggcttccgcagacttcttttggccatgttcatgaagggtcgcatgttgagtgccgcctccaagcgctggatgtgcagcggctccgccatggcacgggggcgtggctggggtgccggcacgggcttggcttccatggcagcagcgattttagtcagcttttacaaacaattatcacgtaattttgcttttatgcggcatgcacagaggtaaacaacagtatgaccgcagcgagatcggcgaaaaaataccattgagtaaccctcatatcggcatccaacgccattcgcacagtgggcttgactaccacaaatataatataattgctatccccataaatcgttattaaaaaagttcacaaaattacaaattttaaaatacataaatgcatgaaaaaagttatgtatattacactgtttttgaacttaataacatattttcagaggaataaataggaagcagctctacctatatacgttttccaacactaacattcagctgttagaggttttgttttgttttcagtttgtgcagttggagacgatgatttaatagtctgtagggtcgtgagacgtcgatagttatcgatgtttatgttgccagctgtgcggcactgggatgtcaactgccagtaagaaaagaaagcagttcttagcaagttaacaaataaataaatgacaaaataataacgaaatatataataacaaaataaataacgaaaatatttgcttttgtgcaaatacgctcacagaaatcgataaaagtctcgccgttgctgcaattccaagcaaatcaggcagtagcatttgtgatgtcctggtcaagtgcactaatcaaagatatctcgaaaccagaaaatttgatcatttcgtcagaaatcgcagtggtcatagcagacaagtttcccaaggcgcagcatcactacttggtgctaccattggccgacattcccagcatctttcacgtgcgcaaagattgtgcttccgtctccatcgttttactattccaagtaacatttttctcgctccgtttagttgaaccggagccatctgtcgcttttggaggagctgcatctgctggccaggaacgttgtggaagtgaaaggagtccggtggcaggacttcaacgtgggatttcacgcggagccgagcatgcaaaggctccacctgcacgtcatctccaaggacttcgtatcaacaagcctgaagaccaagaagcattggaactcattcaacaccgagctgtttgtgccctacacaagtaaggctattagaacacggcgcaggctacaggcttcatgagcgaaaaacagataaatcgaatgatctagttagaaaatagagatttgccggcggtgccaatttttatgagcattcccatatagaaagtgtggcagtattagctaatctatttgaatttttttatatatattttttttttagagctttacgcccagctggagaaggagaatagcatttcgcgactcccgaaatcactaaaagacgagctgctggccaagccactcatttgtaatcagtgcgagtttgttgcaagaaatttgccatcacttaaggggcatctggtggggcaccttcaagatccgaaatcagtttgccagcgagtccgactagggaaccagttctttcccacagctggttacagaacgtcagaacttgcatattgtttcgatttcgtggatttctacgaatacaaaaagcaaatggaggtggataaattggcatatatccgagatgagctgcagcgcaagctaaatgataagaggaacttccttatcgagagtgaccgggcggtggtcatgaaagcggactatcctaaatcgcaataccactttagggtggtggccaaggaagagttcagggatataactcaggtgggttagtgcaaagacattagaaatttttctagtgtgtgattagtggcaggaggttgaattgactatttatgctccttccccataatcagctaaccgaagcgcagctgcccctgctggatcacatgatggatctggcgaatcaaatcatcgagaagcagaaacacctggagtcgcgtaattttctcatcggtttcaaagtcaatactttctggaatcgtctaaatctacatgttatttctaacgacttctattccatggccatgaaacgtataagtcactggaatagtttcaatacggaactatttatgccctttcaaattgcgtatatgatgctcagtgttcagggatccattgaatccatttcggaggagacgtacaataatttgcaagagaagacgccattgcgatgcaaccagtgcgaatttgttactaatatgttgctggatctaaaagctcacctgtatcagcactggcagcgcaaggaggacgagcgcgatcagaagaaaaaagtcgataaaataatccaaatgatatctgagaccaaactggatgaggcagaggcaaagccgaagctgttgaatgaagaggaacctattcaagctcagcccgttgccgctatcgcccagtatcccaatgaacatctaggcaagcccttaacgccgcaacagcagccgggcaagcagcaggcccagaatgtttacgacaaaaacattaacgggccttctgtgaatatgatgaatcagaacaatcccaacaatccgttccggaacactccgcaccttaatagacaatcacagaaaccgccgcatccccgctctgggccccgtggaccaatggctccttggactggtccgcgctttccgtgtcatcaacagcagaacagattcaggcctccaggatttaacgcatgtcggcaaccttatccaccctatcattcaggccatcagcaatttccgaatgcttcatcagtcggcggcggtcaaactgggctgccaggtcagggacagggacctagaccgaaatggaattcaaataagatattcaatcaacagaaccgccaaaatacagtccaagcccagccacaagcccagaaccaacaaaccaaccagcagcagattcaaaattcgaataaaaaccaaactccaaaaaaaaagccatggaaaaatcgcctgcaacctgtaggcaaagttcagaatcaaggcggagcgaatcgcgatcccgcacctccaagtaactcgaaaccatcttaggatgatttatcctattgaaacaattcctaattccaaattcccaacagcagttggtaaactaccagaaagactttagatccacacaaatcgttcccaaattggcattttgcaataaacaagatgaaggcaggaagaaaaattaagaaatcacttgggattctacaaaatcaaacgatttcaaaacagcgcaactcctagaatatttttcccatatgaattttttttctgtatgtcatattttaaaaataaagttcttgtgagctcttgggagttcgcgaaaattttgtaaagcagatatcgctttaattgtcactttgccacccctccacccattcctgcgctcaattaaagtgctctggccaactggaaaaacagccacccacggctaattaagcagtcaccgaggagaatcgccagcatcagcaatgctcctcctccagcgccagttggagctgttattaaattatgattctgaattcgaaaagtcgacgaagtttgtcgggtaatcagtgtcccagtgggagagggataactttacagtggatggccgcttgaattggataggtataccaaaaaatgttaaaacaaatttctttgttagtaatagttttaacatttagacaccgaattggacttgaatggtttaagctataattaggcccagttaagctcattttactccctctaattatattatgttctaaaatgactgcgcctcttaacaatttaaactagttaattagttaatttgcagtaaatgtcatatgctgggctcatcagccattcattttacactttacaaggcggaacatagggctaacagtgcataaagccacttgccgttcttagaagctaatacacatcggaccataaacaacattcaaggcaacatccctgcgatagacgaggtcctcgtgtgtttctagcaggtatttaaattttctagtgggttacagtatcaaggtgtcccaaagctagcagtggttccaaaacgacagctccatcgatatgcctcagggttgaacttgctaccaccgttgggctccagtttcggtgagcaatcaacagctccattaaagctatctctcccagccttgccacctgttatgtctcgagcaacaggaggccattcataaaggacgttacttcggagcagtggaaagcagagagaaaggctcactggcaggactcgctgtgagtaccactcgacttgagttctttttccatgcgcatgcccgcagacgaaagctttatagtatggacaaggaagaggtccttttgaggggaaatgc

SEQ ID NO: 24323 - DNA, 2597 bp, DROSOPHILA
caactgccagtaagaaaagaaagcagttcttagcaagttaacaaataaataaatgacaaaataataacgaaatatataataacaaaataaataacgaaaatatttgcttttgtgcaaatacgctcacagaaatcgataaaagtctcgccgttgctgcaattccaagcaaatcaggcagtagcatttgtgatgtcctggtcaagtgcactaatcaaagatatctcgaaaccagaaaatttgatcatttcgtcagaaatcgcagtggtcatagcagacaagtttcccaaggcgcagcatcactacttggtgctaccattggccgacattcccagcatctttcacttgaaccggagccatctgtcgcttttggaggagctgcatctgctggccaggaacgttgtggaagtgaaaggagtccggtggcaggacttcaacgtgggatttcacgcggagccgagcatgcaaaggctccacctgcacgtcatctccaaggacttcgtatcaacaagcctgaagaccaagaagcattggaactcattcaacaccgagctgtttgtgccctacacaagtaaggctattagaacacggcgcaggctacaggcttcatgagcgaaaaacagataaatcgaatgatctagttagaaaatagagatttgccggcggtgccaatttttatgagcattcccatatagaaaagctttacgcccagctggagaaggagaatagcatttcgcgactcccgaaatcactaaaagacgagctgctggccaagccactcatttgtaatcagtgcgagtttgttgcaagaaatttgccatcacttaaggggcatctggtggggcaccttcaagatccgaaatcagtttgccagcgagtccgactagggaaccagttctttcccacagctggttacagaacgtcagaacttgcatattgtttcgatttcgtggatttctacgaatacaaaaagcaaatggaggtggataaattggcatatatccgagatgagctgcagcgcaagctaaatgataagaggaacttccttatcgagagtgaccgggcggtggtcatgaaagcggactatcctaaatcgcaataccactttagggtggtggccaaggaagagttcagggatataactcagctaaccgaagcgcagctgcccctgctggatcacatgatggatctggcgaatcaaatcatcgagaagcagaaacacctggagtcgcgtaattttctcatcggtttcaaagtcaatactttctggaatcgtctaaatctacatgttatttctaacgacttctattccatggccatgaaacgtataagtcactggaatagtttcaatacggaactatttatgccctttcaaattgcgtatatgatgctcagtgttcagggatccattgaatccatttcggaggagacgtacaataatttgcaagagaagacgccattgcgatgcaaccagtgcgaatttgttactaatatgttgctggatctaaaagctcacctgtatcagcactggcagcgcaaggaggacgagcgcgatcagaagaaaaaagtcgataaaataatccaaatgatatctgagaccaaactggatgaggcagaggcaaagccgaagctgttgaatgaagaggaacctattcaagctcagcccgttgccgctatcgcccagtatcccaatgaacatctaggcaagcccttaacgccgcaacagcagccgggcaagcagcaggcccagaatgtttacgacaaaaacattaacgggccttctgtgaatatgatgaatcagaacaatcccaacaatccgttccggaacactccgcaccttaatagacaatcacagaaaccgccgcatccccgctctgggccccgtggaccaatggctccttggactggtccgcgctttccgtgtcatcaacagcagaacagattcaggcctccaggatttaacgcatgtcggcaaccttatccaccctatcattcaggccatcagcaatttccgaatgcttcatcagtcggcggcggtcaaactgggctgccaggtcagggacagggacctagaccgaaatggaattcaaataagatattcaatcaacagaaccgccaaaatacagtccaagcccagccacaagcccagaaccaacaaaccaaccagcagcagattcaaaattcgaataaaaaccaaactccaaaaaaaaagccatggaaaaatcgcctgcaacctgtaggcaaagttcagaatcaaggcggagcgaatcgcgatcccgcacctccaagtaactcgaaaccatcttaggatgatttatcctattgaaacaattcctaattccaaattcccaacagcagttggtaaactaccagaaagactttagatccacacaaatcgttcccaaattggcattttgcaataaacaagatgaaggcaggaagaaaaattaagaaatcacttgggattctacaaaatcaaacgatttcaaaacagcgcaactcctagaatatttttcccatatgaattttttttctgtatgtcatattttaaaaataaagttcttgtgagctcttgggagttcgcgaaaattttgtaaagc

SEQ ID NO: 24324 - protein, 139 aa, DROSOPHILA
MSWSSALIKDISKPENLIISSEIAVVIADKFPKAQHHYLVLPLADIPSIFHLNRSHLSLLEELHLLARNVVEVKGVRWQDFNVGFHAEPSMQRLHLHVISKDFVSTSLKTKKHWNSFNTELFVPYTSKAIRTRRRLQAS

SEQ ID NO: 24325 - DNA, 4600 bp, DROSOPHILA
gcaatacatcctaaatcaatttattaattttagatgctacgaaaaggaaacaagaaagaaaacgcaggtggacagctaaaggaactcacggatagattgacaagtataagtatatttaaatatatatcagttggatttaaaaaacacatttacagaggcgtcttcaatgatatgtcttgaaatatgtgtatttgtgcttctaagttggataagtccacggatataatatatttggtaagttatatttatcgcactaagattacttttgatttttatttggactttggtgaataggtaaagacagcgatttaaaattggagttagttagtttcccgtaaagatcgatgtaaagtaaatcgtttgtcggttaatttgttgtattcgattattcaatagctctatacatatatagaaatatatatatatatagacatacactgcgcgtcaccaggttagcgcccctttatttagatgtgaaatatttagaaaactgttttagcgagaggtttggaaattttttccattttttttccctttaaagatgaacaattctataaatgaaaagtttatatggaatacagtttgttgtttctagatttgtatttaaatacagaacataagaagaaacggagctatgcaggggcgctaatcttatgacgcgctacataatattttctcattgcacgaaaatctatcaatgttattgttttttgttcaggttttgttattcagttcctgagaagaaccgttatctttttaatgctgctttgttttactttcggcgaaaaattgggcacgtatattgcatcactaactatggcttagtagttgaaaaatattgataagaaatacatacatacatatcgaatctttgccgttcgattattggtgaacatctgtatcggttcgtgttttttaatttaagctatttaatatattattcaaactttggattcctctctcgacaatcaacatgcacatagagcgaactcgggtagcctcaatcgtagcttagggaaatggccgatttcggtgtgggcagcggcgatgtggtgtccacatcctcgtcgtcgttctcctgcgagtcctccggttctcccaatgcgtggacaaactcgtagaagtcaatgcgcccgtcgccgtccacgtccacctccttgatcatgtcctcaactagatgtgcgatgtgggattacgaaacaatacacttgcaacgacgatatgggcacttactgtcctcctcgtcgagatcctcgcccagacactgcagcacggctcgcaagtcagaggctgttatgtatccccggttgtgcttgtcgaagacgcggaaggcgtcgcgtagttcccgctcctcctgatcggcggaggatagacctgacttatcctcgtacgtcatgtttgacaggatatcaacgaactcctcaaaactgacgttcccgtcccctgaaagccattgcataatgaggattttttgatgatttataaatcattataaaataaggttagtaagtcaaactttgttggtaacagttcctcgttctcaactgccatcgagcacttaccgtccacgtcgatctcctgcaacatctcctgcagctcttctactctggcaaattgtcccagtgaccgcatcactgtgccgagctcctctttggttatgcagccatcgccatccttgtcaaagagccggaaggcctcccggaattcccgcatttgtcccttggagatgcagcggcgtttatgcagggtctcgccgtcgattaggttgggtccgtcgccaattcccagctccaagtccgaggatgcatagcaaatttgacgggttttcgtctttcgtctgctgcggacgctcaaggcggttcgggcagaaggtcgacgtccctccggtttcgaggactgttcgtagtcgtcgtaggattcttcctcctcttcttcctcctccccatcttcctcccgctccccctccccttccccatcgtagtcgtagtcctccagctccgccccatgaaggtttctctgagcgtagctcacccgcgtgcccctccgctgacccactttaatgccttcgcaggagctggagtccgtgtccgcatccgcctgctctggatgcgaattggcagcacttcgttgtggttgcttgtccgtcaattttttccgcggcctctgacgacactgctctgtcgattgttgcttttcgctgctgaggtggtggccctcgcctcctggttgcccatcatcctgcatcgcctggttttgagtctcctgatcctcaccttcagcgactaccgctgacgcctgctcctcgtcgggttcatcgccactcaccgccgcgtttctcgtctagaatttaaagcacactagtgttaaacagtttttaatgtttaccaaatttgacccacaaacagattactttaatttattgtgtcctaatttgtttgtaggctatgctaagtcttttttgcatatgtgaattggttattgaggccaaatggataaatggatttgctgtttatttatttatttatttttttcttgtttactaaataattaaacaaaactcgttccaagtttgcttaataagtagaagtagaatttttatctcaactgcactcaccattagttggcgaaactcgcgggcaattgttgaaccagttaaaaatttattaactgccgtgaaaagccgttttccttccaacgtggcggccttcctcccgcttcagggaattcaggggcggaaaagaatcctcctgactgctttcggtataaaggatatgcaaattcccaattccaatcgattagtatctgaaaaatagagcagcatgcggggccacatgttaattaagcaattaatattgaaagcaatttgcaaattggacgcgtttgcaaatgacagctgcaaagtgtcaaagtgaccgacgccacacagaaactgaaaatgttagtgaatttatttaatttattcaatgacttcatgtcatatctgaaaaaatctttggagttatcctccaggactttggatgcaaataagcaggattataccaagaaaatatgtttatgtaattgagtattgcaagtgtcattccctcgtagaatgcaaacatagctcagagtcgtagcttaaatgtttaattgagttaataataacaacaccctaaatggcataatcagtgtaataatccatttgatttgctcacattcacgtcacttttcgaggccaacaataatggcataaaaagctgcttgtatgtgtggaattcaaaaatgctctatattatgctatatataacatatgatatgctatataatatataactatatgctgtatataatatatattcttctatgcgccctgtgtggtagtattcggtacatcacagctgtaccatataaagtgcactcgtatttaaattgaaatggtgcaacggcaaaggaattttttgaattaagcgacagcgtttaacaaaatgtaaataagtccaccagcttggtatacaaagaggaaaagcggacaaggcgcttagtgggcgggttgggaaaagggggaaatccgattatcactgtggccaaaggacagccggggggattcctctttggagtcattttgtgcttcccacgttcggtttaaaattccatttcgaaggctgtgcgtgggcagtttttagtatatttattttcattgcgaagcacaaatggccaggaaggatgtggtcacatgcgggtgaaaaccgcaataaaaatgtccgaaaaggaagtgcccaggcgagcacaaggacgccccaggtggccaaggacatttgacagcacacttctagcagactcacatttgaatttaaatcgcctttcgctaaattcctcgcattgcatatgtacgtccacacaaagtgcaaactttctgacatgacagataaatgaagacaacaataaccgccgcccattttccctattttcccacattgctagcatttttgcattagtccatgcgatgctctgcataacacttttatgcctgttatatttttgttgtcgctggccctcagcgaagaaaccaaaaaatagaattggcttacttgggtgagtaaaaacaagagacgtgccagaagacgagccgaagacgatttaatgccaaagatttctcgcatggtgtcaattgatcaaaaataatatagatttaaagtctaagaacttcttctaaggtgaatttacaatgtgcacaagagggctgcataacaccattctctttgtttgcaattagagtatctattcgttttactgcgtattcaggatacatgccattcagttggtcgcgttctctttgcgttcacgacagcagtagccgtgtgaccacagagaacgtaaatggataagaacgcccccacgcaatcaattaaagtggacaaggcacgaaaaagtaaatatgatttggcaggattcaaaactcttggcctacagcttcggtctcttctccaaaattgccaacgctgcgtatgcgttatgtttgcattccaatgaatggatgggagggatgttggttctccatgtttatggatgtttttttttttcgttcttttaagcatgtaaaacggtggcaagggaaacacaa

SEQ ID NO: 24326 - DNA, 1281 bp, DROSOPHILA
atgactccaaagaggaatccccccggctgtcctttggccacagtgataatcggatttcccccttttcccaacccgcccactaagcgccttgtccgcttttcctctttgtataccaagctgacgagaaacgcggcggtgagtggcgatgaacccgacgaggagcaggcgtcagcggtagtcgctgaaggtgaggatcaggagactcaaaaccaggcgatgcaggatgatgggcaaccaggaggcgagggccaccacctcagcagcgaaaagcaacaatcgacagagcagtgtcgtcagaggccgcggaaaaaattgacggacaagcaaccacaacgaagtgctgccaattcgcatccagagcaggcggatgcggacacggactccagctcctgcgaaggcattaaagtgggtcagcggaggggcacgcgggtgagctacgctcagagaaaccttcatggggcggagctggaggactacgactacgatggggaaggggagggggagcgggaggaagatggggaggaggaagaagaggaggaagaatcctacgacgactacgaacagtcctcgaaaccggagggacgtcgaccttctgcccgaaccgccttgagcgtccgcagcagacgaaagacgaaaacccgtcaaatttgctatgcatcctcggacttggagctgggaattggcgacggacccaacctaatcgacggcgagaccctgcataaacgccgctgcatctccaagggacaaatgcgggaattccgggaggccttccggctctttgacaaggatggcgatggctgcataaccaaagaggagctcggcacagtgatgcggtcactgggacaatttgccagagtagaagagctgcaggagatgttgcaggagatcgacgtggacggggacgggaacgtcagttttgaggagttcgttgatatcctgtcaaacatgacgtacgaggataagtcaggtctatcctccgccgatcaggaggagcgggaactacgcgacgccttccgcgtcttcgacaagcacaaccggggatacataacagcctctgacttgcgagccgtgctgcagtgtctgggcgaggatctcgacgaggaggacattgaggacatgatcaaggaggtggacgtggacggcgacgggcgcattgacttctacgagtttgtccacgcattgggagaaccggaggactcgcaggagaacgacgacgaggatgtggacaccacatcgccgctgcccacaccgaaatcggccatttccctaagctacgattga

SEQ ID NO: 24327 - protein, 426 aa, DROSOPHILA
MTPKRNPPGCPLATVIIGFPPFPNPPTKRLVRFSSLYTKLTRNAAVSGDEPDEEQASAVVAEGEDQETQNQAMQDDGQPGGEGHHLSSEKQQSTEQCRQRPRKKLTDKQPQRSAANSHPEQADADTDSSSCEGIKVGQRRGTRVSYAQRNLHGAELEDYDYDGEGEGEREEDGEEEEEEEESYDDYEQSSKPEGRRPSARTALSVRSRRKTKTRQICYASSDLELGIGDGPNLIDGETLHKRRCISKGQMREFREAFRLFDKDGDGCITKEELGTVMRSLGQFARVEELQEMLQEIDVDGDGNVSFEEFVDILSNMTYEDKSGLSSADQEERELRDAFRVFDKHNRGYITASDLRAVLQCLGEDLDEEDIEDMIKEVDVDGDGRIDFYEFVHALGEPEDSQENDDEDVDTTSPLPTPKSAISLSYD

SEQ ID NO: 24328 - DNA, 4553 bp, DROSOPHILA
ctaattccatatcttgccattttcatttccgattaatttcagctatccccctaacttattttcgttaagggaataaggatataagaagttatcttatgtgatattgccaaatattgttaggaaattcgttgatttcgttactcaataaaaccaagtttgttttaattttttaaatagtattttttattacaatcatttaaatatttgttcagttgtagctgttttcttgctatataccatttaaatttcgtagttgaaatattttttttcgtttcttttccatcataatttttgtaagttgctacataatgttacttattctaaacacttgctgtcttttagcttgcttttgttctttttgagtgctaccatatagagttatcttagttttcgagtctgaactggctaaatactagggttataatttgttttataaatggttgaaatcagattcgtttcagtatacaagtttagccaacgcattaaatgcaaatattttaactcatcacttacgagctctacagaatttcttagactgtgggtcacacatagattttatgcagttttggtttaaatgtttttaaacatttagtatgtaatttgttaggtgtatgaactggtttgctttgttttctttttggaatggcacatcaatgtgataaaatttggcctaaaactgcacaagtctgctcttgggactttatactacttttaggctatttgggatatgataagtgttaagtagttacttagttggctaaatattcaattggattggggattggatttggtttcgggttgcggtttgcttgcgtaagccgatgtcctttgtaaatgctatgacacacagtattactttacatggcctaactgctaaactctagggtgttgtacaactatcacactgtaatacacaatctctcacgcacacactcgtttgcactcacacttagacacctagctatgtacacggcccatctatttacaagggcccctggccctataccattcccttggacatcatgcgaacggtgttcttgagggcctgccgtttgttgcagaaccagatccggatcacttcccgctcgtatcccagctgatgggccagtccggtgatttcggtgcctgttcgtaggaggaaggagagttagcaatggttacggacaacttgacttcttgtaactgaaagttaccactcacccgaaggatgcgtgttccgctcgaagtgggcattcaggagctccagagcctgcggcgtgaaggatgtgcgcctcttgcgcttcttcgacggctccacgccgatatagtcggttaggtggttctgacccgatttatagcggttccagtggctaaatggagagaagagcacaagttagtcgggcttgtcgcgaaatggcgcccaacgtggggcaaaacggcgcgtggaactgcctccatactctcacctctcttcggcctccttcatccagcgctccagcacaggcttaatcttctgtgcgctctttggtgtgatgtccagcttctcgaacctgcggttgggagtggtattagggaagaggtatgtagagaattagatcctggatcagatcgctcgatgggcttgtgcaagcccgttataacgcaaaagaaacgtaactaaagtgccaggacattgtcaattagcattctctttcggttctcttttcgggtacgctctttcttaatcgttcagtggagaaattttgtttcacttcgcttctgctgagctaatgaaactctgctcgttggcaatgccctggccaattttgggagcgcatttatgcaaattaaacgtgaaacaaaagaaatacatggcgaaatgaacaggttaatgagccttgcactttagttaggtttctcttggactgcacacacacacacacacacagcgtacacacaccctctcaaggaggcacacatacatgttctgctgctgcgtcgacagttgagcggcgtacatctgcgcagcgagtgcactgcttgcattcgataggtggcattcgacattcgacagttggcatttgacattcgacattcgacattcgatattcggttttcagtttgcggtgggtggcattcgacattcgatgttgagagagagaggagttagatagagttggcgtttgaatcgaaaaaataaacaaataaaataaataaaattaatttagcatttaattggtttgttgcttgtttttcgtggttaatttagcagttttagatttgctagaaaatgtcctggcactcttcgaaaattggttccagaagtatacgaaaaacaaattaagggaaacataaatatgtggacttaagcaaaaaatattgttgaggaaaatataataaaacacgattgcttaaaggggaaagtagccaaaatgggtgtcctaatgcggttcacctgcctttatcactttaaataaatcaacatagtcatagaaatttttcgtttttaaccgtttgttcttgaacatttttagttatcggttaccaaaagaaaaaaaaactgtctctaagtacgctgcaattaatttcgatatggaaattccaagatggtgtaattttggtggtatactttagattaattttaaagcttttaaatcttctgatatccttataatggataaaatgttatattcggtttttttattttaaacacctaaaactgtaaataatgatagtacctaaacatatgtatatagttcgcactggattatagaccattataaatcaaaattcaagtagaattcctactctcgtgttgtttttcttgctcaaatcttagacgactttgtccatgcatatctcacctgcaaatggcactctggctgtaggccggaccctcggtcaccgataaggcctggcccacttgggtttgtgtgagtcccagggacaggcgcctcagcttgaaggccttggcgaactctttgatctcgtccagatcaatgccgtccaccacgttggtagtggcctggttgatggtgggttcatctgggggaagataggagaacaaactcggttagtagaaactccgactctgtcgtgcacgcttaaagtctagctagtaaatgggaaattggcttagctatccgtcttcgccgtaaggccatgcaaatgacttcataaattgcagccccgtcttggtcttaattacagttaattgcggtaatggcaaaacattattgcagtgcaggccaggtaaattgataaagcacacgccgaagacacctggcaggttgttcttgtctattaggcaagtgcgaaactcacggcttttatctgcctaatttgttagtagcaaggctgcaggatgcaaactactcgcgtagaattttgatttatttattaatgatatgcaagaagggaaagacaagggtcccaggcagcagcaaccaacagccaacagccaactgcaacttcaacggcagccttgtgttttagcggtaattaagatgcgagaacggattggaggcgatggatgcggatgggaaggtatagggacgggatgccagggtaaaggatccgcatgctctggcagcatcctttgcgggccgtaactcaagctgtcgtcgcagctagctggctttgttcgcccggtgttgttgtttgctgcagcgtttgaaatatgtcattaaatgcggaagacatcttaagtttttgtatgcatcaattagtagtaattaagccgcatattgtctgcaatttgtatgcgcaaacgatgcgatgtcgcaatcgagactgctcgaggtggaagtcatccaatcctgatgactccactctaatgggtgctgggggcttgtcttcagcttgtgctgattgcatttttaatgcatccaaaagtttcaattaaggcccccactcttgcacggggatggggaatctaatcaattgaatatgccctaacaagagagtcctaccacgtctatagggtgcccataatctgcccctagctaatcccatcagttcggcttagatgtctcaattccagcctgccgtctagcctcaaaacctaatccaatcccagatgcggagcgtgacaacgtcaacgcatctgctaatttgcccaacactttcggttgacatctctcaactttgggcaatgcgttctcactagtcttgtttagctgctcacctaatccccggccccggaacgctgcatcaattatgaatcccgtccgtcgcaggaagtcgtgtaaatgcacgcgaaacttttcgcacacacgtcagaagacacgagacggcgggtggagtcgagtttcaagttgattttcttttggaaaattacataaagtgcagtcaacttgttagggcttttggcactgccagcaaagttggctttcgacgaaaatttcgttaattaatgttggccaaaaagttgattttcgccccgcctttgtgcgcatatcactcatacgccgtgttgcgctcgagtgtggctcttaaaatatcaaatcatcatcagctcgctgcggaccccaattatatgtgtacaactgcggagggcactcgagtttcgtgcctccggctcattgggatcatta

SEQ ID NO: 24329 - DNA, 618 bp, DROSOPHILA
atgctgccagagcatgcggatcctttaccctggcatcccgtccctataccttcccatccgcatccatcgcctccaatccatgaacccaccatcaaccaggccactaccaacgtggtggacggcattgatctggacgagatcaaagagttcgccaaggccttcaagctgaggcgcctgtccctgggactcacacaaacccaagtgggccaggccttatcggtgaccgagggtccggcctacagccagagtgccatttgcaggttcgagaagctggacatcacaccaaagagcgcacagaagattaagcctgtgctggagcgctggatgaaggaggccgaagagagccactggaaccgctataaatcgggtcagaaccacctaaccgactatatcggcgtggagccgtcgaagaagcgcaagaggcgcacatccttcacgccgcaggctctggagctcctgaatgcccacttcgagcggaacacgcatccttcgggcaccgaaatcaccggactggcccatcagctgggatacgagcgggaagtgatccggatctggttctgcaacaaacggcaggccctcaagaacaccgttcgcatgatgtccaagggaatggtatag

SEQ ID NO: 24330 - protein, 205 aa, DROSOPHILA
MLPEHADPLPWHPVPIPSHPHPSPPIHEPTINQATTNVVDGIDLDEIKEFAKAFKLRRLSLGLTQTQVGQALSVTEGPAYSQSAICRFEKLDITPKSAQKIKPVLERWMKEAEESHWNRYKSGQNHLTDYIGVEPSKKRKRRTSFTPQALELLNAHFERNTHPSGTEITGLAHQLGYEREVIRIWFCNKRQALKNTVRMMSKGMV

SEQ ID NO: 24331 - DNA, 3618 bp, DROSOPHILA
cgcgattgaatcacgaatcctagcattaagtctgcatggctaggtgttccaaggtgttccacctgcactgcatcgagctccaaacataatcgactaattcgagctgcgcgctgttcgtgtagcacagtgaaagaggtggtgcggtcttttgtttacctttaagctgttaagtgaagtgtgaaaatagtgcaaatcttgaataattgtgtataaagaaccaaaactttgaataaaaatatatttggcgccaaatcgaactgcagccctggtcgtgagcgatggcagtgcggaaaatcatcgcacgaagatcgccatggcaacaaggaccaaaaaataccaaaaccaccacagcagagacggcgtcggcgcgggtgcgagcaagacggcagtcgcgcagagagagtgcgtggcactttagccagggctgggcaaaccacaaattggaaccagcgaaaaataccttcgaaatttgcaagctgagtgtgacaagaataaatagttcggccaacaaatcggcttcacagtgaaaagtgcaagcaaacaaaaagtgagaagtgcgcgatgtgccatccctggtgtaaacacgcacacacacacacacacacgcgcaggcggcacacaggtgagcaccagtagcgcagtcgacagcagcagcggcgcaggcagcggcagaggcagagcgcccagagcagatacttcagtttgcgtcgattgtgccgattgagattcagattcagttccagatcacaacccgaatcggagccgccagtgtgtgccagacgcaacgcaacggaacggaacgcaaggcaacgtctacgtcagcaaaatcacgctgcaagtcaccagttggccggaagattggcgaaaatcctgtgagtaaaaatggcaagcgtgcaacaacagttttgccagcgtgtcgcttggagtctcccagtgtgcgtgcgtgtgtgtgagtgagtgggagcgcgcagccgtgtgcgtgcgtgtgtgtgcgagcgtcggtgagcagtgccaacaaggcaaaatgtgtgtttgctgttggggagcatcttgaccaaagtagtcactcctcggagcgccaggaggcgctcaaagggtattcgcccgagcacgacaccattcggcagctgtgtgcacaggttcccattcatggaaagtgggcagaggcgcggaatatgccaggcgagcgcgcaggtatcagttgtgccggaccgcacttgtgggcacttgtggctggcagattggagccgggatgcggagtagcaccattggagcgcactgctactcagttggtgttcgttgctaaaagccactccgggcagcatcgacggcatcattcaaccgatgcaacagacggccaagctgaaagggcgacgtgtcacatatgcgaggctactacagatgctcccccgcaacaacaagggcaggaagtcacgcagggaaaggcgaacagccagcagatcttgaataaccaactcataaaccatttcagaaacccctgaaccagagcaatggccattaaaccgggactcggtcgcaagaccagcaacaagaacccgcctatcctgagccacgagtttgtgatccagaaccacgcggacatcatctcctgcgtagccatggtcttcgtggtcggcctgatgaacgagtcgacggcggcgttcgccagcgcgttcatatccctgcaccacaacgtcagcggtgaggaccccagccgggagcagccatatggcaagccatacacctacatcgccggcatcaaggattactgcgcgatattcttctacacgctgacctgcataatcatgcacgcgatcatccaggagttcgtgctggacaagatcagcaaaaaactacacctgtccaagttcaagctggcccgcttcaacgagtccggccaactggtggccttctacctgctctccttcgtctggggcgcccacgtgctgctgaaggagggctacctcggacaggtggcccagctgtgggagggcttccccgaccatcccatgagctttctgcacaagttctactttgtggtgcagctggcctactacctacacatgctgccggagctctacttccagaagatcaagaccaaggaggagcagcagcccaagatcgtgcactcgatcagcggcttcaccctgatcgtcctggcctacacgcttagcttccagcgcctggccctcgtgctgctcacgctgcactacttcagcgagctgctgtcgcacgtcttccagctgatcggcgtgttcgaccgcgaggagcgactggccaagctgcgggtggtgaacaatgccgtctttttcctgatccgcttcgctacgtccgtgatcggtgtgctcacgctgtactacggcatcgggggtgtgcgatccctgctggccttgggcggcctgatcgccctgcagggctacctggtcttctccttcatcacggagcagctgcgcgccaagcgcgaggccaagaaggaggccaagcgggaggccaagctggcgctgcagaccaaaaagccagccaagacgcccaaggacaaggtgaagcgcaagaaggagagcgacctgcctgaggcggaccagacctcgcccagtcccatcaagcagaagctcaagtgagagccgtcccggccgagcagagcaacaaaatcttccgcacacttccaattcaaaacgaatgagagatagagagagcagcaccatggacaggagcccaggttggattggtggacacttgccactgaccactgaacactggctacttggctccctgtttgatgtaatctcgttagctcaaaactaccactgcaacatttctgctgcatttacttcctcgacacacaaaagaacgaactatttcttagcctaaatgttttgtttcatttaagtttacgtcatttttaaaacaaattttttttatttttatacatacaaaaaaaaaaaatgaaaaaagaaacaaatacaacaaaagagaaaagcaaagcccacactgcgtgttttcaattgctcctcctccttctcctgcaacttcccattgtcctggtgattaccccaaggtgatccatatggtgatccgaagcctgaataacttttctctcttgcaggacatcgaggaacagggcgccgaggacaacgccaccctgctgaccaccaccaacctgtcggacgacgactaattggagctcgttcagatgattccctgttcgccctcggttccagcttttgatttccggcctgcttgagcgatccaaagtcgctggctgggccatcgcccacttcgcccatccgtttgagacacacacgattacccagacacctggacctgctgagatggctccacgccagctgatccagtatgctaatcccgatcccgatccccaaatttcccctccgcttctggccatgaggcaggcggaaggcggagcaaagagtaatccaagcacgaagaagactgtttctgaaactactgtttagctatccccaaatttttccaatgcttgtcttcaccccgcactgtcccccccctcttaccaatcacccatccttacaaaactgtgtgcgtgtgtgtgctgatagtgtgtgtgtatgtgtgtgtgtgtgatccccaagatacccgtta

SEQ ID NO: 24332 - DNA, 1549 bp, DROSOPHILA
ggtgagcagtgccaacaaggcaaaatgtgtgtttgctgttggggagcatcttgaccaaagtagtcactcctcggagcgccaggaggcgctcaaagggtattcgcccgagcacgacaccattcggcagctgtgtgcacaggttcccattcatggaaagtgggcagaggcgcggaatatgccaggcgagcgcgcaggtatcagttgtgccggaccgcacttgtgggcacttgtggctggcagattggagccgggatgcggagtagcaccattggagcgcactgctactcagttggtgttcgttgctaaaagccactccgggcagcatcgacggcatcattcaaccgatgcaacagacggccaagctgaaagggcgacgtgtcacatatgcgaggctactacagatgctcccccgcaacaacaaggaaacccctgaaccagagcaatggccattaaaccgggactcggtcgcaagaccagcaacaagaacccgcctatcctgagccacgagtttgtgatccagaaccacgcggacatcatctcctgcgtagccatggtcttcgtggtcggcctgatgaacgagtcgacggcggcgttcgccagcgcgttcatatccctgcaccacaacgtcagcggtgaggaccccagccgggagcagccatatggcaagccatacacctacatcgccggcatcaaggattactgcgcgatattcttctacacgctgacctgcataatcatgcacgcgatcatccaggagttcgtgctggacaagatcagcaaaaaactacacctgtccaagttcaagctggcccgcttcaacgagtccggccaactggtggccttctacctgctctccttcgtctggggcgcccacgtgctgctgaaggagggctacctcggacaggtggcccagctgtgggagggcttccccgaccatcccatgagctttctgcacaagttctactttgtggtgcagctggcctactacctacacatgctgccggagctctacttccagaagatcaagaccaaggaggagcagcagcccaagatcgtgcactcgatcagcggcttcaccctgatcgtcctggcctacacgcttagcttccagcgcctggccctcgtgctgctcacgctgcactacttcagcgagctgctgtcgcacgtcttccagctgatcggcgtgttcgaccgcgaggagcgactggccaagctgcgggtggtgaacaatgccgtctttttcctgatccgcttcgctacgtccgtgatcggtgtgctcacgctgtactacggcatcgggggtgtgcgatccctgctggccttgggcggcctgatcgccctgcagggctacctggtcttctccttcatcacggagcagctgcgcgccaagcgcgaggccaagaaggaggccaagcgggaggccaagctggcgctgcagaccaaaaagccagccaagacgcccaaggacaaggtgaagcgcaagaaggagagcgacctgcctgaggcggaccagacctcgcccagtcccatcaagcagaagctcaagtga

SEQ ID NO: 24333 - protein, 368 aa, DROSOPHILA
MAIKPGLGRKTSNKNPPILSHEFVIQNHADIISCVAMVFVVGLMNESTAAFASAFISLHHNVSGEDPSREQPYGKPYTYIAGIKDYCAIFFYTLTCIIMHAIIQEFVLDKISKKLHLSKFKLARFNESGQLVAFYLLSFVWGAHVLLKEGYLGQVAQLWEGFPDHPMSFLHKFYFVVQLAYYLHMLPELYFQKIKTKEEQQPKIVHSISGFTLIVLAYTLSFQRLALVLLTLHYFSELLSHVFQLIGVFDREERLAKLRVVNNAVFFLIRFATSVIGVLTLYYGIGGVRSLLALGGLIALQGYLVFSFITEQLRAKREAKKEAKREAKLALQTKKPAKTPKDKVKRKKESDLPEADQTSPSPIKQKLK

SEQ ID NO: 24334 - DNA, 2797 bp, DROSOPHILA
gaaatggtgcacaatttcctaaatgtatcgcccagtccgattagcagccgtcttttgtcagcaaggacatgatacagtagccaaaggacggctacagaaccccagaaccaccacattgactcagacgaaaagcaaaccatcggaaaatgtccgctcaagatggctgactgcctttgggggagttttcttcgctcgggaggaaaaatatcaaattatgtattagcaagaaggcggacggaggccatttgggcagattgctaaatattttcaggctcactgaatcgaatcgaaaattattggctcgtaatttggataccatcaaaccaaaaagaattatggaaattgttttcaaactgttttgtcaaaatctcaaaagggacacgtagccctctctttctcctcatcttttatgacgtaaaacaaattcttattaaaccaaaatagattgcatttgaatttggaattatttgaaaagactgtaatttcaagtgaaaaatgaaacaagtttggcgttctgattaaatgatgtttcgactgaaatatatatatattttttttagatttcagttctaggaatttgttttttattaaactgttttcaatgattctatataacgtttcataattcctttcataattaatacgatcaacgaaactacttttctcattgctaacagcctaacaatgataagttaaattgaaatacgtaaagttacattatttcgttatgaaagatagctcaaaaactcaagtgatttacgatttactattttatttacaaaatctcgtccatccccggattagttgagatttttagtggccgtcgtggcttaatttacctttgcgttcggttattgctcctgaggctgagctttagtacctggaaaggtgttcggttttatcgattggatgtgtgtgtcaggtgttgttacccacatcggggtgtcttctgcaatttttccccatttctattccccacgaaaggccgccacgtcgaccgaattcgaattttcaattttctacgcctatacccgatggggctagggggccaggggggtgcaggggtcctggggtcctgggggtcaggaggaaaccacgagagcgagagagaaagagcgtacgagccgaaaagcaagagatttccactcgcagagcggcgcaaagtggtgatttcgtattcgcctcactctcgcacacacgtgccccataccgcacacacacagccagccagcacacacaccagcaggccagagtatctgtgtgcgtgtgtgtgtatacctcttaaaggctgttgttctggttttggcgcttggcgtttttttacggtgcgccgcccgagtatttaccactttacaatggcgttttagtaccgcgagtcgtcattgtcgtcgtcatcatcgccgcataaagtcgaaattaaaaccgcggagtgtcagccataaagcactagtaccgccgacttaatcccagtcccgattcggattaatctgcctcaatcgccgcacaatcaatgcccgcaattaataccattcgcggtcaagtatcaaatcaaaactgaaattattgaacagattattcgattaattcagtgaaaaagttcggatgctaatataaatttgacgagttgagtggaaagatcagacttgcaggtcacgtattagtaaagtgaaaaatatgaagaaacttcgctggatcataaaaaatcaaaaataaaaatcactggagtcaaaaacggaaacactaaaattaaaatactatcttgttccttaaacttgaattaatcagcggtaagtgacctctttcgacagcaacacatcttaaataaaggcgataagtgtaataaaaagcaatcgaatcttaatgtttgaactattactaacgaaatctaaataagtttaaaattagtttaaagtgtctaaattattcttggcttcatgtagaagcaattctagctaatacttgtgtaattttgtttggtctcctatcaaaatttagctgtcaaagtgatgcttacctatatttgaatgatgttcatccatgaaaaaaatgtttaaaatgtacaatgtcaacagtgctagcttatattttaatttcaatcatgcgacataattatgcaaattaagagacctcatttaaggcattgtctttctaccaaaagtttttgaagcttagagcccaatcaaacagtaacactttaggccatctcccacttcagcacccaatttgggccagaattgttaattcaaatcgactttcggcaagctgggcgttctgcttggcggcgcagcaatgaaagccataatgctattattttgattgccctgacatttgatcaattcggagaccacatgccactgggacggaatctaattaggcggggcaaagcgtttagctaattgcagtttgcccaattggccgacgcgggtgctcgctcatttacgactatgccaataaaaataatgcataataatggcaataaaacaataaagttatggaacgctccgcattcagatagatagagggagatagccgacggacgagtgggccaaatgagcacatacgatggccataaatatttacagccaagcaaacacttgctcaaattaagtactcgttaaattgaaattggatggcggaccaccagcaacagcgagtgaccagcaaattgataaaaagataaattgaatcataaagatggccgctaccccaagcggcgctccacatctcagagtccgattgcggggcatttggaatttttaattgtcccggaaataatgccaacagattcgcatttgtg

SEQ ID NO: 24335 - DNA, 797 bp, DROSOPHILA
aattcgaattttcaattttctacgcctatacccgatggggctagggggccaggggggtgcaggggtcctggggtcctgggggtcaggaggaaaccacgagagcgagagagaaagagcgtacgagccgaaaagcaagagatttccactcgcagagcggcgcaaagtggtgatttcgtattcgcctcactctcgcacacacgtgccccataccgcacacacacagccagccagcacacacaccagcaggccagagtatctgtgtgcgtgtgtgtgtatacctcttaaaggctgttgttctggttttggcgcttggcgtttttttacggtgcgccgcccgagtatttaccactttacaatggcgttttagtaccgcgagtcgtcattgtcgtcgtcatcatcgccgcataaagtcgaaattaaaaccgcggagtgtcagccataaagcactagtaccgccgacttaatcccagtcccgattcggattaatctgcctcaatcgccgcacaatcaatgcccgcaattaataccattcgcggtcaagtatcaaatcaaaactgaaattattgaacagattattcgattaattcagtgaaaaagttcggatgctaatataaatttgacgagttgagtggaaagatcagacttgcaggtcacgtattagtaaagtgaaaaatatgaagaaacttcgctggatcataaaaaatcaaaaataaaaatcactggagtcaaaaacggaaacactaaaattaaaatactatcttgttccttaaacttgaattaatcagcggtaagtgacc

SEQ ID NO: 24336 - protein, 110 aa, DROSOPHILA
MGLGGQGGAGVLGSWGSGGNHESERERAYEPKSKRFPLAERRKVVISYSPHSRTHVPHTAHTQPASTHTSRPEYLCACVCIPLKGCCSGFGAWRFFTVRRPSIYHFTMAF

SEQ ID NO: 24337 - DNA, 2607 bp, DROSOPHILA
tttagatattgtattgtcttagttgaataaaaactctattttcgtcacaacagttaatattagaagcttggattgttaaaggtgcgatagtcactagcataaatctcagaagaggctattctgtttgattacaaattaatcttaactttcaaaccaaatttgtgaggatactgtgcggtctaactgatctgaaaaacaaactattcaagctcttatattagatgttcggcttgcacatttaaataccatgaaatgtatctataggaattataaattttaagtaaacttttagtttatatgcctatacagacaagtaaatatcctctttaggttaacattaggttttcttaacaattttaattgtcactaaaaaactatgtatttcggtagcctcctatatggaacaggtcttattatcttatttaattttacgaaatataaaaaaataatataaggcgctatgcatatgaaatataatgtaaaacacacttgaatttgtttaaaagcaaactgcaacctgttcgtcgagaggaattgataaaaaaaagaagaaatggtgccaaggtagagacacacgtttatatattacaaaacatcgagtctaagaagtcggcgatgctttgtagtccatggagtcttgatgggactacaaaagtggttcacggcctggcaatgccaagtcaagctcaaaggaggggatttaatgaaggggcgggtcaaactcgtttcgatttcgggatgccacccgacccgtttgccccttattgatgcgattgtttcattttagcatctattaagcgattatatatagtacttatcccgttgtttggcatttgctaagctgtcgcatgtgacgatgctttttaatgggtgtgggcgcatccgcgaagtcaacccataactcagcgaaccaattgaatgcaagatgtagcgttttgatatgggttcactttgggtggcaatcatataaaaaggctctgcccgaccacaatcagttatcagtcaacgttcgttctcgaccagacagaagtcagccaatatgttcaagtttgtaagtgtccgcaggatacgaaccaacatactcgatccctaacgaatgcctatttctccttcaggtcatgatctgcgcagttttgggcctggcggtggccaaccccccggtgccccattccctaggccgttcggaggatgtccacgccgatgtcctttcccaatccgatgatgttcgtgccgatggattcgattccagcctgcacacctccaacggaatcgagcaggccgccagcggtgatgcccatggcaacatccacggcaacttcggctggatctcacccgagggcgagcacgtcgaggttaagtacgtcgccaatgagaacggataccagccctcgggagcctggatccccactcctcctccaatcccagaggccatcgcccgcgccgtcgcctggctggagtcccacccaccagcacccgagcacccccgtcatcactagaacctctatgaaagcggatcgcactacggactgttccccgaagacctttcgaactattagcttaagtaatcgtactgtttgtaaaatacacgcaattgttaacggcagaaaccagtttgcaaccttgactttgaatttggcaaacaactgtaacggtttcgaacccgtcctacccgtttaccaccttcgatttacttagttgtttagcacgttcagtacaatatggtaatgtggtctctacctggaccgtaaaccgaattcacaacaaaggtacaccaaaaacaaaatatgctcaagtatataatgtgcacactttgtacttattagagtacatgtatcttcattatctagagttttatccatttacacttaggaatgcagctgatatcaaattagtcggtaatatgtaacacatttattctctcaaggaacttgagcaggttatttatcatatatcgtatattttcaatggaaatggaatagatttgtgatttggctgtcacatacaacatcagaattaagcggtgttcactcctcagtgggaattgtctttaagcctttttgaaaccgtctccagattccatcagaaattactgtcaataaacgtttttggccttaattcgtatcggtaaaacagctgattcgttttaatttgcttgctgacaatattttgaataacttaaatctgccctagattttaatagagcctgtcgaaaaggcaactttaacatttcgaataattatcacggccacaaacccgattgccaattctggtttaaagagaattagctttgaaactgattggcaaaaagcgtgaatttaaaaatcggaaaaggcataaagccagaatttgtcaccaagctgttaaaatgataatttgtactgttcttattttcaataacaatgttctgagtaacataaccagttgagatccggtaggcgattcttattaaaaccccaaactgaaaacatctggagtgaatcccaaatgaaggggcatgactgtgggctcgataagcaaaggtgtcgatatatgtactttgcttagcgattagttaagtcgacttactttggttcgagttcttttaggatttatagggaatatattcta

SEQ ID NO: 24338 - DNA, 543 bp, DROSOPHILA
agtcaacgttcgttctcgaccagacagaagtcagccaatatgttcaagtttgtcatgatctgcgcagttttgggcctggcggtggccaaccccccggtgccccattccctaggccgttcggaggatgtccacgccgatgtcctttcccaatccgatgatgttcgtgccgatggattcgattccagcctgcacacctccaacggaatcgagcaggccgccagcggtgatgcccatggcaacatccacggcaacttcggctggatctcacccgagggcgagcacgtcgaggttaagtacgtcgccaatgagaacggataccagccctcgggagcctggatccccactcctcctccaatcccagaggccatcgcccgcgccgtcgcctggctggagtcccacccaccagcacccgagcacccccgtcatcactagaacctctatgaaagcggatcgcactacggactgttccccgaagacctttcgaactattagcttaagtaatcgtactgtttgtaaaatacacgcaattgttaacggcagaaa

SEQ ID NO: 24339 - protein, 130 aa, DROSOPHILA
MFKFVMICAVLGLAVANPPVPHSLGRSEDVHADVLSQSDDVRADGFDSSLHTSNGIEQAASGDAHGNIHGNFGWISPEGEHVEVKYVANENGYQPSGAWIPTPPPIPEAIARAVAWLESHPPAPEHPRHH

SEQ ID NO: 24340 - DNA, 4841 bp, DROSOPHILA
agagagctccatcatctggaccaagagcagcagctcgatgctgaccgatggcgcttggagttacacgaagtgagtattcattcaagctaaggttattcaacgtaatctacataatcaattctagagtctcccagttctttatcactcgcatggatggcgtcttggacacctgggatctgctgcagcagcagaacgagcccgttctcacggtcaaggtgtgcgatgaacctctttattgtgtccggaccaacgagaacgggaaattcgtgagctgtggcagccagctgggagccacttttctcgtcgaagtctccgacaacatggtcatgtcagccaagaacgacaaacccctactaacagccgtaagactccattgggaatccagcattctagaatcttgagtcacattttccatatgcagatgttcgagcgcgagaaccgtcgcgagaagatcctggaggccaagtcccgggaaagcaagctgaaagtcaaggccaaccatggccaggatcagggggacacaatgatggtcaacggaaagatcaacatggctccgtttgaagcagcttgcgagcaagctgcctcggaatactttgcggccgtggaacaggaacgccaaaggcggctgccaggcggaaagcgtaggtgaacgaaggcggtttagaaatgtatacccctattacgggagtatccactaatttgtgttctttaatcttccatttcagaggatgcggaggaggctgatgtgtccgaggcggagagttcgaagctgtaaatcccaaacggaactatgtcctttttttgttaaatctaaagtacaagttaaagggaatttgtataggaaataaaaatatagtaaccactttttaaaaaactaattaattcagcataagaggtaaaatttaaaacgtcgtgtgcttttcaacactttttagtttcagtgttggataaaactgcttctagttctttgctcatctcggagtcagttccagctggggctcacaagttcacgagccaattggttcaatcagctgttgtcattcgacattcgcacgcgggattggaaagaaataactaaaacgtttttaaagcacgcttaaagatcaaaaattgtaagtaacttataagacacacagaagcatattcaaacacaaatcaatagacggtgctattgagaacggcaacggcgaagcaacaatttcgcatcagctgtgcgagtaacgtgccagaaatacacttggctacaagttcaagggccgaagaccaaccataatctgtgccaagtgatataatagttgtttccgagtgcgaattaacaaatccagcgctagagtttatgtcagctacttgcaagcgaggtactttctaaaaattcaaagttctgcaattggcggggatcaggtagccaaagtaacccgttgcgtgttgcatggtgtgcggcctacgtgactcagaaacagttatcaatggcgcaacacatacggaaagttcagtgaccaaaatttgtgcagcagccaaacggcaaacgcaacccctgaaactcagacggcgtctaacgtccaactgataaaggtatcgaacgatccgagttctactattaaatattagtgtttatttaactaaacaaatacaacgggtaagacaaaggccaaccagtgaagttgctatagttatgtttaaacatagtggtaaacatttgctgtttaaatagttttcgtgctagttttaaatcagtctgtgcattgttcgaaattaatttcaatattttaaacaatattactttcaccattaacaacaactaaatatgtttacatactacgctatttactataaagtagaacgccagtttgttttgccattttattgccaattgttaattcagaccttgatggcgctccgatttgaaagtgcctgttccaaagtgtttccccaaggtggggctgcccattaagtgattcacccacctgacgtgggctaattataagaattcgggttttgcttttccggtttgctgcaatcgaagggggccggacctcgtcctcccattccatgctattcagcagcagtcacgtacgccagtcgcatcatccaaatccagttcaagcaatgcgctgtggtgtctttgtttattgtttatttagtgagccgttcgccgcacaaacaaattttaatacgattccataatttctaataatcaaaacaatcttgaccttaacgtgtctagttcatatatgaatggaattatatagtatttaaaatatattttttaacaaatacattgaggtggtttaaggtggattaagcaggcgaatggaacaacaaaattaaataaaaaacatattgattaaaaccaattaggtttgaaaaaatacgattacaaatattcccattattctatgttcttgcagcaccatgttggacgtgatccaacccagcagcaacctcccgaccagcgaaagcaccgatattgtggtggtccgagccagaccaaagaaggtgttcaagccaaaggcgcgcatcaatcggattccccaggagctgctcgatgatccactgctgcagcaggccatcgaccgtctgccctcgaactacaacttcgagatgcacaagacgatttggcgcatacgggagatgaaggccaagcgtgtggccctgcaactgccggagggcctgctgatgtacgccatggttatcagcgacattgtggagcgattcaccagcgcagatactgtgataatgggcgatgtgacttacggagcttgctgcgtggacgactacactgccaaggcgttgggagctgatctgctggtccactacggccacagctgcctcattcccgtagatcagacgtgtggcatcaaggtgctgtacatttttgtagacatcaaaatcgatccgctgcacttcctggactctgtaaagctgaacttccgcccggaagtgggccaaatagctttagtaagcacaatacagttcgtgacaacgctgcaagctgcatctactgagctaaaggcagccggctatgatgtgatagtaccacaggccaagccacttagtcctggagagattcttgggtgcacttcgcctcagctgccagagacaacgaagatgataatatatttgggtgacgggcgttttcatctagaatccgcaatgatagcaaacccgttgctaaaggtatgcagtgtgttttaaaacgaattcttcatttacttatataatatatttatgtttattttaggcttacaagtacgatccctatgaaaagaagttcaccacagagcagtacgatcactcggcgatgcagaatctgcgcctggacgctgttcagcgggctaagaaggcgcgccgcattggcatcatacttggaacactcggaagacaaggcagttcaagagtgcatcggtttttggagaagcgacttcatgccaagggtattgaaactaccacattattgctgtcggagatcttcccacagaaattggctcttttcgccgacatcgacgcctttgtgcagattgcttgtccgcgactttcaatcgactggggatccgcatttagccaaccgttgctgaatccttacgagctgtccgtggttttgggcgatgtcgagtggacgccgcacaactcgtcgccgcgcaacaacgcctatcccatggacttctacgctagcggcagcctgggaccctggactcccaacttcaagccaccagcgataggagagtgcgagaacaagccctcggctgactgttgtggaagatgcacgcgagcggaattggagaaggacgattccggcaaggcagcggctctggacgatcttctcgactttaagaagggataagcgatttgaccggctcgcttccaactgcccacggagccctccatctcaatcgatcagccacgatcgcctgcccaaatatattgattacctactaatttagttagtacaaatttggtttttaagttcttactttaagggcatcttttgtgttcatcacagataggttcataatttttatgttcgcaaacacttttctaacagagatgcaattgttaattagcagcaacaatgtacagaattttaaacattaaaataatgtttaaaacgaaacctgaatatttcaatattgaaaggctctttaggaatattttattaaaaactaataaatataaaatcatttttctagagacatatgttctcgaatacttaaaattatgtttatctgaataatattttcggcttctttttcaaatttttgttaccttttatgaaaatagtccagtgcaaagaaccccccaatttgtgcaaatttccttttttggttcttataaatttcattctctattgcaaaaaaatcaaaaatatttaaaatatatacaatttattttaaaaatttactaaattatgtacacttgaactaaaaattttactaaatttgttaaattatctatagtttgtttgtatatacatttggtctattgaattgactaaaaattggctaaggtaaatatgtacaattgcactacttagactaaattggctaactaactaggtatatacaattgtgttgatgatgtatatatacaatcgaaatgtgacattaactaaaatgtacaattgatctatacaattaactagaatttacaattgtctaaattcggctaatatgctgacactgcatggtcttcaagattggatccttatggttgctcccaggatgtgtggtgttccacgtcgctctcgttctttgattcttcagagatccagcgccggatacgtgaagctccgccaggagctgacgtcggtccgcgatggatgttgtcggtcggagaacatcgct

SEQ ID NO: 24341 - DNA, 1481 bp, DROSOPHILA
cacaagttcacgagccaattggttcaatcagctgttgtcattcgacattcgcacgcgggattggaaagaaataactaaaacgtttttaaagcacgcttaaagatcaaaaattcaccatgttggacgtgatccaacccagcagcaacctcccgaccagcgaaagcaccgatattgtggtggtccgagccagaccaaagaaggtgttcaagccaaaggcgcgcatcaatcggattccccaggagctgctcgatgatccactgctgcagcaggccatcgaccgtctgccctcgaactacaacttcgagatgcacaagacgatttggcgcatacgggagatgaaggccaagcgtgtggccctgcaactgccggagggcctgctgatgtacgccatggttatcagcgacattgtggagcgattcaccagcgcagatactgtgataatgggcgatgtgacttacggagcttgctgcgtggacgactacactgccaaggcgttgggagctgatctgctggtccactacggccacagctgcctcattcccgtagatcagacgtgtggcatcaaggtgctgtacatttttgtagacatcaaaatcgatccgctgcacttcctggactctgtaaagctgaacttccgcccggaagtgggccaaatagctttagtaagcacaatacagttcgtgacaacgctgcaagctgcatctactgagctaaaggcagccggctatgatgtgatagtaccacaggccaagccacttagtcctggagagattcttgggtgcacttcgcctcagctgccagagacaacgaagatgataatatatttgggtgacgggcgttttcatctagaatccgcaatgatagcaaacccgttgctaaaggcttacaagtacgatccctatgaaaagaagttcaccacagagcagtacgatcactcggcgatgcagaatctgcgcctggacgctgttcagcgggctaagaaggcgcgccgcattggcatcatacttggaacactcggaagacaaggcagttcaagagtgcatcggtttttggagaagcgacttcatgccaagggtattgaaactaccacattattgctgtcggagatcttcccacagaaattggctcttttcgccgacatcgacgcctttgtgcagattgcttgtccgcgactttcaatcgactggggatccgcatttagccaaccgttgctgaatccttacgagctgtccgtggttttgggcgatgtcgagtggacgccgcacaactcgtcgccgcgcaacaacgcctatcccatggacttctacgctagcggcagcctgggaccctggactcccaacttcaagccaccagcgataggagagtgcgagaacaagccctcggctgactgttgtggaagatgcacgcgagcggaattggagaaggacgattccggcaaggcagcggctctggacgatcttctcgactttaagaagggataa

SEQ ID NO: 24342 - protein, 454 aa, DROSOPHILA
MLDVIQPSSNLPTSESTDIVVVRARPKKVFKPKARINRIPQELLDDPLLQQAIDRLPSNYNFEMHKTIWRIREMKAKRVALQLPEGLLMYAMVISDIVERFTSADTVIMGDVTYGACCVDDYTAKALGADLLVHYGHSCLIPVDQTCGIKVLYIFVDIKIDPLHFLDSVKLNFRPEVGQIALVSTIQFVTTLQAASTELKAAGYDVIVPQAKPLSPGEILGCTSPQLPETTKMIIYLGDGRFHLESAMIANPLLKAYKYDPYEKKFTTEQYDHSAMQNLRLDAVQRAKKARRIGIILGTLGRQGSSRVHRFLEKRLHAKGIETTTLLLSEIFPQKLALFADIDAFVQIACPRLSIDWGSAFSQPLLNPYELSVVLGDVEWTPHNSSPRNNAYPMDFYASGSLGPWTPNFKPPAIGECENKPSADCCGRCTRAELEKDDSGKAAALDDLLDFKKG

SEQ ID NO: 24343 - DNA, 8856 bp, DROSOPHILA
agttttcctcgatttggggccctgcggaattggcagttcactttcgttggtggctcgagtgcgacgtgaagtgcggcagcgaagagcgcttttccaggcacagtgcgccactacttgcctgcaagtcagccacagcaatttctcggtaattgcgttgcaaagtgcgtaattagagcttagggggaaaactgcgttttccgcaataccagaacgtgccccattttcactagagcgtacgcagatccgtgagttcagtgattcctctaagctcaatgtggtaacgagagccatggcgatgactttgaaatgcggaaatgaaagtacaaattcggttgcgtgctggggaaacggctctgaaaattttacagccaataacaacaaaggcaaaacaaacgcgtaattgcagaaatcagctgtgtacctacggacgaaccagagccccataaagagaggggcatatgccccctgccctgcgacccattatccccccttcgtcctcaactttggagcccaacagctggtcgcgaagccctctctctcgcgcgctctctctctctgcttgttctcgccttttatggactaacttttgtttttattttgatttgcttttctggttcagtttgtgtttttctgtttattatagtttcattttcttttaacttgacttttaagactttgattcttatagttcttatgtttttcgcaaaaatatttactttaaatgtatctaaatttgtaatattcatttttcctgctgaaaagaacacattcttttatttgtcatgaacactcaaaagtgtattagtctcaaatcgcctaattaaggtttcttaaaagtgtgttaaaaagaaatactacaaaaaaagtaattaaaatagttagtttttagtttttcaaccccaatcgaacagttcttattcctttgttgttacagcttaggcaggtgaaaattgctattaattatgaaattccctcttgcagttaaatcaaacgcgtttcgtcaaccgccgtccgcttaggcaaaaaaaagtaaacaaacaatacaaatctacactctcacgcgaaaaacaataaagcgatcgttcggaaattagtgcaacgtagacaaaggcaactcaatccgcatccagatccacaaaagatggcgttcatttcgaaagactttcggtcgccgggggaaacttggatcaaaaccgatggcggctgggagcgttccaaggtgctcgagtgcggcggaaagcggaagcggtaagcttacaacattttttcaaaaggcctttgaatggcgatatcccaatcgttgatatatcttcagatgctattttgcatttctttaaacgtttgtcataaaatacgaactcattgctcaatctactaaatgtctttcaatgaaatagataaaaacgatatgactattattagttaagtaatgtaagagctaaactcaacggacagttgagattccatttcattaattgagccatgtaagtaataatagtatgatgcgatagacactgcactttcgttcatcgctccttatatgggcatctgttagtaatctctcattcagccaattaataaactacgtagttttaattcaactgcgataagatatataaaactatagtgactgatgtcaaaagtgcgtttctataagaatacattcaatcgtcttaatcatgtataaatcgaattcaggaggcatttaggttagtcatagtttcaagtcacgtttctgtttgcaaaaatattctagacattagagcaaaggtcttgtttccgtgtcgccattgatggctagatttcgacttttaaatgtattgtttatgtttttacgcaaaacaaggttgtatatgcaaaaaccgcttgcagaaatattatcttatctcttcagagataaaggtttgccttgaattgattcgggcacgacaccttttctagtgtttagtattcccatgttttatcatcatatatttcggaaattatcgttaaaccttaaagctaatattgacattcgagtagtcgtcccattgtctagcagtttcactgccgatatcgaaatctttaaatcattctgtttaatagacctacgtttgggtccaatacccagtggggccattgaagttggccaaagcaaactggcgaataattgttgtggctcagacaatggagcccacttcccttcgctggccaaatcgatgatttctcaaaactaaagccccgggcagcaaaacaccatcaaattttgtgacaatgcatgcatattcaaaggtgttatatgcccctgaagagctgcgtagagttagagttcctcaaatcgcattggagtatctagtgattacagtggccgattcctattgcaaaagcacgaaatgagtcactgcaaatggctgtgaaagcagcaaaagttccgtatctagactgattccatgggtagttgtatctcagccatctgatcgattgcccatttgattgattgctattgttcgttcgaatgcaattggaaactgcgagtggaacaaaaagtttaacagacattaagacaataaatggtgagtgtgaaaatggagtatgcaaaaaaagagagtttttatgctcataccttaaattcaatagataagttccttcctttcttccttttacattaaaggttcatcctccttgatattatgtagaaattgtggctttaatgcatttttaatttgacaagatgatggattttcaatatgcctttatttattgaaagtacccatttgatgactgacatataccaaatcgattcgagggggaagttggccggaaacgcagagttgggaggtcgaaagtgggcggcagtgggcggtgcggaaccttgagcttttggtggcgtttgcaagctctctcgcaatcccatagtttggcctaaacttgaccgagtttttcgcctacggttagtagttggtgaacggctagcactagtataggtgttccttggggtcttggacattaccaggggtcatacttcaatgtctgctcgccatttaaagtttttccaatgggtcttattatgcatttggttgcatttctaattttggaacactttcacacaactgcagtcgcaagtaaatagcagaaaacaaattgaaatcaaatatttacttttgatattaagtagattcatgagcccaaataatttttatgtgtacaaatacaaatattagtagagctaaagttttcgcctcggctgtatattttgggtcgactagatcacgagtggcgctatttccgcatttttcccatttacgacaactcgaaaagccaaaaataatcgccccctccatggatttgggtgcgttctttatgagttgtcaaaagtgcacttcaagttccctcgattttcccctgacatattccgtgtgtgtgtgttatttttagtagtttttacgatgctctgtgttatgtaactccgcggcttatctccaaataaacatttagagttcaaaatcaagcgatttagtaatgccttctaatcagcaaaccaaggtttcgatttcggcaatcacgtagattttgaaacataaatttttatttcatgtacatattattttccgctgatcataattcgggaagtggagcattcacatttttctagccttacgtgactacaaattgtattacaatatagatttcctagttattttgaaacgctttttatccgctttattgtcgaacttgcgtgtccatttcgtaaccgtgttaagcactcgttttgagcattacccaactttctttctggtcaattaaaaattcaaatggtcgtcgcccggcactgaacccattagataatgcctgaaaataataattagaaatgccagattgcatggaaaagcgaatccaaagtgcacacgcggacgtggacgccaatccaagtcggagtcggagttggaatcggacccactttcactgcactcttcgctgcacatctgtggacaaacgatcgccatttgatcgattttcccgcccgtctttcgctccccttttcatttttctctctgtttttctttacttgggttttccactcgatcgagatgcatgaggtcgcgaaaaattgcctctcatatgggtgctaaaaattgttatgattaatcgacttgaatttcgagctgtagaattgcggttttccgaaagtttttatgtgtcctgaaacttatattttaatatctaaactatactttcaactaatagttttggaaatataataataattatttgaaatgtttttcacattaaacgaaataaagttacctttatggagttattaaacttaacgatgccatatgaaactcagttaagtttctctttacgtttttcatttaaatgcatttaatttagtttttttttttagttttttaagatcgctctgcttttggctataaaaaatcaaacttttaattacttcaattaattatattgcatttctactataaaatgcatccgaaccacatgctcaccggcctaattatatctttggcaaccaaagatttccattcccaaatgtgacttcctccaattttgagcataaatttagaagcattcgaagcgctctgtggctccttcgctggtcctcaactccgtttccaattatttatgtcgaaaaaggtcactggcgtataaatagaaaagcaattttccgctgcagctcgtagtttttcccgctgcgcctgctgcctgccactcaagtcagccagtgaaaagggccccgcactctccgattcatttgtttaattcgcttggagaaaggtaaacgaacgcttgatggtgacgtcgttgagtgatttatatgaatcacgtggctgttggccgaccgcggattcggtctgctggcttgcctggatggatgatggctgtgggcagggccgagagtttaccatctccatctgcgccggggatccgaagaaacggggacacggagatggtggtatccagggagcaagagccgcagcctgtgcaagcgcaacaatttcattgttcgtcgactatttttaaacagatccacggatatgtaattgcacatttatctaaaacacaggcaaagcagcgacaacatcacgaaattcgagcgaaacgacgggaaagcgcaaaaaataatcaaaacacaataactggcgttgaaaattgcaataataaagtgttggctgggatggtctgatttctttgtttcttttatcagccatgagtaatgcgatttgcaacagtcgatttggagttatctcacccaatggttataaacatcaatctaccaactataaataataaatgttgaataataataaaaagttgaattgattgaattggttttaaatgaaatgcgaaaatacagtgccaaagctggaaaagaaaaccataacaataacagatcatagcagcaacacatgggtgtacaatgcacatcagcacatcagcgttcccccattacgtacatatacgaaacgttggccaataaaagcggtgacctactttggagaccaggccaagccaacccaaccccacgatggttctcgcctctcgacactcaacactcgactctagactcgcctaggagcttttgtgcgttttcctttcgaatttttccgttggtcgtcccactttgattgttgctctccttggagcatctttagtcgcagcttctggttggaacgtgagtggattaccactgattacggacctaattctgggatggaattaaattttgttctgccagcgagaaggacaatcgtgagcaggacgagcacctgaaataccagtcagccaaatcgatgcgccttgaccatttgcggctggtggattcgacgaggacacgtcctgtccttgggtgccgtaaaattgtttttgatttcccccaaaaactgggtcaaactatgctctcgtgtctcttgggactgcactttgtctaattgaagttttccccccataattgccttgtaattacattttcttagtacggactttttcacaactttcaaatgcagcaaatgtcgattttcaaggtcgttaatgggttttgctctgcttaatggcattttaagttgaatctgtctgggaaattgatagctgcaaacacattaagtgcattctattgaataaaaaagcgataaaggagataataaaaagaatagaaaagaatagaatatataaaaacatatattccatatactaaccgtatatgtatacacaaaaacgcattttctaaacggcttcatttccttatggctccaaagtgacacccaactttgttcgaaattgaattgcaaatgtgtacaatttcacaaattacgcgacccaccgcttgtaattgcattaaacatggctaaaaacttgacactcggctgggtttcctctccaaattgcttaatttaataaccggacagggccgtgaatcagatggtgggaaattggccagcttccgcctctggaaaagcggctcacgagcgtttaacacttgtaagccgaccaaatccaaatgttgccagcaattgccgtgcaagagttggcataacacacaactggccaaacaggatggtgggccatgttgaggggagtgccatggcgttgtaccgaatcacttccgaaatgttgcattgacaatggtttatatgcgcttacactgagggaaaaaggctgggtgttttgtgttttaagaagttgtaaaataaggagctactttgtctctggagtacaaaagttttttatgattatgacatatatatgaaactaatttaatacatattttatccttttgcaggcaccattcagagggcagcagcagctaccaggacagcgacagttcggaggaggaggcggtgatgccgccgcattatcacatcaccatccggtgtaccagagagatagccgggtttaatggtctcagtgaggctgtgaagcgtctggatttcaggcgatctgtgcgggatcgcaagcggttccactacatatgcgccttcctgctgctcgtgtccaacaagggtattgccagtctgccaggcagtgctcagcgccagctactccaaatggtcgaggaggtggcctcgcatggtaagctaactattttcaaagcattaactattctatactaatattattatccttttacccagtaaatgacagccagcagcatccgaatgtgctgcgcggcctggccctgaagctggagcacattgtcagccaagagaaccagaagtgctggggcaagccgctgggcagcacgtacctgtggaaggagcacatggccaccatcaagcgcatccagcgcgtggccagccagatcgaaatccgcgaggtaaggatcgtaatctgtatttatattatatatttctcatattcattataaactcttatcctagcccgatccggaggccaagccaaagctgcacgaactgccggaggagtgtgtgcgggagatcatcctgtgcatagccgaccatcgggacctggagtcggccgccgaggcctgggagaccatggccaagctggtatccgagcagcgcatctggcgcgaactgacacgctttcacttcaaccagcgccagatccacaccattctggacctggacaagtttaagcagatgggcgagatcaaggactggaagcagatctatcatcaactacgacgcacctatggcgtcaacgatgattaccagttcgccgaggtgctggccctgtgccgctcctgctgctgcctgttctggccgtcggatggacacccgtgcatcgtcgatcagagtccggactacaagcagcggcttgaggaggccggtggtcagttggctctggcccaaccagttccgcccgcccagtttcttaagtacttctcgttgtaagccggatgttcggaccaagggagagagatagagatagatcgaaagtatttttacggcccagtggataggttgtttatgcgtgtgttaaagttttacccttggagagaagaaaaggagcaggggaggagaggagttgatagtcgaggagcggatcagaaaaagcaaagtgataacgaaatccctaatctatacctacatacgtttaaacgtaaatcgccagactcgtttcgattggtttgcagtttgtccacggttaaggacgtggtttcagttcagttgtttgccaaccagttgtattaccacatcagcaatctgtgcaggaccgaagattactattagttgtgtagacatacatacatatttatctatcgactcgcgcgtgtcagttgccagggtccaattctgggtcgctaatctttggggtcggatttaggtatttaggacacgcaaaacgaactgccacaaaacgagaataagcgaatattttttgtcaaactgattattgcaaaacgtgtatcgagaaactatttttaatgtacaccagtatgtataattaccgatttgttcattttttgagacaaaacgagaaatacacttttatgaatgacttttgagcgatctattgtagcggttaagtctagtttctttaacgtttatcagctgcttttggtgctaaatcgtattataagttacaatcaaacgaaatcaaatcaaaccagctcttgtagttacccaagtccgattcgatctgtagtcctcccgagtgaaagatgtagcgtggggaaaatcatgtgatgttgcaggaagcaaagctagaaacgaatacacctacctaaagataacaaatctttaagcgatttgtcgcaaagcaatgctatacatatacaaaaactagagatcgtcgccagtataagagtaattttatggtatgccgtaccagccagcagagtaatcctcttacccaacagaccgattggaagccaagttattttccaaaatc

SEQ ID NO: 24344 - DNA, 1197 bp, DROSOPHILA
tcaaccgccgtccgcttaggcaaaaaaaagtaaacaaacaatacaaatctacactctcacgcgaaaaacaataaagcgatcgttcggaaattagtgcaacgtagacaaaggcaactcaatccgcatccagatccacaaaagatggcgttcatttcgaaagactttcggtcgccgggggaaacttggatcaaaaccgatggcggctgggagcgttccaaggtgctcgagtgcggcggaaagcggaagcggcaccattcagagggcagcagcagctaccaggacagcgacagttcggaggaggaggcggtgatgccgccgcattatcacatcaccatccggtgtaccagagagatagccgggtttaatggtctcagtgaggctgtgaagcgtctggatttcaggcgatctgtgcgggatcgcaagcggttccactacatatgcgccttcctgctgctcgtgtccaacaagggtattgccagtctgccaggcagtgctcagcgccagctactccaaatggtcgaggaggtggcctcgcatgtaaatgacagccagcagcatccgaatgtgctgcgcggcctggccctgaagctggagcacattgtcagccaagagaaccagaagtgctggggcaagccgctgggcagcacgtacctgtggaaggagcacatggccaccatcaagcgcatccagcgcgtggccagccagatcgaaatccgcgagcccgatccggaggccaagccaaagctgcacgaactgccggaggagtgtgtgcgggagatcatcctgtgcatagccgaccatcgggacctggagtcggccgccgaggcctgggagaccatggccaagctggtatccgagcagcgcatctggcgcgaactgacacgctttcacttcaaccagcgccagatccacaccattctggacctggacaagtttaagcagatgggcgagatcaaggactggaagcagatctatcatcaactacgacgcacctatggcgtcaacgatgattaccagttcgccgaggtgctggccctgtgccgctcctgctgctgcctgttctggccgtcggatggacacccgtgcatcgtcgatcagagtccggactacaagcagcggcttgaggaggccggtggtcagttggctctggcccaaccagttccgcccgcccagtttcttaagtacttctcgttgtaa

SEQ ID NO: 24345 - protein, 351 aa, DROSOPHILA
MAFISKDFRSPGETWIKTDGGWERSKVLECGGKRKRHHSEGSSSYQDSDSSEEEAVMPPHYHITIRCTREIAGFNGLSEAVKRLDFRRSVRDRKRFHYICAFLLLVSNKGIASLPGSAQRQLLQMVEEVASHVNDSQQHPNVLRGLALKLEHIVSQENQKCWGKPLGSTYLWKEHMATIKRIQRVASQIEIREPDPEAKPKLHELPEECVREIILCIADHRDLESAAEAWETMAKLVSEQRIWRELTRFHFNQRQIHTILDLDKFKQMGEIKDWKQIYHQLRRTYGVNDDYQFAEVLALCRSCCCLFWPSDGHPCIVDQSPDYKQRLEEAGGQLALAQPVPPAQFLKYFSL

SEQ ID NO: 24346 - DNA, 4847 bp, DROSOPHILA
attcagacacttattttgacatttttttctttttaatttatggcatttaactaaataaaaatgacactgctaattcgtaaggaagtaatttttaattaaattaactacgatagtctacctatttaccaaaatcaataaacaaatttcctttaaattaacaaaaagttaaagcaaatatttttcttgtcaagatctgggtgacgttaatttagaggattgaggccatatggccattagtttgaccatccaaagagggtgattcaagaatattttgttaaaataactgatttttattatttacaaatctatatacaagtatctagaacctcaaaaagagcgaaccaccctactgcaacatgtatacgtgcgtcgctcgacggcgtgtatgtgtgagttacttacttgcagacacaaatcgaagttttcgcactccgcgcagtgcactcgaatgccctgaatatcatcctggcaatttgtgcaattatactttgtgaataaatccgcgattgtggtcattttgggccaaaacctggattttcacgacaattatgagttgtgcgaaaaaaacctatgccagtaatgtgaccagacgcgaagtcaacgccatattgctctactgagaattcttatatgtacggccaacgaaccgaaccagttcatcggaacagtgccgcctatatagctagtcttaaagcctttttagctaattttcataattctgttgaatctctgaattatagttaatttctaaattatactacttaccaaaagtaccaacacattaaatatagaatacaaatttcaaacattaggcacatgttcaaaactctaatgtttatgcgttaaatattgatagtagtttatttaattattttaaaagtttaattcgagtgttttgccttttttaaattatcacaaaaaataatattaatatatataaaataaaactaaaataaaagaagtgcatatcaaaccaaaacaaggtaaacataaatacgaatatgtgatggttgaaacatttgtagcgtggtgctgaataaaaatataaaaaactcatgtgcttaaatgcagttcgatacgtaaatttaagcggtggtcaggattaaaaacttaagctaaattctgagttacaaaaaaaatataaaatgggtaaatatcttttgtttcaaacaaaaagtgtaaaagtaataactgccgaaaaatatttcggttgcttacatctaacatgaatagggcgtgggactgccgagatattgtaggttacaatcattacaatcattgggaaggatttggggtaggctacgctgtataaatagttgattattcgattagttcatatggtgaatacgtttatattattgttagtattgctgtcttacaccgagcagtagccgaattgttatgggttccagatatctcagtgggcggtgaggactagtttgtgttgcatgtggctttggtggcattgttgctagtttactcttgctagttagcttggaccagagaaaaacaaaacgagttacacgatacaaaatgggttaacagatcttaaacagatatggcaagttacttgtgcagctgcgcttttcaaaaacacgcacacggccaacaaaatttatcaattcgagtacctaaaaacgtctaaataagtctatttgagcgccaaattcggttttggtgtcgcacctgcgtctgatcctagggactgaagtatgtttaacaatactgttcgaggacattcaagagtttgagattcacgattttcacagatacggttcgatttgaattcgcttgcgtaaggaactaaggaaaagtcacagcgcaggcgcgaccccagtcgtcataattgacgactggcaacggaaacagatccatgtccagatccgtctgaaccgcctgctcccagcatcgagactcataagcaggcggccgcgatggatgggctctcaaaatttgcataagcgagtagtcctaaagcataactatcaactaatttggtatgtaaagtctttgtgtctttgtcatgggcattggcgcgatgagggctcaaggtcctgtggcaatggccaactagcaacagtatgaccaacatgccggcagatgccacaaactctgcaccatactcactcggatatgggaaccgattcgctgtgctcggtgtctcgtctttgtctctaaactctcgctgctcatcgtcatcgtcttgggaagcgtctaaacattggctaagcttggcggggatcactggtgtggtgaagctggaataggtgctgacatggcttttggcggcgctcagcccaacaatatgcatatgattgcacacactgtgctcgatttcgggatggctgctgttgttggtgacgttggatctgcagctactgctactggcgaagatcgttttcgtgggtgcggataagttattggggtgtgtattaatttgctttttgataaaatacttgaagagggttttgttcctctttagttacggttgaatctgcttcttgggtttttttaactcagcatcttcgtcacgcttaatctcggtgtaccgctcgcccttaagcgatacgatcttattgtcccggtagcgaaccagcttgcgaggctccatcttcggtaccaccggcttgtactcgcgctgggtggcattcttgtcaacataggagtacctagatggggtcaaaaaaataatattttacgtttggctattttaagttgatatccacttcaatatactgctatgtttatttgctttttaaggtgtacacttacctagcgataatacgattcttgagttcattatcgtcgacgattacattcttcttcatataagtagtatgcgacttgtcagtaatacactggttcgtctcttgacgatgcaagagaatctgggtggcgctatcgatgtcccccttggaaattgcgatgcagtgtttgatctagaaatggatttaaattcattacacagtattacaaaattctttaaatttcaccataaactaatacttacctcggctattgccgaatccggaaacatttcctggagcacctcagtctcgtccaggaagtagtcgcaagtggagctggagctgtcggtggaacctccatcgctagtctccgaaagatgttgggaacgcttgttgccgccacagccgccactgctgctgctgttcgatgagagctcgtctttttcggaagttgacgagttgcgagcacgcagcttggactccggaataatgctggagaggctcagggagctgtaaaaatattttatattaaatgtttctggcataggaatgagaatgaaaacgtactttagcgataagttgacggcgtctgggttttcctgggttttctccatatcggtaagctcattggccagcttgtagatccagtcacagatgatgccctggtcaatggttgaaaactcctcgaagtaggctcccatcatctccacaaagccctcaacatcgaagcatggatcctgggatgcctcctccaaaatcgaaataatgtacgaaagcacgatttcgtccacaacactaaagtcggcacccggaatgtggccgctgataaactgcaccaggctacgcttcaccatctcgtgctgcttctctaaattggtcataatggctatatagtttaaatggacttctcgaagtgtctcttgctggatcggcggtaatcaaaaagtttcccacgcagggcgtcactcaaaatgctgaaactcactagatggggacttccccggaacttagagcatgtcctctgacagtcgtattactgaattataatttagttttattgcaaattccgttttgaatagttttgatttagctagctgcgcctttcttttgcttcttcctgctgcaatcaataatactccgatacacaggctgctcctatcgattgggatataaggaacagaagtctatcgataagtggcttcgaatttaatgagttatattgacgatcggtaatttgctaatttttatactataatatatttcaagtaattatactgggcggttataaacgtaaaagttaaaaatttagaaattaaactcttgctaaccgatatcaatcacggtgcgcatctctaatgaaaataggaaaagcgaaagtcacgcaaagcagtaaacaaatttaaggtatatcgatagacgtacacccacaaccccaattccaaccggcaagttccggaacgtagtctcttctttaaaagtctatagaggtgagtcttttttgcctctacctcgtagctgccatacagatacgtatccttgtagggaagtggccaatccgatggacaagcgcgtaacagtcctgctgcccaatggtcggcggcagaatgtgaacgtgacggcgaacatgacgctgttggagattctggagacggcctgcttcaagcacggctacgatgcggaggagcactgcctcaagtttcacaacaaggtggtcggattgacgcaacagttccgttttagtggcctgcctaacaactgtgtcctggagatggagcaaacagaaaagcggcgcacactgagtaacgttcttgtctgcgtccaattgaacgacggttcccgccagcaaggggacttctcgcccaacgacaccatatggctggtggtcgagaagctttgcgaaacacatgtaaaggcttacgaaagccccgtcatcatctacatgcgcagcgaggtcataggacatgagcagatgcgacagaccactcttaagtccctaggaatcctcgagggtcgtgccatgatgcgtcttatcgacaaaaaacccgaggaccttaagacccaggcaaatgtgtataaagctcccgctgtcaagcctcgggt

SEQ ID NO: 24347 - DNA, 2132 bp, DROSOPHILA
gcgcagctagctaaatcaaaactattcaaaacggaatttgcaataaaactaaattataattcagtaatacgactgtcagaggacatgctctaagttccggggaagtccccatctaagaagcagcacgagatggtgaagcgtagcctggtgcagtttatcagcggccacattccgggtgccgactttagtgttgtggacgaaatcgtgctttcgtacattatttcgattttggaggaggcatcccaggatccatgcttcgatgttgagggctttgtggagatgatgggagcctacttcgaggagttttcaaccattgaccagggcatcatctgtgactggatctacaagctggccaatgagcttaccgatatggagaaaacccaggaaaacccagacgccgtcaacttatcgctaaactccctgagcctctccagcattattccggagtccaagctgcgtgctcgcaactcgtcaacttccgaaaaagacgagctctcatcgaacagcagcagcagtggcggctgtggcggcaacaagcgttcccaacatctttcggagactagcgatggaggttccaccgacagctccagctccacttgcgactacttcctggacgagactgaggtgctccaggaaatgtttccggattcggcaatagccgagatcaaacactgcatcgcaatttccaagggggacatcgatagcgccacccagattctcttgcatcgtcaagagacgaaccagtgtattactgacaagtcgcatactacttatatgaagaagaatgtaatcgtcgacgataatgaactcaagaatcgtattatcgctaggtactcctatgttgacaagaatgccacccagcgcgagtacaagccggtggtaccgaagatggagcctcgcaagctggttcgctaccgggacaataagatcgtatcgcttaagggcgagcggtacaccgagattaagcgtgacgaagatgctgagttaaaaaaacccaagaagcagattcaacctagcagtagctgcagatccaacgtcaccaacaacagcagccatcccgaaatcgagcacagtgtgtgcaatcatatgcatattgttgggctgagcgccgccaaaagccatgtcagcacctattccagcttcaccacaccagtgatccccgccaagcttagccaatgtttagacgcttcccaagacgatgacgatgagcagcgagagtttagagacaaagacgagacaccgagcacagcgaatcggttcccatatccgagtgagtatggtgcagagtttgtggcatctgccggcatagcccatccatcgcggccgcctgcttatgagtctcgatgctgggagcaggcggttcagacggatctggacatggatctgtttccgttgccagtcgtcaattatgacgactggggtcgcgcctgcgctgatcagacgcaggtgcgacaccaaaaccgaatttggcgctcaaatagacttatttagacgtttttaggtactcgaattgataaattttgttggccgtgtgcgtgtttttgaaaagcgcagctgcacaagtaacttgccatatctgtttaagatctgttaacccattttgtatcgtgtaactcgttttgtttttctctggtccaagctaactagcaagagtaaactagcaacaatgccaccaaagccacatgcaacacaaactagtcctcaccgcccactgagatatctggaacccataacaattcggctactgctcggtgtaagacagcaatactaacaataatataaacgtattcaccatatgaactaatcgaataatcaactatttatacagcgtagcctaccccaaatccttcccaatgattgtaatgattgtaacctacaatatctcggcagtcccacgccctattcatgttagatgtaagcaaccgaaatatttttcggcagttattacttttacactttttgtttgaaacaaaagatatttacccattttatattttttttgtaactcagaatttagcttaagtttttaatcctgaccaccgcttaaatttacgtatcgaactgcatttaagcacatgagttttttatatttttattcagcaccacgctacaaatgtttcaaccatcacata

SEQ ID NO: 24348 - protein, 453 aa, DROSOPHILA
MVKRSLVQFISGHIPGADFSVVDEIVLSYIISILEEASQDPCFDVEGFVEMMGAYFEEFSTIDQGIICDWIYKLANELTDMEKTQENPDAVNLSLNSLSLSSIIPESKLRARNSSTSEKDELSSNSSSSGGCGGNKRSQHLSETSDGGSTDSSSSTCDYFLDETEVLQEMFPDSAIAEIKHCIAISKGDIDSATQILLHRQETNQCITDKSHTTYMKKNVIVDDNELKNRIIARYSYVDKNATQREYKPVVPKMEPRKLVRYRDNKIVSLKGERYTEIKRDEDAELKKPKKQIQPSSSCRSNVTNNSSHPEIEHSVCNHMHIVGLSAAKSHVSTYSSFTTPVIPAKLSQCLDASQDDDDEQREFRDKDETPSTANRFPYPSEYGAEFVASAGIAHPSRPPAYESRCWEQAVQTDLDMDLFPLPVVNYDDWGRACADQTQVRHQNRIWRSNRLI

SEQ ID NO: 24349 - DNA, 6517 bp, DROSOPHILA
ctttggcttggtttggtttgttgctgtgctgtgccgtgccgcctgctgcctctgctgctcctccgttccctgtccataaagagatatgtgtgcgcgcggccatcgtcatcggtgctctggagttactgctcctcctccagttggacagtgctgaccgggttttaaagccagcacgcagctactgttgtgtttttttttttcctgaaagttacaatggaaaatttataatagctgccacaactgctgagttggagcgttggtggccaaagacgatttgtttgttttcataaccaccagccgcataccaaatttcatttcaatcggtcagatactgcaatttaaacgagtagtatcttatctaatcgatatcctaatcaagagcaagattggtatttagggctgtctacaaatccttcaaagcgattatagcccctttactgattgcttaccctcaagacatttattaggaaccagccataatccagccaaattggctgctccgctggccaaatgcggccggcttgtttgttagacagccggtggctagtcagtcggcttgtacggcatcagaatcggaatccgaatgggaacgagaatgggaatcatcggaatcatcggacacaccggactcaggtagtcgcgcgcaacgtcacattcggcatcagagaatgtatctgttagatacgcgaccgcgacttactgtacacactgcggcgctagaagtgatttattataatgcctcgctggatgcgattttcagttcgttgaattatatgccttgatttgatatatattcctgctcactggccgcgggcgtcaacaggtttttcgttcgattcggtggtggtgattcgcgaaggcaagtcgggtgaagaaaagtggcactgccacaggcgtgggcgctcgcactcggcgaatgccacatcctgtggcaacttcaggcattccagcaacagaaagagattcgaaataagagtaaaaggcgaatcgtgcaagctcgagtaaaactggtttttggcgcgctttatcaactctcgactgacattttccatttcgagtgtgtttcgaaagagtcttttgtgtcttactgccgccaagttgtggcaaaagtgtaacttcggtgaagagtggaccttacgactaaaaggaaactgaaactttaatactttgatttacttaaaaccacatttgtaaacataaatcggagtagtcgaatgaatggtttagcataccaagtgcagtgagtcatttgcgaataacttgagccggttatccacgcacacagcgcgtttacaatgaatacatttccgagtaaacaaatgcgaatcaaaaatccacagccacatgagccacaaattctgggcagagagaaattgcttgaaaattaacaaagcgttgcgcccacttgactttggctattcacttgataaatgtatacatatataaatatgtatatatacgtttatagtacgcttgccattgtcaggggggaggggttgtggtgggtggggggcgatgtgattgtgctgggatatttttttccattgcccgatgtcataattgcgttgcttatttctgtatttctgtattttggcttgcgatttggcgaacgttcgctcgagcgttatttcccccgcagtatctgtgcaactttttgtttttgtttcttcattccttttttttttttttttttttttttgctattattattgtagtctcgtcggttgccgcatttgaacgtatttcatacttttgcacaatacgtgacacatggctgatgggaagtgaccggtggagcaggcagcagggaatcgggtggggtgtgttggttcagatgtgtgtctaaacatagcctatagcctattgcctattgcccgtggaggcagcggcagtcattgacggcttatcacgcacaaattatatacatatgtgacagtagtcccgtcccggtgctatatagacatattatatctgtgctgtcaatatgttttttattgttccgatttgctgttcttatcagcgctgcatagtgaatctccgctggtatataacgaaaactattcacgcgatttaggttcggacgactataaatgtagctttaagtaatttcatgtgatcgcattagttatcattttattgatagccactgcctaactcagctgttagtccacctacgaatacgatagtcattcaaattagaagtgccgataagaagaggcttatctggaaatattgtcatatttattagtggttaaagtacgttggtttcggaatcatccagccatgccaaccatttcaattgagctctaaatgtgttcccatattcggactatatctacgaatagtcgtcaaatcaaacttgatgatatagttaaccttcgagtaaacaaattcgctgtgcattcaacaaccttctggatgttcacactttcatagagcccgtcatatatatcggtcacattgccatcacgctgagctggaagcccaccatccgttgcccccacgccgttccacgtcagatagccgagaagtgtcgtggtgataagataaggccgcgcgggctactacacgtaatccgtatccactcggtgacaaaccagatgtgagtgggtacagtaccttgctcttctgtgttcctgagactcgttcccgtgtctaatcaaccgtccgataagttcagttggatttggcggcacgaagccgacgacgaggaggtgtatgtatttcagccagctggccaacaagaaacgccctttcatactctcatacaaacggaaagtcgggaatgggttggtggggggtgcactggccattccgctccagacgattttgtcgatggtcgcatgtgaacagcgttgaatttctatgtttttgcaatgacacctctctcccgaatgccactccgaatcccaatcccccaactctttgcgcttaagccactccatgggtcgaaaaaagggagtagaaggggcagcgatgtgagtgcgacaataatgtagctttatcgctgatattggcgaaatccaaacgaaacttgtcatcagccaaattttgctgacatgagctgtttgcttttttatttttttttttttcgtttttttcttcttgtttttggtctacatcatgtttcatgttttccatttaatttatgtgttatgtgttcttgttgcttccattgcaggattctcgatttcaatatgaagcgccaaaaatgattgcagcgtttgcatcgtagtcttgaaaaggtttttttcattgatttaattagagccactgaaagcggttggccagccagaaaaacgataaaagggattccataccagtctgcgcccagcgccccccgaaacgcggtagtacagaaatatcaaaaaaagaaccacagccggaaaagggcaaaagttttattccgacgacgacgaagagcagaggacagcagcagacagattgaaaaacagcgaaatggacaaaaatctgatgatgccgaagcgttcgcgcatcgatgtcaagggcaactttgccaacggaccgctgcaagcacgcccactggtggccctactcgatggacgcgactgctccatcgagatgcccatcctaaaggatgtggccacggtggccttttgcgatgcacaaagcacctccgaaatacacgagaaggtaagtgttgtgcataatgattacatgcattccttctctgacataactctaataattcgttgtttatctaattccgtataggtcctcaacgaggcagtgggagctctgatgtggcacaccatcatcttgacaaaggaggatcttgagaagttcaaagctttacgcattatcgtgcgcatcggcagcggcacagacaacattgatgtaaaggcggcgggcgaactgggcatcgccgtgtgcaacgttcccggctacggagtcgaggaggtggcggacacgacgatgtgcctcatcctcaacctctaccggcggacatactggctagcgaacatggtgcgcgagggcaagaagttcaccggacccgagcaagtgcgggaggctgcgcatgtaagtcattggccaaaaacgatatgtaaaatcagtgaaattctacggcattggtattgattgaaaatagttattcttttaagggcatataatgcttaagctccccgcgaaggtagcagaaaaattttagaagcaaaggaaaagtcagttgatattatttatgctagtcacgtacatagattacagatagtataaaacctacatacaatatatttacaaacataaaaggaaaacgatttgtctatttccatttgagttggacgattgcgaattgtattgataaaaacaagtcaccatgacatttgtatagcttggtttttaacgaatgctttcatttgccatggatgtctgataaaatagattgttttcatatttaccagattattatttcaccgattgaattcagtggctacagctcataaatatagcgtacgcttattgccgtattcaaattacttcatccaatccaaatgcaaattgcgtgtttcaaaatgcatgatttgcatttaatcaagactttcagctagttataaataatagaggagctagaacgcacatatatgagcagcattaatatttaatcgataccaccaagtatacctttgaatgcatctaactggaacaacaccatctgcttgttttctcaacgcagggctgtgcacgcatccgcggcgacaccttgggtctggtgggactgggccgcattggtagcgccgtggccctgcgggctaaggcgttcggcttcaacgtcatcttctacgatccctacctgcccgatggcatcgacaagtcgctgggcctaactcgcgtctacacgctgcaggacctgcttttccagtccgattgcgtctcactgcattgcacgctcaacgagcacaaccatcatttaatcaatgaattcacaattaaacaggtgagcaggagtttctctcaaatgtatcctgcgattgagtaatattattattttgctacagatgcgacctggtgcatttctggtgaacaccgcacgcggcggtctggtcgatgacgagaccctggcgttggcgctgaagcagggaaggataagagctgccgccctggacgttcacgaaaacgaaccttacaatgtatttcaagtaagagattgttgtaaaacgagacattttacgcaatctgagttggcgccgcacccacgatgaatgtgatcgcaactaatgaatgttttcttttggtttacagggcgcactgaaggatgccccaaatctgatttgcacaccgcacgccgccttcttcagcgacgcgtccgcaacggagctgcgcgaaatggcagccaccgagatccggcgggcgatcgtcggcaatattccagacgtgctgaggaattgcgtcaacaaggagtacttcatgcgcacgccgcctgccgctgccgccgggggcgtggcggcggctgtttatcccgaaggtaaactacaaatgatatcaaatcaagaaaagtagagagacagagacaggcgagcaagggagcgttattacaagtaaaaaaaaaaacaaatcgaaacaaaacaaaacaaaaaatatgagaagaacataagaaatcaaccaacaaaatccaagcaaaaatacaataccagaaatcgttaaaaagaaaaacacacacataccttacacacacacacacacacaccataccatagcacacccacacaagcacacgcacacgcacacagatgtagcaagcatcccaaacatacttctattctttctctgactcattcgaaagtatatatatatagacgacgggagtggagcgcgccagagagagtatataacatttgaagcacgattcaagaacacacgctataagagttgatatataagttacacagtttaagctatacacatatatagatctatatatatgcatatatatatttatatatgtatatatataaatatgtatatatataaatatatagtggctaagcgctgcaccgagatcagaatgtttgacgtcgatgaggaggattagaacgcagccgatgttggccaaaagttacgtttatccaatatgtatctgtgtacgtatatgcattgtttcggcccttctagaacagagaacgcattcaaaagcatctctgaaatatgtttagagcgttttcggcgagtttccaaactacgtcgctatcgaacttagtaagaattcctttaactgaagttcaagtaagctagatttcttcagattaattcaaaacagcgtttacgtggccaattgtcttctccttagtctacaacaaatacatacgtgcatatttagtgacatagtgaatatacagataaacgaataagtttcaagataatttacacatgaaaacaaggtgaaagtaaacaatatgatggattattgttgttgatgtttcgcaactgacgtcccttcatccctccctcccaagaatccctcactaagtatccggctttaactttaaccgaaactagaaac

SEQ ID NO: 24350 - DNA, 1679 bp, DROSOPHILA
agtaaaactggtttttggcgcgctttatcaactctcgactgacattttccatttcgagtgtgtttcgaaagagtcttttgtgtcttactgccgccaagttgtggcaaaagtgtaacttcggtgaagagtggaccttacgactaaaaggaaactgaaactttaatactttgatttacttaaaaccacatttgtaaacataaatcggagtagtcgaatgaatggtttagcataccaagtgcagattctcgatttcaatatgaagcgccaaaaatgattgcagcgtttgcatcgtagtcttgaaaaggtttttttcattgatttaattagagccactgaaagcggttggccagccagaaaaacgataaaagggattccataccagtctgcgcccagcgccccccgaaacgcggtagtacagaaatatcaaaaaaagaaccacagccggaaaagggcaaaagttttattccgacgacgacgaagagcagaggacagcagcagacagattgaaaaacagcgaaatggacaaaaatctgatgatgccgaagcgttcgcgcatcgatgtcaagggcaactttgccaacggaccgctgcaagcacgcccactggtggccctactcgatggacgcgactgctccatcgagatgcccatcctaaaggatgtggccacggtggccttttgcgatgcacaaagcacctccgaaatacacgagaaggtcctcaacgaggcagtgggagctctgatgtggcacaccatcatcttgacaaaggaggatcttgagaagttcaaagctttacgcattatcgtgcgcatcggcagcggcacagacaacattgatgtaaaggcggcgggcgaactgggcatcgccgtgtgcaacgttcccggctacggagtcgaggaggtggcggacacgacgatgtgcctcatcctcaacctctaccggcggacatactggctagcgaacatggtgcgcgagggcaagaagttcaccggacccgagcaagtgcgggaggctgcgcatggctgtgcacgcatccgcggcgacaccttgggtctggtgggactgggccgcattggtagcgccgtggccctgcgggctaaggcgttcggcttcaacgtcatcttctacgatccctacctgcccgatggcatcgacaagtcgctgggcctaactcgcgtctacacgctgcaggacctgcttttccagtccgattgcgtctcactgcattgcacgctcaacgagcacaaccatcatttaatcaatgaattcacaattaaacagatgcgacctggtgcatttctggtgaacaccgcacgcggcggtctggtcgatgacgagaccctggcgttggcgctgaagcagggaaggataagagctgccgccctggacgttcacgaaaacgaaccttacaatgtatttcaaggcgcactgaaggatgccccaaatctgatttgcacaccgcacgccgccttcttcagcgacgcgtccgcaacggagctgcgcgaaatggcagccaccgagatccggcgggcgatcgtcggcaatattccagacgtgctgaggaattgcgtcaacaaggagtacttcatgcgcacgccgcctgccgctgccgccgggggcgtggcggcggctgtttatcccgaaggtaaactacaaatgatatcaaatcaagaaaagtag

SEQ ID NO: 24351 - protein, 386 aa, DROSOPHILA
MDKNLMMPKRSRIDVKGNFANGPLQARPLVALLDGRDCSIEMPILKDVATVAFCDAQSTSEIHEKVLNEAVGALMWHTIILTKEDLEKFKALRIIVRIGSGTDNIDVKAAGELGIAVCNVPGYGVEEVADTTMCLILNLYRRTYWLANMVREGKKFTGPEQVREAAHGCARIRGDTLGLVGLGRIGSAVALRAKAFGFNVIFYDPYLPDGIDKSLGLTRVYTLQDLLFQSDCVSLHCTLNEHNHHLINEFTIKQMRPGAFLVNTARGGLVDDETLALALKQGRIRAAALDVHENEPYNVFQGALKDAPNLICTPHAAFFSDASATELREMAATEIRRAIVGNIPDVLRNCVNKEYFMRTPPAAAAGGVAAAVYPEGKLQMISNQEK

SEQ ID NO: 24352 - DNA, 12454 bp, DROSOPHILA
agcttttattcagtcttagactaattggtacactgatatctacatagttatcattcgatagtcaaattaccatttccgctattttttagagcaacattaaaatttacattttgccacaaaaaccaaataatagttttttatataactttctacattatacatttttttcgatagaaagttaaactattaaatactataaaatacaacaattctaaaataactaagagtatctaatgatcggtgcctcttgagtgttcattaatttcgcactcgcatcaaggtaaatggttgtgtctggtgtgtgaacttgaaactttattgattagcggaaaggtaattgatacacgcacaaattcacttgcgcttgacctattaaatgcactgtgaaaaatatgttaagaaattgttaagatgtgattctggatagtgtaccaaatttaatttgagttgagaaatcttttagatatacaaacattttgtattttaatattgtttctcgttgtctttggtattatgtgataaacaagttctatgaatgtattatacattttatttttttgtgtatatcataccgctttttctctcctctcgtttttggctgtgtgggcggcattctttgaaatgccggctgacgaacggactttgggattgttgtaaacaaattcgggctataaatacgcaagacatgggcaacaaccaggaggcgaggcggttagataaacggaggaagtgcggtcaatatgtagatacatgagtatgtacctgactgttatcaggtccaccgatcggcgaccgacccaacccccttttgccagaagataaagatacaacgccgagttgtcatgtggccgctttgtgtgtttttatcacacacacactctgtatttttcttccaagcttgcagcccgctcggcggttcgtgaagagcaaattcgatttctaaattttatatttcactctcgaaggcggccgcttttgtattttcgcttcagtcgacgcgcagcactcagcacgaacaaacgtttgacgcgtatctgcgagatacggatacgagtacgacgagtacatatattcggttggtttttggagcaatcgcatgcagtatatgcgtatatattatacggtgtcttgattcattccaccgcggtgcagtgcatatacagtcggaactagaccttccaccgaccgaaagcctaatggatttttccagtcatgcttcgaattgtggaactgcaagctcatccgtcggactatttcacactaattagctccatcatctggccgttctaataactcagctgctctcacgcgagcagctcttcgtttttttattttttgcacttatgtaatgtgttttcgtaacatcgacgtcgagcagaatataattgcagggaaagcagtatgtgaaaagcgccagcacaaaacaagcaaacagataaatgacactgaaagaaaatgtcgggctgctaaattgaattatctattgtggggtggacaatgtaactgtaattgtagctatgaccgaatcaaataacccgagtgatgcactttcaaatacttagctttgaccactccaaaccggttagccgttccaattgttttctttcattttttgtgctctcatatctgggggccagtattttgtaatcacttcatttggatcgtctggccagcatgcgttcgtcgataagacatgtgacctggccacgcattcgttgccccataagttctcattccgaatttcattcaatttgtacgtattttttgcacgactggctttagatagggattcaattacgacatccgcacgcgctagcctatcgccaataatttgattaataacttgacaaattctggaagtgctggcgtggcatgactggaggccggttaagcgccctcctcttatcactgaattgcgtctagagggttctgcgtttagtcatggaccacaggaatttataactccaagccagggacattcgctcttgacgcctttgcgttatctgggcaaactcgttttgggccaaatacccaggtgaatgctcactgtgattcggagacggcaaacaaaaagtgagggcaaatattcacaactgattaaaagttgggaaacgaacaaactgcgcaaaaagcagctggctctccctatataaaacccccccatttcaccattatatttgggggccaaagtatctccgccatttcttggctgattatcaaaaaagcgagcgacggactggcgtatggcatcacgtgtgcttttttccaccaagcgatcccccgatctcaacggtctagtctggctttggacgtatgtaaattccccccgcatccattcaattgtgaacttgtttcgtgagcgtgagggaatttcataactggcccactggcctggcaacgagttcggaacattcggttgatcggtgacacagttaaaacccagaacatgaccatgacgtaaaaacttctaggctatcttatcgcgtttacagcagccgagggtcaggagttcggtgtttagggggtggcactggcactatcttttacgtggcttgtttgtcaacaaagccgccatcgattaatcagttggaagtgatataatagtgggctgataagatcttcactaagattgtctctttctttcagttctattttgtaaagctacaaaatgcatagagcccacacagccttcagcctggccttgtcgccgatggcgcacaagaacttcgccacatggctgctcaagagcagcagcagtcagcaggtgagtttggtcgatataaccataactccaaagaaaaccccaactaatgagcccccaatctttggcagatggccaaggtaactgcagcggccgctgtgcgcacctacaactccgcagctgccgaaccttttgccaacggcagcaccgcctcctacgtggaggagatgtacaacgcctggcttcgggatcccacttccgtgcacaccgtaagtatccctattaaacagggttttatttctgcgcctttttaaattcaactcttgattttgagtcatcgataaaccagtttctagtgtttatttctgaagcggaagtgctttattaccttttaaaaaccacttaaaaatgttaagagcttatactaaagggaaccaaacttctctgcaataaaaaatataataaaagcctaataaaacggtgatcctggaataatgcattcacaataaatgacatgacaataaatccttattgattcattcttcttttagtcctgggacgcgtacttccgcagcaacagctacgttagcccgcccaacttggcgcccgtgcaggccaacactctgccgctgaccgccttcaactttggaggagccgtcgccggcgctgcgcccgactccaagaccattgacgaccatctggccgtccaggccatcatcaggagctaccaggtatgtcgactcgtgctggctcaattacttggtttccagccgatcggtggagattgcagccagagttggctctttttgttttgttctcctaggttcagttaatgtttatgtttagattatgatcagtagagttgcctttgcccccccttatgtgtgttcacaattgtccatttacccagaccaaatcatttcgaatccagtattcatggtagattagaaaatacttcgttgactcacccacgccatccacagtatccatagagttagacattcactccttcatgagtagtttggttttctgttcgatcacatccatttcggttcaccaaatagttatatattaaggggatttgtcacttttgattgcaccattcctcattagctaataagataaataaatatcgaaattatttgcaattatccaagggtattctgattaaattgccagagaagcagttaattttaatttgcatatgatatacatttttgctaaagttaagcctgttgttttttagcttgttaagtttctaaagccatacgataacttcctggcgtacgcatttaacttgatatacctatgtcctatgatctaccctgtacacctctttacatataatcaaccaatctgtctacgatatgtatgtaccatatagtcacgaggtcatttggcatctgatctggatccgcttggaattttgactcgcgaaaaaaccgtctgcaaggatgggctagcacgtcgtgctaacgaagatgtgctcaggcagcactctgggtttttgtttggtaaattcttttacacaactgtttcatttaacccccagtcgcaccactcaatcccaaacctgatgcaccatcctgctactacccactcgcctagttactaagttcagcactcaaacttacgcaattggttttgaaagtaactcgtgcttaccatttaacagccgaagaaggttaaatgaaattcggagttgatgaggaagggacacatgaccctttgtaggattaagttagcgagttccgtttagttgaaggtttttttaatatttcctgtaagtaaccttggtgtttggctttctcgaagtttgtatctttccgttaaggtttattcttaagcatcctgtcgactctatatctctcagcaccccagttccatattatgtctctgttcttgcacttggaccagcgattctcgattaacccacgaaattcgaacacattgccatctgtcaatcattgtctactgatcctgtcgaagcttttagtgttcgctttatttgtatctgtttttgttcaagccatatctattctataattttaattgattattttcttttcctttacttttatataactgcttcctaacctaaatgtaaacaaatcgaaaaacacaaactgcaatcgaaactcaacccaaaaaccaaaatcgccaatcgtctcaaacaatgttttaaaacaaaaattcaaaattctctcttttcgtattatgtgtgtgtgttttgaaaacctaaaccgaaaccgaaccaaatccaatccgaaaacattgttattactactaccaccaccaacaccaccaccacaactaccaaccaaatacccaatactgacacgttagattcgaggacataatattgctcacctcgatccacttgaaattaatacaccagaattgcctggcaactcctcgacgaaatccatttacgctaatttcagttttggtaagtaaatccggcgttggtcgtaacacctggctattagcccaaagcataacctgttttagttcttaacccttgatttgtaaatacttttaaaaccaaatattgtgttagtgacgttctctgtctttcacccgcacacacgatccccggcatcaaaaattcgattatcgaacccaaccacacaaatgtatccaatgatatatagaaccaagtaaatatgcgctatatattgccagtaaatttgtgttacattgtttgcccatttctgcctttaattgttataatttggatgtcgtgccaaaatatataaatatatttaagtatacctcaccgattgattatgtcataaatagattgcatgattgttttgcatttctcaagcgaaataaagggaaatcgattgataagccccctcagtctgattgcaagtgaaagattatgagcccattaaaaacaaatttaagttatcaccgatagtgtcttatgcatgtcgaacaaatgtccgaacgaggaacccgtgaacaaaccagctgagcatgagcatccgatcccaatttaaactctgtactgcgtacaaacacctccgaatagaagcaacaaaaatcattacactccgaatttcaaaccaacatctgccgcctacaatttactaatcccacaccatgacacaatcactcaaaaccccttactaaagtcttaacccattgttccaacccactgcgcaaaaaacaggcgagcaggacatggatcgccagttcaagctgcccagcactaccttcatcggaggcgatgaggcttcgttgcccctaaagtgagtaaccccactaaaggatattgaatgacccaactaatatgtgacattccctttattagggaaatcctgaaccgcctggagaatgtctactgtaataagattggcgtggagttcatgttcatcaactctctggagcaatgcaactggatccgcaagcgttttgagacccccggcgtccttaacttctcgcccgaggagaagcgtctgatcctggcccgtttgacccgtgccaccggctttgaggctttcctggccaagaagtactcttctgagaaacgtttcggtctggagggttgcgagatcatgatcccagccctgaaggagatcatcgacgtatcaacggagttgggagtggagtcggtcatcatgggcatgccccatcgtggacgtcttaacaccttggccaatgtatgccgcaagcccttgaaccagatcttcacccagttcgctggactggaggctgctgatgatgtaaggaaagataaaaatcttcttggtagagatacttaatgactttgctttccagggctctggtgatgtcaagtaccatctcggtacatacatcgagcgattgaaccgcgttacaaacaagaacatccgcctggctgtcgtggccaacccgtcccatctggaggctgtggatcccgtggtgcagggcaagacccgtgccgagcagttctaccgtggcgaccaggagggcaagaaggttatgtccattttgatccacggtgatgccgccttctgcggacagggcgtcgtctatgaaactatgcatctttcggacctgcccgactacaccacccacggaactatccatgtggtggccaacaaccagatcggtttcaccaccgatccccgtttctcgaggtcctctccctactgtacggatgtggctcgtgtcgtcaatgctcctattttccacgtcaacgctgacgatccagaggccgtgatgcatgtgtgcaaggtggctgctgagtggcgtgctactttccacaaggattgtgttattgatttggtcggataccgccgcaatggacacaacgagatcgacgagcccatgttcacgcaacccttgatgtaccagaagatccgcaagcacaagaactgtctcgacctgtatgccgacaaactgatcgccgagggcactgtcaccgccgaggaggttaagtcggttgccgctaaatacgagaacatttgcgaggaggcattcgctctggccaagaccgagacccacgtcaagtacaaggactggctcgactcgccctggtccggctttttcgagggcaaagacccattgaaggtagcgcccactggagtgaaggaggagaccctcatccacatcggcaaccgcttctcgtcgccaccaccgaacgctgctgaattcgtgattcacaagtatggtcgagaaaaattacttaaacttcaaatactaattaaccaatttcttcctaaggggtctattgcgagtgttggccgctcgcaaggcaatggtggacgaaaaggtcgctgattgggctttgggagaggccatggccttcggctctctgctgaaggagggaatccatgtgcgcctttcgggacaggatgtcgagcgtggtaccttctcgcatcgccaccatgtgctgcaccaccagctggtcgacaaggccacttacaactcgctgcagcacatgtacccagatcaggcgccctactccgtctccaacagctcgctgtcggagtacgcagtgcttggtttcgagcacggttactcgatgaccaatcccaatgccctggtgctgtgggaggctcagttcggagacttcagcaacacggcccagtcgatcatcgatcagttcatctccagcggtcagtcaaagtgggtgcgccaatcgggtctggtaatgctcctgccccacggcatggaaggcatgggccccgagcactcctcgtgccgcgtggagcgcttcctgcaaatgagcagtgacgatcccgactacttcccaccagagtccgatgagttcggagtgcgacagctgcacgacattaactggatcgtggcaaactgctcgacgcccgccaactactaccacatcctgcgccgacagatcgcattgcctttccgcaagcccctgattctgtgcacgcccaaatcgctgctgcgtcaccccgaggctaagagtcctttcagcgagatgagcgagggcagcgagttccagcgcatcatccccgacaacggtcccgccggccagaatcccagcaatgtgaagaaggtcgtcttctgctcgggccgcgtctactacgatttgaccaagacacgtagggaaaagcagctggagggcgaaatcgccattgtgcgcgtggagcaggtgagtccccataaaaatatttatattggtcgatctgctaaagtattttgtatgttcagatctctcccttccccttcgatctggtcaaggagcaggccaacctgtacaagaatgccgaactcgtgtgggcccaagaggagcacaagaaccagggcagctggacctatgtgcaacctcgtttcctcaccgccttgaaccacagccgcgacgtcaggtaggtgccagggctatatttaagcggtcagcaactatccacccacaagagcaggagcactccgaccacgtcctcactccctgatttttctctcaggctcagattcttctatagtctcagtttatctttgtctatttcataaagtgcactattttcatcgtgtactgtactttttatctttgattctctaaacattttactctcttttgctattgtttcactacttttgcattaaattaggctttaattttaccatttcatttttcatcgcagtcgctatcattttaaatgccccagccgtatgatattaacttaatatcaaataaaacttaatttaatataaataatagttcataaagcttacgaaatgtgttcaaccttaattccgacaacaaaaggtaccttcatttactatctttattgataagaaagtatcattcggccaaggtgaatttaaaatttttattagagcttcctctcactcctcacatgcctcctagctgctgtatttatcacgctcccactttatatatctctctacctatcttattagctagttattattagtcccaacaaatgataaaacaccctatacacaaaactcaaacactcattgaacggatatccgcttctgatttctattttcgtttgaatgagcatgtccagcaccgcaaaagaaaaccaaaaatcattttcactaccaagtttaagaatccattactgaaaatttatcgcagcaattctccaagcgagtccatcagcaaattggcttcatccatacaatatttcatcctatttatttttactgtgcatggctttttatttataatttagtttaaactcttgagttacgtttattttcttatcgaaacttgtaaaagacaagcaaaccagttgtgtgttattttgaatctcccaaattcccaccccaaaatccactcgttgtgtaaatatgtacgtgcaattggcaaaatctaaagaagaaaaaatttgaaaaaaaaattcgaaactacccaagaaacgaaaaaagcaaccaaaaacaaatcctttctctctttctctctctctgtgtatgtgttattgttacagccaaagcgatgaacaatcctcctccaccaatactaccactactactgatcatactaatcatgaatccgacaccgattccgattcaaaatctaaaccgtggctgagtcgcatgttcgccgccccgaactcctcgaccggcggcgatcctaaggatccggcgcaaacccttggcggcgacttcaatgccgccaagcactttgacttaaagaatgtacgacacgatttcaataggcccgcgggcatcgcggccgctccgggcgcccgcatagcgaaaaccggacgcaaaattaggtgagagggcaagctcagctcagctccgcaacgatgcgcgcggtcaatgaactgtatatctacaattaatctaatcaactatcaactaccaactactatctgcaacttaactatcctaccaaacggaaattaactctcagttccgttaactcttcatttgtctcctcgtttcccttttatcagtttcctcgattgcgtttctgatttctgttgtttggcatgatgattgttccatgatccagcgcctcatggtacccccggttaaaaagaaatcaacacaccaaaccctacttactactcttaacctccagctcaacaatctaatcctctaatcctaaagcactgttcttcttttcagttctgagtttttgtttgcacctcgcgcgtttcgaaagttttgcatttgtttttgataagtttgccctatttcgctgtttgccagtccagtttccatcgtaaaacaaaaaaaaccacagttaaccccgacatttgtactgctccaatttaaccaaagttgtgctgtaatctgtacttgaatttgtttgtttgtatgtgtgtgtgctgtctatatagatcacaaacaagttaaaaacttccacaactaccttaaaaacagagtttttagcgcttataggcagacatctcatacatatgccatcctgatctaggcaatttgctgtttcacgaagcttgagaattgatgataaaaatctaagtgattctgcatcgcagaattaattggggtccatttcaatgtttgggttcggtgtggtttcccctaatattactctcgacttaagatctctatacattttaatcttaatatttaacatcctgcgcttgcctaaccctcatttcattgaacatttgccataactgtgctaaaagcaataagagaaactagactaaagttcagtgcacgtgtctaaccgaatcagcaaatcgaataccgaatgttgtgccaactcaccgctcgatacctcaagtatccccactaatcccaactattttcctaatccacagctacgtcggacgcgcctgcggagcctccaccgccaccggatccaaggcccagcacatccgtgagctgaatgcgctgctcaacgacgcgatttcgacctaaggagatgggtcttgatgaagatgagattgggatgaagatggagatggagacgatgaatattaattacgattatattttgtattgaaacgtatgcagactctttgatacgattttttgctgacgaaattgttaagagcattgtgtgaaagtaatgaaatgttaaatattagtttagtgaaattacaagagctaacggcaaccaagtaacaaataacacgaaatgttaagtgtttagtaaagaatcaaacaaaacgaaaaagaactacaaccactcacagcaagtctttaatacaaactaaagagccaagatctagtaaatagccaactaacctatgcgcatacatttgaagtgatgagaactcgcataggaggaggatatcactatactttcggaatgaataaaaccctttataatcttatttcttattcctatgtttaatatttattttattgtaatatatataactaaactatctcaagccacgcgaagttttgacaccctttatcgatcgcaggccaagaaatcattagtgtttttgtttgcctaagttacacatttttgtttaaataaatgaacaagtataatacttaacaatgacaaaccaaacagagctgtgcttaagttcatcaccgatcgaggagccactatcagggatatagttcgcgttttatatactccccagtaaattggactggaagctttgattacgattctcaacaacagcttgtgtttcaaaccaagcaaagcgtgttttaatttttttggataccctttatggagcgcatcaaaatgcagccaaaatgctttaattgtttttgatccacggacggagtccaatcaggaccctcttaaaaatatttacaaaacaaaatatatatacttaaaaactaatattgcacttgtctcgcaccaatataagatattgaactgtagagtgataacgctaaacttttccaagaaaaacaaaatgaacataactattttataaaaagagagaacttaagagagagcatgtgtgtgcgacattgtcgaaaatttaacttcatctctaaattttagtgttactacaacaaaatataaatcacaaatttgcaccaagtaagtaagtagaatgttaaaatcaaatattacacaaggcaaaatgagttgtcaacagccctgataggaaacgatttttgcaaataatatgaaatgtggggataacacgattaaaaatgaaatatacaatttactatttaatgcatggtacactgcttgttttactcaatataaaaaggggaaaaccttttaaaacttctaggctccaagaaccagtttcaatgctttcaattttcttctctttttggaagacttgcagtaactagattttctacaggaagttgcaagactggccgttgagcattttccattttcactgctccatc

SEQ ID NO: 24353 - DNA, 3506 bp, DROSOPHILA
cagcactcagcacgaacaaacgtttgacgcgtatctgcgagatacggatacgagtacgacgagtacatatattcgatgcatagagcccacacagccttcagcctggccttgtcgccgatggcgcacaagaacttcgccacatggctgctcaagagcagcagcagtcagcagatggccaaggtaactgcagcggccgctgtgcgcacctacaactccgcagctgccgaaccttttgccaacggcagcaccgcctcctacgtggaggagatgtacaacgcctggcttcgggatcccacttccgtgcacacctcctgggacgcgtacttccgcagcaacagctacgttagcccgcccaacttggcgcccgtgcaggccaacactctgccgctgaccgccttcaactttggaggagccgtcgccggcgctgcgcccgactccaagaccattgacgaccatctggccgtccaggccatcatcaggagctaccagattcgaggacataatattgctcacctcgatccacttgaaattaatacaccagaattgcctggcaactcctcgacgaaatccatttacgctaatttcagttttggcgagcaggacatggatcgccagttcaagctgcccagcactaccttcatcggaggcgatgaggcttcgttgcccctaaaggaaatcctgaaccgcctggagaatgtctactgtaataagattggcgtggagttcatgttcatcaactctctggagcaatgcaactggatccgcaagcgttttgagacccccggcgtccttaacttctcgcccgaggagaagcgtctgatcctggcccgtttgacccgtgccaccggctttgaggctttcctggccaagaagtactcttctgagaaacgtttcggtctggagggttgcgagatcatgatcccagccctgaaggagatcatcgacgtatcaacggagttgggagtggagtcggtcatcatgggcatgccccatcgtggacgtcttaacaccttggccaatgtatgccgcaagcccttgaaccagatcttcacccagttcgctggactggaggctgctgatgatggctctggtgatgtcaagtaccatctcggtacatacatcgagcgattgaaccgcgttacaaacaagaacatccgcctggctgtcgtggccaacccgtcccatctggaggctgtggatcccgtggtgcagggcaagacccgtgccgagcagttctaccgtggcgaccaggagggcaagaaggttatgtccattttgatccacggtgatgccgccttctgcggacagggcgtcgtctatgaaactatgcatctttcggacctgcccgactacaccacccacggaactatccatgtggtggccaacaaccagatcggtttcaccaccgatccccgtttctcgaggtcctctccctactgtacggatgtggctcgtgtcgtcaatgctcctattttccacgtcaacgctgacgatccagaggccgtgatgcatgtgtgcaaggtggctgctgagtggcgtgctactttccacaaggattgtgttattgatttggtcggataccgccgcaatggacacaacgagatcgacgagcccatgttcacgcaacccttgatgtaccagaagatccgcaagcacaagaactgtctcgacctgtatgccgacaaactgatcgccgagggcactgtcaccgccgaggaggttaagtcggttgccgctaaatacgagaacatttgcgaggaggcattcgctctggccaagaccgagacccacgtcaagtacaaggactggctcgactcgccctggtccggctttttcgagggcaaagacccattgaaggtagcgcccactggagtgaaggaggagaccctcatccacatcggcaaccgcttctcgtcgccaccaccgaacgctgctgaattcgtgattcacaagggtctattgcgagtgttggccgctcgcaaggcaatggtggacgaaaaggtcgctgattgggctttgggagaggccatggccttcggctctctgctgaaggagggaatccatgtgcgcctttcgggacaggatgtcgagcgtggtaccttctcgcatcgccaccatgtgctgcaccaccagctggtcgacaaggccacttacaactcgctgcagcacatgtacccagatcaggcgccctactccgtctccaacagctcgctgtcggagtacgcagtgcttggtttcgagcacggttactcgatgaccaatcccaatgccctggtgctgtgggaggctcagttcggagacttcagcaacacggcccagtcgatcatcgatcagttcatctccagcggtcagtcaaagtgggtgcgccaatcgggtctggtaatgctcctgccccacggcatggaaggcatgggccccgagcactcctcgtgccgcgtggagcgcttcctgcaaatgagcagtgacgatcccgactacttcccaccagagtccgatgagttcggagtgcgacagctgcacgacattaactggatcgtggcaaactgctcgacgcccgccaactactaccacatcctgcgccgacagatcgcattgcctttccgcaagcccctgattctgtgcacgcccaaatcgctgctgcgtcaccccgaggctaagagtcctttcagcgagatgagcgagggcagcgagttccagcgcatcatccccgacaacggtcccgccggccagaatcccagcaatgtgaagaaggtcgtcttctgctcgggccgcgtctactacgatttgaccaagacacgtagggaaaagcagctggagggcgaaatcgccattgtgcgcgtggagcagatctctcccttccccttcgatctggtcaaggagcaggccaacctgtacaagaatgccgaactcgtgtgggcccaagaggagcacaagaaccagggcagctggacctatgtgcaacctcgtttcctcaccgccttgaaccacagccgcgacgtcagagcctccaccgccaccggatccaaggcccagcacatccgtgagctgaatgcgctgctcaacgacgcgatttcgacctaaggagatgggtcttgatgaagatgagattgggatgaagatggagatggagacgatgaatattaattacgattatattttgtattgaaacgtatgcagactctttgatacgattttttgctgacgaaattgttaagagcattgtgtgaaagtaatgaaatgttaaatattagtttagtgaaattacaagagctaacggcaaccaagtaacaaataacacgaaatgttaagtgtttagtaaagaatcaaacaaaacgaaaaagaactacaaccactcacagcaagtctttaatacaaactaaagagccaagatctagtaaatagccaactaacctatgcgcatacatttgaagtgatgagaactcgcataggaggaggatatcactatactttcggaatgaataaaaccctttataatcttatttctt

SEQ ID NO: 24354 - protein, 1001 aa, DROSOPHILA
MHRAHTAFSLALSPMAHKNFATWLLKSSSSQQMAKVTAAAAVRTYNSAAAEPFANGSTASYVEEMYNAWLRDPTSVHTSWDAYFRSNSYVSPPNLAPVQANTLPLTAFNFGGAVAGAAPDSKTIDDHLAVQAIIRSYQIRGHNIAHLDPLEINTPELPGNSSTKSIYANFSFGEQDMDRQFKLPSTTFIGGDEASLPLKEILNRLENVYCNKIGVEFMFINSLEQCNWIRKRFETPGVLNFSPEEKRLILARLTRATGFEAFLAKKYSSEKRFGLEGCEIMIPALKEIIDVSTELGVESVIMGMPHRGRLNTLANVCRKPLNQIFTQFAGLEAADDGSGDVKYHLGTYIERLNRVTNKNIRLAVVANPSHLEAVDPVVQGKTRAEQFYRGDQEGKKVMSILIHGDAAFCGQGVVYETMHLSDLPDYTTHGTIHVVANNQIGFTTDPRFSRSSPYCTDVARVVNAPIFHVNADDPEAVMHVCKVAAEWRATFHKDCVIDLVGYRRNGHNEIDEPMFTQPLMYQKIRKHKNCLDLYADKLIAEGTVTAEEVKSVAAKYENICEEAFALAKTETHVKYKDWLDSPWSGFFEGKDPLKVAPTGVKEETLIHIGNRFSSPPPNAAEFVIHKGLLRVLAARKAMVDEKVADWALGEAMAFGSLLKEGIHVRLSGQDVERGTFSHRHHVLHHQLVDKATYNSLQHMYPDQAPYSVSNSSLSEYAVLGFEHGYSMTNPNALVLWEAQFGDFSNTAQSIIDQFISSGQSKWVRQSGLVMLLPHGMEGMGPEHSSCRVERFLQMSSDDPDYFPPESDEFGVRQLHDINWIVANCSTPANYYHILRRQIALPFRKPLILCTPKSLLRHPEAKSPFSEMSEGSEFQRIIPDNGPAGQNPSNVKKVVFCSGRVYYDLTKTRREKQLEGEIAIVRVEQISPFPFDLVKEQANLYKNAELVWAQEEHKNQGSWTYVQPRFLTALNHSRDVRASTATGSKAQHIRELNALLNDAIST

SEQ ID NO: 24355 - DNA, 4238 bp, DROSOPHILA
cgccatcttcgtcatcgtactcctcgtcctcctcgtcgtcctgctcatcgtcctttccctgctgatcccaccaggagagcacgcctaggccggattcgttaatggcaccctgaaggatagaagcactcgttaaatacagatttttatcaggggcggcaaaaaactaacaataatcctgtacggtgtcttcacttcttgggaggtagctgatgcgactgcagcggatgtgctagctccctgctgagtctgagcctcagttttcggtggtccaatgggcgatgtttcctcgaagatctcccgtgatacgcggaacttaatgggctcgccaacgtccatgaagagatcgtgtttggcgccatcctcgagcggatattcccaaacccaggcctgttcggcctcatcgaagcgcgaaggatgctgcagggcggcatgcggaatgaggatgtcgtcgaagaaaccaagtgtcacatggactccttcgcggctgcagtttcgaatctttccggtaatcacggtgcccaccatcggccggaagaccacgtaccggaacagaacctccgtgtgcgaggctccgtctcccggcaggatgatggaatccttcagtgaaacaatatccttcagcgcaatgcataatcccacgttaagaaggacctgtcacgtagaaaatcgagaatcaggacgtgcacatggaagtcacaacttacacaccttattggccagctttcggtcgatctcgtcgcgcacggcgtccaccaacttcagatggaactggtccggcgcaatcctcacattgtccttcagctccgccagcacgaacatgtcgccaaattgtttaaatatcttcttttaaactaatgctcgttcattgttttgaatgtgagctacagtaccatgtgtagccatagtgtgaccacatgctcatgcagtatataccaaaaataccaattatatgaatttatattgctaagttagggtactcccgaactaaccattcggtcagctgttaagctagctgattgccaaagccaacaattgaatttctttaaattttatttcagttgcaacaaattaagatacaaataatagttttcgcacgatattaagcccgtttggcaagacaaaatcgctttaatatttatccgcacatttgcttactgcatatagccatcttaggaaaataccaaaacaatgtcgacgcttctttgtgaatggcattcgcaacacgtgcgattggttgtacaaatttgtgaaattttgagctttaataggtttgtgtaaatctagcaccgatttaaaagcctttgccttataaatacaacgaggaatttaatacttattagtagttactgcgcatctcgcgatgaacaacgacagccacaaatatagcgacgccgaggaggacgaagaagacctgcgaagtgtaagcaaagtgcttatgaatttacaatgaaatctttcttacactttccaattttttagtccgagtggacaaacgacttcaagaacctcacattgaagcacgagatctttaaggatattaaactgacacccaaagaggactgtgatgacctggcacaagttatagcaaccgccaacgaagaggatgaaccggaggacgaagagccagaggaatacgatgaagacgattacgacgatatcggagatgactatgatacgtatgaggaggcctatacgggctttaacaagcttcacgttcagccgcagctaacaaatgccagtggaggtggctccggcggtggcgctggaggtgcatctggtggctcacaacgcgtcagcagctaccaaccaaacgaaaagctgttgcgccgctactccgcccgcattaatgtagaaaagtacgatcccaccacaaatatgagcgcgcaggcggccaaccggctggtgaacttcgatcggcgcgataggacacaggtgcgtgacaaacacgaccgagccactgcggaacaggtaatggatccacgtacccggatgatactcttcaagctgctgaatcgcggaatgatacaggaaatcaacggctgcatttctacgggcaaagaggctaatgtctatcacgccgtttccaaaaatggtgaagaggagtttgccatcaagatctacaagacgtccattctagtatttaaggaccgcgacaaatatgtgtcaggcgaattccggtttcgacacggctactgcaagcacaatccgcgcaaaatggtgcgtacctgggcggagaaggaaatgcgaaactacttgcgaatgcgcaacgctggcgttcctgtaccggagccaatcctgctacgctcacatgtactggtcatgcggttttgcggtcgcgacggatggcctgcgccaaagcttaaggatgttgagctcagcacttcaaaggcgcgagagttgtacagggattgcgtagtcatcatgtggcgcatttacaatcaatgccgtcttgtgcacgctgatctttcagagtttaacatcctgctgcaggatggtcagctggtcattatcgatgtaagccagtcagtggagcacgatcatccgcattcctttgacttcctgcgcaaggattgcaccaacatatccgagttcttccgaaaacgtgcagtggcaacgatgacggtgaaggaactttttgatttcatcaccgatcagactataaccacagagaacatggaggagtgcctggaacgcatatctgagcgaatcaaggaccgcgatttcgatgccatctcggctcaggagaagatcgatgaggctgtttggcagaacacctacattcccaaaaggttggacgaggtatgtttgcgccgtgatttaaaaatcaatgtcacattacaaattcgtattccgcttctaggtgcgccattttgagagagatgtagccaaggccaagcaaggggtgcagcaaaatctcatctacggaaagatcactggtctgacttcggatctggacgtgcagcaaaagccagacgtgctgcaatcctcgaccgccaaagaggatgacggtagtgaggcccaaacgagcggcagtgaggacgaagacaactcgcaggataacgacaacgatgaagatgccaagaagtttaagaattcggcaagaccacgagaagagtctccggagagtaaaaaggctcgcaaaaaggccgtcaaagatgcgaaagccgagcagcgcaaggttaaagtgaaaaagcacgtgaagaaacgcaaagagaaaatgggcagcatgaaaaaataggattgtttctgaatagagttaatatagctgtgagtttaagttctaaatattttatgcaagttttgtaacttggctccatcgtatataatgaaattatataaaaacgatgtagctaatcattttcttatggtattactataccaaatggctgcggggaacgccgcagctataaatgaaatattaaacacactacgttactagtattctaatcgaattttcggttaatattaagtaatatatctaaaggaataagtgtacctttagttgctccactttatttgtttttaaataaccaccgcatccatagaaaggcgtgaaatcgtaaattaggtgaagttcctagttgcagttgctacgaatcgcttagtttcgtcgcagtctttcagcaatgttgcttaaaatacttgtattgttttgcacattattatcggcaaaattggcagaatcctttgtgaaaccactgcgctataatttgacaattcttacgcgcctggggagtgaagatgagcagaaccagtttgagggcatcgtgtccatcgatattgaagcgacacaaccaactcgcgtcatctatttaaattctctcaacataacaatatctagacaaagaacatggatataccgatgggctagcggcagaaaaatcggtgctctccagataaagagaattattaaaaagaccagcttaattaagatagtaatcgaactcccactcagaagtggcgagatatacacactcaacatgttattctcgggtaacctagatcggagtcagcaatatggctactttgccggctactacgacaaaacgccgagggttttctactccgcgactcgcttggaaccggactatgctcacaccgtgtttccctgcttcgatgacccacgctttcggaccccatataacataacattagtgcacgaccggaaatacgttgcactcagcaatatgccacccgtagaggagaaaccatagttagtaaatcctttagagaaccca

SEQ ID NO: 24356 - DNA, 2046 bp, DROSOPHILA
ctgttaagctagctgattgccaaagccaacaattgaatttctttaaattttatttcagttgcaacaaattaagatacaaataatagttttcgcacgatattaagcccgtttggcaagacaaaatcgctttaatatttatccgcacatttgcttactgcatatagccatcttaggaaaataccaaaacaatgtcgacgcttctttgtgaatggcattcgcaacacgtgcgattggttgtacaaatttgtgaaattttgagctttaatagtagttactgcgcatctcgcgatgaacaacgacagccacaaatatagcgacgccgaggaggacgaagaagacctgcgaagttccgagtggacaaacgacttcaagaacctcacattgaagcacgagatctttaaggatattaaactgacacccaaagaggactgtgatgacctggcacaagttatagcaaccgccaacgaagaggatgaaccggaggacgaagagccagaggaatacgatgaagacgattacgacgatatcggagatgactatgatacgtatgaggaggcctatacgggctttaacaagcttcacgttcagccgcagctaacaaatgccagtggaggtggctccggcggtggcgctggaggtgcatctggtggctcacaacgcgtcagcagctaccaaccaaacgaaaagctgttgcgccgctactccgcccgcattaatgtagaaaagtacgatcccaccacaaatatgagcgcgcaggcggccaaccggctggtgaacttcgatcggcgcgataggacacaggtgcgtgacaaacacgaccgagccactgcggaacaggtaatggatccacgtacccggatgatactcttcaagctgctgaatcgcggaatgatacaggaaatcaacggctgcatttctacgggcaaagaggctaatgtctatcacgccgtttccaaaaatggtgaagaggagtttgccatcaagatctacaagacgtccattctagtatttaaggaccgcgacaaatatgtgtcaggcgaattccggtttcgacacggctactgcaagcacaatccgcgcaaaatggtgcgtacctgggcggagaaggaaatgcgaaactacttgcgaatgcgcaacgctggcgttcctgtaccggagccaatcctgctacgctcacatgtactggtcatgcggttttgcggtcgcgacggatggcctgcgccaaagcttaaggatgttgagctcagcacttcaaaggcgcgagagttgtacagggattgcgtagtcatcatgtggcgcatttacaatcaatgccgtcttgtgcacgctgatctttcagagtttaacatcctgctgcaggatggtcagctggtcattatcgatgtaagccagtcagtggagcacgatcatccgcattcctttgacttcctgcgcaaggattgcaccaacatatccgagttcttccgaaaacgtgcagtggcaacgatgacggtgaaggaactttttgatttcatcaccgatcagactataaccacagagaacatggaggagtgcctggaacgcatatctgagcgaatcaaggaccgcgatttcgatgccatctcggctcaggagaagatcgatgaggctgtttggcagaacacctacattcccaaaaggttggacgaggtgcgccattttgagagagatgtagccaaggccaagcaaggggtgcagcaaaatctcatctacggaaagatcactggtctgacttcggatctggacgtgcagcaaaagccagacgtgctgcaatcctcgaccgccaaagaggatgacggtagtgaggcccaaacgagcggcagtgaggacgaagacaactcgcaggataacgacaacgatgaagatgccaagaagtttaagaattcggcaagaccacgagaagagtctccggagagtaaaaaggctcgcaaaaaggccgtcaaagatgcgaaagccgagcagcgcaaggttaaagtgaaaaagcacgtgaagaaacgcaaagagaaaatgggcagcatgaaaaaatag

SEQ ID NO: 24357 - protein, 585 aa, DROSOPHILA
MNNDSHKYSDAEEDEEDLRSSEWTNDFKNLTLKHEIFKDIKLTPKEDCDDLAQVIATANEEDEPEDEEPEEYDEDDYDDIGDDYDTYEEAYTGFNKLHVQPQLTNASGGGSGGGAGGASGGSQRVSSYQPNEKLLRRYSARINVEKYDPTTNMSAQAANRLVNFDRRDRTQVRDKHDRATAEQVMDPRTRMILFKLLNRGMIQEINGCISTGKEANVYHAVSKNGEEEFAIKIYKTSILVFKDRDKYVSGEFRFRHGYCKHNPRKMVRTWAEKEMRNYLRMRNAGVPVPEPILLRSHVLVMRFCGRDGWPAPKLKDVELSTSKARELYRDCVVIMWRIYNQCRLVHADLSEFNILLQDGQLVIIDVSQSVEHDHPHSFDFLRKDCTNISEFFRKRAVATMTVKELFDFITDQTITTENMEECLERISERIKDRDFDAISAQEKIDEAVWQNTYIPKRLDEVRHFERDVAKAKQGVQQNLIYGKITGLTSDLDVQQKPDVLQSSTAKEDDGSEAQTSGSEDEDNSQDNDNDEDAKKFKNSARPREESPESKKARKKAVKDAKAEQRKVKVKKHVKKRKEKMGSMKK

SEQ ID NO: 24358 - DNA, 3716 bp, DROSOPHILA
agattctatagacagaggcaccggaaattctttgaccaatgttgcccacaaacgcatacttataaaatatgttttgatatcttttgaattaatattagtcttgtaaatttctaaaaactttttgtcgcggccaaaaacttttgaaaatgtttgataaatttgtaaatttctatcgatttaccaaaatctatttgccacgcccactggtccagctgtcaaagttcttattgttgcgtggcagatagggttgccatctgatcaaatatcgaaagcccagtgaaaggacagctctgactgaactgtttcacgatattataactattatgggtataataagcttcggcttgtcgaagtgaatacggaaaagaaaactttaaatgtgtaatatttataacatactaaatatgaatttattttatttttccctgttttaatattacacagtgagtttaataaacaaaaaagatgacaaagaatacgaccttgtcccacctgatggtggttggggttggttagtgctgctgggctcgtgcttgactaacattttaatccctggcacaataaaaagttttggagtattattttcggagttcaccgatgcattcaactcttctcctacgaaggctgcctggataccagccctgtgttattttctttatagttcattgggtaagtgacaatagtactaataaagtcagaaaatttgagttgaaatagtctatagatgtgttttcttatttgctatagatgtgatttcttattttcaggcccggtttcaagcattctatctgtgaagtactcatatcgtactgtcacccttcttggtggggcatctgcgtcactgggtatgatactctccttctgggcatcatctattgagttcttgtatatcaggtaaataaggcgtcgtaggtacgtgtttaaaatacattaatattattgttttatagctatggcgttttggtcggaatcggggctggtctctctttcccccccacagtttacattgtgacgtcgtattttgcgaaactacgcggattagcgaatggcctctgcatttccggtagtgctttaggcagcataattttgccgccccttcttcgttggctactagagacctatggctatcacggctcctgcctaattatgggtggcattactttgaacgtatttgtcgctgctcttttctatgagcctgttgaacaacatatggtacgagtacctcgtgctcgccaggctttggaaaatattccagaagaggaggatattggaatcgtaatgaagttcgaaaatgttgacgagccggttcccaaaaatgagccggctgacaagccattgttaccatataattcgcctccttctcctctgtatttacctggcgatgagaggctgcagtttgtgcgtagcgcatccgcagctgttgtccaaagctactcaaagtctggagacgagtttcagtctcgatcgcgtaagatcagtacgccggtgaggttaccccagagaaatcagacttttacgcctggccaacttaactcgcaatcatcattgtacgctgtgccagaggggcgatcaagctccaacaaactgactctgcgaaattcgtcaaagtcacggttatccaagcgctcgccttcaacaagcagttttttatacgtcagcacaccatatcatggcagcacattgtcgtttcaaccgaaagaattttcctcgcatttgtcccttcgctctatggggagtagtggaacgggacatgcaggcgactcaaccgggcaagatggatcttatgccgacgtcgacgcccgaggccaggcacaacagccgcaacgatcgaagttttttgatctaagccttttaaaagaccctatgtacttggtcatactaatttcgaattcgacgaatgccataagctacacgaactttattatattgctgcccagttttggagaagccaggggctttaacaaatcattatctgcatatttgctttcagttgtatcagccacggatctaattggacgtattggcgggtcagcactttcggacatggggtacatacctaagacctggtactttgttggtggcttgtccatatcggggctttctcttgcccttctgccttttgcatggacatacagctctgtatgtttttggtgtgcactctttgggttagcttctggtatttacgtcggaataactgcagtaatcatggcagacatgcttggaacggaacgcttgacatcatcgtatggcatcagccttttcgttaatggcttgttgcagttggttgggccgccattatgtaactactggttcgaggcggtcaatgattataatcctctcttccacgccctcggcttaacgctcctggctggagctagcctttggagttttatgccatggattaaccgacgcaaagctaatgcggaggagcaactagatgcacaaatcgaaaaagcggctgtcgatagctactaaatggtcaaacaactctcgtaccaaaccacgtacaataacaattagatttaaggcttaaaacggcgtacaaacagtgatgaagatagcagccaggactaaaagaccattaacattttttgtaacctttgattcgtttcttccagctgatttattgtattactgcttagtcgtaattagtacgttgttaattactacaattattgtttgtttaataccagtactataatattctagaccgtataaaaaattaaaatgaatgcagtgaaaagtcgtaaaaaataacgttttataaatattttttcaataaatacgtaaaaacaataaaaaatatgagatacaataaaaaatacaggaaatatacaagaaaagaatgggaaacaagacaaaaaattcgcattattaaattgtacccttgttttatattattttttggtgttaatattacgattagaatgataagatttaggtgtcttttttttaatggtgagtagactttaagtgagcacacacgaaaaatgaaaaatatttcaagttcttcaatttacgtgaattttcgtgcattaacaagcccacatcagtggcacgttctgtaaattattacttttagtgttacccagtgaaaagaaaactttcactcaacatcgggtgtagatttctgaaaagcgtgtccccgctgcccagcgggcgcgttgccttcaagtgccacgctatttgggaggcgctaggaaagccccacgtccgataagcaacaaacgacgctgacattcaagctctcccaattcaaattccaaaatcataggaataatttcttaactcgccagcctcagcaaccacaaccaccttagtaccagctccagcaacgcaaatagcatcactaacgacaaccaagtcagccacaataacctccgtcaatccaatgccagcatcaacaacaccaaacgcaacaccgaccaaaatcaacaaaaactgctttcccagcaacgattctagcacaaatcaagtctctgacagcaacaaaactcaaccctttcacaaaccacctccaattgtggtcaaaaattgtgaatctctgaacggacttttcagactcatagataagactgtttacccaacaaaattttccatcaaataccactcagataattccatttcattcctgtctttaaactcagatacgtacagaggtataaggtaacatttcattcctggcaactcagaaggaaagttacttctgtatactc

SEQ ID NO: 24359 - DNA, 1716 bp, DROSOPHILA
tttacattgtgacgtcgtattttgcgaaactacgcggattagcgaatggcctctgcatttccggtagtgctttaggcagcataattttgccgccccttcttcgttggctactagagacctatggctatcacggctcctgcctaattatgggtggcattactttgaacgtatttgtcgctgctcttttctatgagcctgttgaacaacatatggtacgagtacctcgtgctcgccaggctttggaaaatattccagaagaggaggatattggaatcgtaatgaagttcgaaaatgttgacgagccggttcccaaaaatgagccggctgacaagccattgttaccatataattcgcctccttctcctctgtatttacctggcgatgagaggctgcagtttgtgcgtagcgcatccgcagctgttgtccaaagctactcaaagtctggagacgagtttcagtctcgatcgcgtaagatcagtacgccggtgaggttaccccagagaaatcagacttttacgcctggccaacttaactcgcaatcatcattgtacgctgtgccagaggggcgatcaagctccaacaaactgactctgcgaaattcgtcaaagtcacggttatccaagcgctcgccttcaacaagcagttttttatacgtcagcacaccatatcatggcagcacattgtcgtttcaaccgaaagaattttcctcgcatttgtcccttcgctctatggggagtagtggaacgggacatgcaggcgactcaaccgggcaagatggatcttatgccgacgtcgacgcccgaggccaggcacaacagccgcaacgatcgaagttttttgatctaagccttttaaaagaccctatgtacttggtcatactaatttcgaattcgacgaatgccataagctacacgaactttattatattgctgcccagttttggagaagccaggggctttaacaaatcattatctgcatatttgctttcagttgtatcagccacggatctaattggacgtattggcgggtcagcactttcggacatggggtacatacctaagacctggtactttgttggtggcttgtccatatcggggctttctcttgcccttctgccttttgcatggacatacagctctgtatgtttttggtgtgcactctttgggttagcttctggtatttacgtcggaataactgcagtaatcatggcagacatgcttggaacggaacgcttgacatcatcgtatggcatcagccttttcgttaatggcttgttgcagttggttgggccgccattatgtaactactggttcgaggcggtcaatgattataatcctctcttccacgccctcggcttaacgctcctggctggagctagcctttggagttttatgccatggattaaccgacgcaaagctaatgcggaggagcaactagatgcacaaatcgaaaaagcggctgtcgatagctactaaatggtcaaacaactctcgtaccaaaccacgtacaataacaattagatttaaggcttaaaacggcgtacaaacagtgatgaagatagcagccaggactaaaagaccattaacattttttgtaacctttgattcgtttcttccagctgatttattgtattactgcttagtcgtaattagtacgttgttaattactacaattattgtttgtttaataccagtactataatattctagaccgtat

SEQ ID NO: 24360 - protein, 442 aa, DROSOPHILA
MGGITLNVFVAALFYEPVEQHMVRVPRARQALENIPEEEDIGIVMKFENVDEPVPKNEPADKPLLPYNSPPSPLYLPGDERLQFVRSASAAVVQSYSKSGDEFQSRSRKISTPVRLPQRNQTFTPGQLNSQSSLYAVPEGRSSSNKLTLRNSSKSRLSKRSPSTSSFLYVSTPYHGSTLSFQPKEFSSHLSLRSMGSSGTGHAGDSTGQDGSYADVDARGQAQQPQRSKFFDLSLLKDPMYLVILISNSTNAISYTNFIILLPSFGEARGFNKSLSAYLLSVVSATDLIGRIGGSALSDMGYIPKTWYFVGGLSISGLSLALLPFAWTYSSVCFWCALFGLASGIYVGITAVIMADMLGTERLTSSYGISLFVNGLLQLVGPPLCNYWFEAVNDYNPLFHALGLTLLAGASLWSFMPWINRRKANAEEQLDAQIEKAAVDSY

SEQ ID NO: 24361 - DNA, 4060 bp, DROSOPHILA
agaggattgcgatagttcagatctggctgttgcactgcgaactggtgtaggtagtactgctgacgcacctcgttccactcccaggcacttccacggaagtattgtagccagttggtcggaggctccctcttcccagtggtggaatttaccttcccgtcgtgccacacgtagtagtcctcgtagcccttctctcttttaaccgacttcaggaaccactcactctcgttgcttgaatggttgggtacgaagtccaggacgatctttagatccagctccttggctcgcttgatcaatgtacgaaaatcctcgagtgttccgtactccggttgaatgtcaaaaaaatcggatatgtcatagccaaagtcgaccatgggcgacttgaagataggcgatagccaagcagccgttacgcccaagtccttgagatactccagtttgctggttatgccgttcaaatcaccaatgccatcgccatcggagtctttgaaggagcgcgggtagatctgatagaactgggcggtttgccaccagtccttggtcgtttcactggacgagctctgcacttgacatgcctcattcgaggcaatggctaatagcagaagtgttagcagcgacaaaagctccattgcctgggtcaaatcaaaataccttgtgcgagcagccggcaagtgctcgcccttttatagactgtccacacaaccggttagataagacttaagtctttcaaagtggaaatgttttgattactctagggtaagtcaccctaatcgattgtggagcattcactttgtcatcttcgaaattgttattggaaaatttccagctcaagtgttctttcgagtgttttggtaaatgcataccctactcgatgtggggctatcatttaagctctggtaatcccgtttccgtatttctgtataaaaggaacagcgctgagtcctcgctatcaagtaataaacatgcagggaacgcggttagatcattttggattactggtttgtgggctggttatactggcacatcctagctggtcatgtgaaaccacgacttcgacgacagtcacaaaggactggtgggaaaatgcccagttttatcagatatacccgcgatccttcatggactccgacggcgatggaatcggagatttgaatggtatcaccagtaaattggagtacctgaaggatctgggagttacggcagcctggctatcgcccattttcacttcgcccatggtggactttggctacgatatatccgacttttttgacattcagccggaatacggaacactcgatgatttcagggctctcatcaagagggcaaacgaattggacctaaagatcattctggatttcgtacccaatcactcaagtgatgagaactcttggtttgtaaaatctgtaaatcgagagaagggctacgaggactactacgtttggcatgacgggagggtgaatgccactactggcgggagggaacccccttccaattggctgcaagctttccgaggaagtgcgtgggagtggaacgagaaacgtcaacagtactacctacatcagttcgcagtgcagcaggctgatcttaactaccgaaatcccctggtcgtggagcagatgaagcgagtgcttcgctactggttggaccttggcgttgctggcttccgctgcgatgccgtaccagtgctctttgagatcgagccggatgcagatggtcagtatgccgatgaagagcttagcggtctgacggacgacgtcgacgaccgcaagtacctgaagagcgatctcatcgagaaccggccggagaccattgacatggcgtaccagtggcgcgtggtgatggatgactaccagcgcatccacggaggcgaaacgagggttcttctcatcgagacatatgctccgcccgcctacacaatgcagttttacggaaatcgctcaacggccggggcacatctgccctttaacttcaatctgattacggttctggcaagcgatggtgtctctgccggatccatcaaaacggcagttgacaactggctggacaacctgcccgccggacgcaccgccaactgggttataggaaaccacgaccagcgacgggcggctagtcgatatggaaccgccaatgcagatgccatgaacatgttggtcatggtccttcccggagctagtgtcacctaccagggcgaagagctgggtatgaccgatggcgagataagctgggaagacacccaagacccagctgcctgcaactcgaattcggacatctacgagcagttcacacgtgatccctcgcgaactcccttccagtggacgaatggcaccaacgccgggttctccactgcatccaagacatggttgccactggcagcagactaccaaacgctgaatgtggaaacggaggccgcggctcagcgctctcatctgaaaatctataaggcgctggtggaactgaggaaatcgtcgcttccgctgcagaacggatccactaaatatggagttgttggggagaatgtgtttgtggtgaagcggtaagtaaagtttagcaactaagttcatatttgtctcaaaatgtggggatataaagtgcgtatatagccccgagccataataaactggtgagccagtaagtcacacttcagaaatgaaatatgccaaccgcataaaagtagtttcttcgccaagagttatgcaccgggagctacgtatactgcagaaattccttcgagtacgtaccgaaccattacctttacagttacatctccggctctgcatccataatttatgtggccaactttgccagcaagggtgtcactgtggatttatacgaattcgacaagacgctgcccacccacttgacgctccttatccgcagcctgcagtcctcgaaggcggaggggtaaggcatctcgtccccatcttgaccatctgaccatctgaccgactgttctgacatttgtgcggacatcttttcagctctcagttcgaggtgaccggattgagtctggctgccggcgaggccttggtattgagcagcagcagttcttcccggttcgattaaatggcgattcccaccaggcgcacttgaatcacactaagtcaggccactcaatcggtatttatcttcggctaaaagcaaatatgccgtggcttgcataaataaatatataagcgaaaaaccagacaaacaacccactccaccccagaaacacagcacatatcctgaaatctaccccaccaccactcggagataagctcaagtgcccggcatactcttttaattcccactcggcggcgggctccgcatttaaagtatttacacacaaattaaagtcaagcaaaagtcccggcctcgccaagtatttgctgttctacaatgtgtgtgcctaagagcctaagaatgtgtgttacacacaatgtaaatacggacggcgaccagggactaggcctaaaattgtggatgttggcctgggaccaggcccccatcatctcggagcactttgaagtcgggaccgtcacaaggggcctcataagttcacccaaataggtggggaggttttcatagctagatttattaccaatctcggaaattcgtgaaacagccctgcagtatttactcttgtattcgcgtacgaaggagagggcaggcgaaggcagaacttcaattgcgttataaataattaaattgcgtttacgcatggtaattggcagacgccttgcgatgcccgagcatcaagtatacgcaccatactctttgaaacttattccgctaagcatacatactttggcgaaaaacttgagttggctaagaagttgggtagaatgcctttcggaccgcttgatccgtcccaaataccaactcggtaatcacgacttgttcgagaagaatgacgagattgaaatacgaagtaaatgcattaagcggtttcctcgaaatccttacaaattattgcgtccctttgggaaatcgccccattcgattttgttcgattttgctttgacgctgaaaaattagccgtgtctgctggcagaaccacaaaaatgaatgaaatggaatcttg

SEQ ID NO: 24362 - DNA, 1759 bp, DROSOPHILA
tgggctggttatactggcacatcctagctggtcatgtgaaaccacgacttcgacgacagtcacaaaggactggtgggaaaatgcccagttttatcagatatacccgcgatccttcatggactccgacggcgatggaatcggagatttgaatggtatcaccagtaaattggagtacctgaaggatctgggagttacggcagcctggctatcgcccattttcacttcgcccatggtggactttggctacgatatatccgacttttttgacattcagccggaatacggaacactcgatgatttcagggctctcatcaagagggcaaacgaattggacctaaagatcattctggatttcgtacccaatcactcaagtgatgagaactcttggtttgtaaaatctgtaaatcgagagaagggctacgaggactactacgtttggcatgacgggagggtgaatgccactactggcgggagggaacccccttccaattggctgcaagctttccgaggaagtgcgtgggagtggaacgagaaacgtcaacagtactacctacatcagttcgcagtgcagcaggctgatcttaactaccgaaatcccctggtcgtggagcagatgaagcgagtgcttcgctactggttggaccttggcgttgctggcttccgctgcgatgccgtaccagtgctctttgagatcgagccggatgcagatggtcagtatgccgatgaagagcttagcggtctgacggacgacgtcgacgaccgcaagtacctgaagagcgatctcatcgagaaccggccggagaccattgacatggcgtaccagtggcgcgtggtgatggatgactaccagcgcatccacggaggcgaaacgagggttcttctcatcgagacatatgctccgcccgcctacacaatgcagttttacggaaatcgctcaacggccggggcacatctgccctttaacttcaatctgattacggttctggcaagcgatggtgtctctgccggatccatcaaaacggcagttgacaactggctggacaacctgcccgccggacgcaccgccaactgggttataggaaaccacgaccagcgacgggcggctagtcgatatggaaccgccaatgcagatgccatgaacatgttggtcatggtccttcccggagctagtgtcacctaccagggcgaagagctgggtatgaccgatggcgagataagctgggaagacacccaagacccagctgcctgcaactcgaattcggacatctacgagcagttcacacgtgatccctcgcgaactcccttccagtggacgaatggcaccaacgccgggttctccactgcatccaagacatggttgccactggcagcagactaccaaacgctgaatgtggaaacggaggccgcggctcagcgctctcatctgaaaatctataaggcgctggtggaactgaggaaatcgtcgcttccgctgcagaacggatccactaaatatggagttgttggggagaatgtgtttgtggtgaagcgttacatctccggctctgcatccataatttatgtggccaactttgccagcaagggtgtcactgtggatttatacgaattcgacaagacgctgcccacccacttgacgctccttatccgcagcctgcagtcctcgaaggcggagggctctcagttcgaggtgaccggattgagtctggctgccggcgaggccttggtattgagcagcagcagttcttcccggttcgattaa

SEQ ID NO: 24363 - protein, 547 aa, DROSOPHILA
MDSDGDGIGDLNGITSKLEYLKDLGVTAAWLSPIFTSPMVDFGYDISDFFDIQPEYGTLDDFRALIKRANELDLKIILDFVPNHSSDENSWFVKSVNREKGYEDYYVWHDGRVNATTGGREPPSNWLQAFRGSAWEWNEKRQQYYLHQFAVQQADLNYRNPLVVEQMKRVLRYWLDLGVAGFRCDAVPVLFEIEPDADGQYADEELSGLTDDVDDRKYLKSDLIENRPETIDMAYQWRVVMDDYQRIHGGETRVLLIETYAPPAYTMQFYGNRSTAGAHLPFNFNLITVLASDGVSAGSIKTAVDNWLDNLPAGRTANWVIGNHDQRRAASRYGTANADAMNMLVMVLPGASVTYQGEELGMTDGEISWEDTQDPAACNSNSDIYEQFTRDPSRTPFQWTNGTNAGFSTASKTWLPLAADYQTLNVETEAAAQRSHLKIYKALVELRKSSLPLQNGSTKYGVVGENVFVVKRYISGSASIIYVANFASKGVTVDLYEFDKTLPTHLTLLIRSLQSSKAEGSQFEVTGLSLAAGEALVLSSSSSSRFD

SEQ ID NO: 24364 - DNA, 3658 bp, DROSOPHILA
tggacatcggttccagcctgaatccggctattgacattggtcagatcgagggagcattcatgcagggctatggactgttcactttggaggaactcatgtactcaccacaaggcatgctttactccagaggtccgggcatgtataagctgccaggatttgccgacattcccggggagttcaatgtcagcctactgaccggtgcccccaatccacgggcagtctactcttccaaggcagtgggtgaacctccgctcttcattggatcatctgcattctttgccattaaggaggccattgcagctgctcgcgaggatcagggcttgagtggtgacttcccactggaggcgccttccacatcggcacgcattcgaattgcttgtcaggataagttcacggaactggtaagttacccttggattagtttataacattaaactaacttttattattaatttattaattatagcttgaaatacccgaaccaggatcatttacgccatggaacattgtgccttaaaattgtttttattgtttgtactgcttaagcatttaaaatgacgattttatttgttaatttgtttatatatacatagtgaattaaatgttttaaaaataattgagtcgtttaatgtgtaaactaagctggagagctgtttgaacaaatttatataccactgattaatattaaatattccttttagattaagaaaaattcaatggttacttttttgttctatctattattcaatagaatctcgtggcatgcaatgcattctgattttcaattgaaaagtcttagtcactatttattttgagtatattaatgaaagttgagcaagttttccgatgaattgaaatatgagttccgatttcggcgcgactgctaaccgaaaatataagctcaatcaaaagaagctttgtatggaactcaggttatgagacgagatcttcgcgagcatctcagtcggcaatctgacgtcgtagagctcggacatccgagatgggaaagctatcatttggatacagattgattttagagttcgtcttaatttcgacgttagcgttcgtatcggcagaacaattgttgctatcactacaaccattattacaatagatatgcacagaatgcgccttggaacgcagtggctccatcgtatctatcgattgacatatacggaaattgccaagcccacgatcgtccgctgattggtaagtgtgtgcggtacgtggattgcattagtgccatgcaggcagtgccccgggtgacaccactactctgtccgtcatcgtggcccaatcagttggtttgctgtccacacggcggatacttgttgccgccgcccagcatctcgaagagcgaacaaggtgcgtatgaaaggaattcagagaatccagaacttatatcttttgccagcctgtgccaatgcctatccaagagctcatcacaagcgccgtcgacgccgtcggaatacgaaccctaaactggatcaagtggaactagttgagccaattatacaaaagcacaatcagagccagaatttactggtgggcggcagactcacccaggagaacgagcatccgtatatggtgagttttaagcaattaggaaaacagtccaaaatctaaccttatgaaacttatttgcctttgaaacagtaaaaaattagcaatctgatattgtaagccatttggtagattaataaagatttacattcgattcaattacagtgcgccctcggttggccgtcccgcacaaacagatggattcatgagcacggttccagcaagcgcagatacacgttcaactgtggctgcgccatgattgcgcctcggttcgccataacggcagcacactgtgccagcgtcggtgggtaagcaaaaaaaaataaataaaaatgaaaaacaaaaccaaagaaaacactcgaaatgctaatgggttaaaaatatcttgaattcgagcagggaatccccgtcagtggcgttgattggtggcgttgagctgaacagcggtcgcgggcaattgattgagatcaagcgaattagccagcatccgcacttcgatgcggagacccttaccaatgacctggcggtggtcaagttggccagaagatcacacatgccagtggcctgcctgtggaaccaggaatccctgcccgagagaccgctcactgccctgggctatggacaaaccaagttcggttagtgtccattttatccggatttagattttcattataacttaaatcattgattgataaaacagctggaccacactccagtaatctcctgcaaatcatgctttaccacctgaatttccaacaatgccagaggtacttgcacaactatgacaaactggccaatggcctgggatcgggtcaaatgtgcgcgggagactactccggcaatatggacacatgccaggtgagtcaaaagtttttgaaatattaaatgttttatttgactggtgatcttcgatttcatcagggcgattctggaggacccttgttgctccaccaacacatgcgccatcatcgccatacgataccctatgtggtgggtataacgtcctttggaggagcctgtgcatccggtcaacctggagtttatgtgcgaatagcgcactacattcaatggatagaacaacaagtatggccttgattcttttgagaaattaaatgtgttctatgcaatttcaactttttaaagataaattattacatttaaaacaattgttgaaaaaattaaaaattttaaaaagcatatttaataaataaaataaaatgaaactagtgctgcttgaaggcaatcttctcaatccaatccaggtagctatatagcctggtgtaaactcctggggcattgggagccgcacagaattttccaaacgaggtgatgcccaccacgaaggccacgcagttgtattccggcagcagggcatgaatgggaccgccggagtcaccctggcaggtgtccctgccgcctggcaaatatcccgcacagaactgcccctcgatgattcccctgggcagacgtcgctccttgcgatagatctgcttgcaggtcatttgtgggactacgtccaggtccacctggcgcagggcattcgatttggcgcccaggaactcggtgcgtccccaaccggcggccaccacagtgggtatctggagctccggcagttgccacaggcaagcaggacgcacctgctccgagaacttgacccttctggtcagcttgagcagggcaatatcgtggtaatatgccgaggatctgtacttcggatgcagcacgatgatgaggatcttgatgtcctgctgggtcgcgctggtctcgttcaactggcgggcgcccaagcgaaccatgtccggtggtttgctgatggagcaagaaatacagttatagttgtgtcttcgaggattctgtcactcacctaccagaggtggcacagtgggcagcggtcaggacatacagttcgctaaccagggcgcctccacagccccattttatatcttgatccttggagccactaccctgcgtccatcctaaggcagccatgtgagggaagagtccgtgtcgagtgggggttccaccgactatcaggggaacactgggcacacactgcttcccggagaatgtgcgtccggtgtccgtcaagtgaagc

SEQ ID NO: 24365 - DNA, 1197 bp, DROSOPHILA
atgggaaagctatcatttggatacagattgattttagagttcgtcttaatttcgacgttagcatatgcacagaatgcgccttggaacgcagtggctccatcgtatctatcgattgacatatacggaaattgccaagcccacgatcgtccgctgattggtaagtgtgtgcggtacgtggattgcattagtgccatgcaggcagtgccccgggtgacaccactactctgtccgtcatcgtggcccaatcagttggtttgctgtccacacggcggatacttgttgccgccgcccagcatctcgaagagcgaacaagcctgtgccaatgcctatccaagagctcatcacaagcgccgtcgacgccgtcggaatacgaaccctaaactggatcaagtggaactagttgagccaattatacaaaagcacaatcagagccagaatttactggtgggcggcagactcacccaggagaacgagcatccgtatatgtgcgccctcggttggccgtcccgcacaaacagatggattcatgagcacggttccagcaagcgcagatacacgttcaactgtggctgcgccatgattgcgcctcggttcgccataacggcagcacactgtgccagcgtcggtggggaatccccgtcagtggcgttgattggtggcgttgagctgaacagcggtcgcgggcaattgattgagatcaagcgaattagccagcatccgcacttcgatgcggagacccttaccaatgacctggcggtggtcaagttggccagaagatcacacatgccagtggcctgcctgtggaaccaggaatccctgcccgagagaccgctcactgccctgggctatggacaaaccaagttcgctggaccacactccagtaatctcctgcaaatcatgctttaccacctgaatttccaacaatgccagaggtacttgcacaactatgacaaactggccaatggcctgggatcgggtcaaatgtgcgcgggagactactccggcaatatggacacatgccagggcgattctggaggacccttgttgctccaccaacacatgcgccatcatcgccatacgataccctatgtggtgggtataacgtcctttggaggagcctgtgcatccggtcaacctggagtttatgtgcgaatagcgcactacattcaatggatagaacaacaagtatggccttga

SEQ ID NO: 24366 - protein, 334 aa, DROSOPHILA
MQAVPRVTPLLCPSSWPNQLVCCPHGGYLLPPPSISKSEQACANAYPRAHHKRRRRRRNTNPKLDQVELVEPIIQKHNQSQNLLVGGRLTQENEHPYMCALGWPSRTNRWIHEHGSSKRRYTFNCGCAMIAPRFAITAAHCASVGGESPSVALIGGVELNSGRGQLIEIKRISQHPHFDAETLTNDLAVVKLARRSHMPVACLWNQESLPERPLTALGYGQTKFAGPHSSNLLQIMLYHLNFQQCQRYLHNYDKLANGLGSGQMCAGDYSGNMDTCQGDSGGPLLLHQHMRHHRHTIPYVVGITSFGGACASGQPGVYVRIAHYIQWIEQQVWP

SEQ ID NO: 24367 - DNA, 17150 bp, DROSOPHILA
gcattggtttggctcttggggcaactaactaaagttaaatacatttagacctttaaattgttaccatatcaagtataatttagatcatgtataatgtagatactatatacgacagtagtacaatttaatattgcattaaaagtgttttctttttgacatatttacccattaatattggttttatcaatagttaaatgtctatagcgctttcttttaagttttttgtttattattattattattattatttttatattaatatagtttttcgagtgtgtggtgtatgctctggcagttcttttccaatagtacaaatattttgcaaatattcacttagttgtccataaattgtttatgcattattttcagttgtaaagtaaatcgtttcccatatacacatctagtaaatttaatttttcaaattacagttagcaaatattacaatagatatacgattcatttgttacactcatgagttaaagtaatctttagttatttattcagatgattccatacttatgtcactgaccatgctaatgctaattgatttcctagagcgaatttatttacaatgggaattcgagtacccgtttcgatttggcttagtaaccagtaaaaggagcgaagagcgtctaggcctaatgatatatctatgtaaatctcaatctatttctgagcttagtatggaaaaagtgtaagtgttgggtaacaagttgtaggggttctggaaaaagttctctcggataatctattaaagctttccgatccgatccgtcgtgcatagcttaaccaattacgatcgttttgcttatattttgatctgaatttccttcatacctatgtacagacaattttctttggcagtgccatttttggctttattttactcttggtgtagcgttatgatcataagagacattaattgcacatcttggggattaggattatctggcgccctgtcctcccctctctatctctctctctctctctgtgtggatctctaaagcgagaagtacttggcacaggactgagatcccgttgcgctctcgattggtcttcctctttgagccttcctctcccgatccttgcgatcctcctgctgctgtatagctgctgctgctcctggttatgtttatgtttttttggtttttcgttagtaaggcaatttggaatgcatgcatcacacacatacacacaaatacaaagcacagttagtgggtgagagagagagagagagggagaaacacaaatacgagacagatagagagcgggagatttgggaagcgagagttagatgcgatatgatgcggtgtaatgatccaaatcgcccgatctccggatgcagtcagttgtcagttggatgatcaatgatgatcgtggagtcatgaggaacatgatatgtacaccataccgatcgcctgatggggcagcacgctcccgtgttatatgatactctctctgttccgttccagctcctccgtctcattctcgggatcgacgctggacgtcgacgaaactccgcagatttgcatctcgatctcggctagtcgattctccagatcccactgctgctgcgagagttttgtgtttagggcctggttctctgattccaccgtgtgcaggcgttccctcagccgcttgatctcgtcctcgagaacttcgtgggagcccaagaggggcgtggttccaccaccagctccacccacacccgctccatagcactccagctgcgaactggagtcgcaaatgtgacctaaaaagagggattatgtgggacatacagtatcctgccatgggattccaaatttgtatgtatgcttacccgtgtggctgggttgggattgtggccttattgagtggtgcgaagtcgttcgactacgtggtcgttcctcggatccatgggcactggggctaaccgacctgggtgagtccgtggcccgagccaaacgatcggcatagctgcggggactacaaaaatgttggtgtaaggttggatagcttagagatgattgatatgcggccaaaacaattgtgcaaggcacctttttttgcccgctttcacaataggacattaagctcacctgtacccatgtgtttgggaggaggtttgtgtggactcctgtcgatggggctgctgctgggatgcctgatgctgctgctggagcgcctggtggtggtgcatcagcgatgatgcgccagccgtcgccggtggcagccacatctcctccagagacgtgcggccacagctctcgactaagcccggcgtcgattggcagcggcccatggcaactacattaaagtatttgactgtgttttaaatcaaaatcgttcacaaacggaaacggacgcaaatgaaatcgataacgaaaaggaaggaaagacggaacggaaggcgaaaacaatcgaatcgtgttattctggggcaatcgtattcgtattcgtatgggtatctttgaatttcgagtggtatttgtttgggcggggattctggtggctttgctggatgttgtgtggctggttgggtggttgaattgggaggctcggctgggctgggttgtggttctggcgaaccggatagcggagtggggtggcagcaaataagacaagtgccttacctttctccagcggggccttcttgtatttctccaatcgcttgacggctatcgactccagacgaacacgcgccgccggatactccttcagcacgtcccacatgtccttcttgctcaggacgaagaggtcgctgtatcccactgagcgaacgctggctgtgcgtcggttgcctgtttttgtttcgcatcgggaaagttggcaaagcaaatgtttgccaacgcaaagagaaaagtttaatggtcttgcaaaaaagcatttcccggagatgctttgcgtgtgtatttgtgtgtgctcgagtcattgtgtctgtcgattcttcttgttggcttgggcgtacaatgacattaaaattgcatgccacacaatatggatgttcaaaaaaaataaaaaacaggaggtaaatattgaataggattaacggaagacggattttgattaaaatcttaatactcgcttatcgaaattcggtatgtgcacttttggcgacaagaagaatcgtttgtgtgagtggcttgtgtacacgggtcgtatacttaattgaaattacacacaattcgcaatgcaattacgtgtagggaaacgtttaaattacgtccaggcaaagcaatacaacaacaacaccgagttagaagacaaatatatagagatagagagagacagagtgattaaaatagagacaaagacaaagatggagcgactaactagcgtaaggaatggcttttcggtgctaaaatcctgtaggcaattctcaccgttgagcgcccacgaatggaactaaaccggaataatgcttaaatcatgcagaaacacaaggaactttaaacaattcgattttaccgtctctaattgcttggggaaaggaggtgccaaatgggggatgctgggtcgtggggtggtgcaaaactttggggccacctccttaacttttgtctgcaaattgagttgctctcgccactcttgctctttcgcaaactcaattaggtggcacatggctccgatgatgcgccttcgagtatgcaacgaatagatatcgcacatgcacatttggatggaatacaatcctgttaattataatgaacagagctgctgtctgctagctgctccattttccccatgaatcgacttcacacttggctggccaactattacacgctttaaaagcagcgcaaagttcagtaaattgtgttttttccgaggcgcgaccacaattattgcattcgttttcatttgccctgaataaaaatgtcgagaacaatgaaatcgagagacccgtgtgagtgcatgcaggtgcaataattgcatttgacattcattaatttttcagccctgtcgaggggtgagcaataaaaatacgttgcatactctaagggctggccaaataaacaaacaacaacaacaaaaaaaaacaatataaacttgcaaaaaatgttggaaaaatgaacaaaatggtgctccccatatggtacttgtttttatgatatgaaacgtaaattctatcgaaattgattcttgtgctcgactagttggttacatatgtatgtgctgggggattcggggggcgggaccaatctctaaactatacgttttgcacgctgggatcgggggaatccggttaacacttggttgcacaattatagacaattacattccacacatagacacggttacgcagtatgctttttatggtgtgtgagtgtgtctgttgattaatgggtttcacttcggtttttattttatttcatttatttttctgggcgtttgggttgggaaggttgttgtagtagttacgttatcgttattgttccgcctgtcgcactaaaacgggatatttaccaagttctttacctgcggtgcccatattgagtatactaatctcgccaaaataggaaccagccttcagggaggccatcaccgtctttccattgtcggccaccacctgcaatcgtcctcggttcacaatgtacatctccttgcccacctcgcctaaatcggaaacggtatcaaaatcagtatcagaatcggatggaaacaaaaagcattgaggagcatgtggcgatatcaaaggtgtattggccaggaccataggtactcaccctttctgcagatgtagtcgccgggcgagaagagcacgggcctcaggcgcagcaccagttcgcataggaagccggcctctgtgttttggaaaatctccacccgcttgagcgtatctaaatggacgttaattgctatttcagcctgaaatagccgggggaacaaaggaaagatttcgtctttagtaatggacaaatcgtgttccggagcctaagacgcccccgtgtacttacctttaatttatcaggaagacaggacacggcgcgctcctcgtccgagcatttttgcgtaagccacaggtaatcgaaccatttgatgaccttcacctgcagatgattcggcacacgtcgcatccgcatgtacgtcttcacgccatccagcttggctgagatacagaaaaccaggcccaaaatacgaaggaacacaaatggaatgggagaaacaagaaaaggaaaatgttatatttgtatttgctgaggatttcctgggaattgatacgcgacaggaatacaaagttcctggaaattagggtgttgtacaatggtatttagaatcgccgatggtcagcaaatgttgtgagtattgtacaggtaaataaggtacctctcttgtagcttccaccttgtcaagagacataattatttcatctttatttttagaaaattctataaaatttctgcgtgcgtaaagctttatttcgaatgccatctatctatctccacgagactttctaacttaatattttatcttcaccacataccaataaaattcataccatggtacatgggctttactctctaatcgttcaatcaagacggtctgcataaatttgtactataaggcttttggctgtccagcagacttaagctcttctggcccacctggcgtatgcttgatattgattactgcatcttaggaactgtcttccaagtgaacccatcttgtgtttagccggcaattaacaatccgttctggtcgagaagcacgcacaaaggaactaaccagtggatagtaatcgctgtgttggtgagctagtgggtcgttgctgcagttgcagctcaacaatgagcgatgttcgctcgattggctatatctgaggggatatcggacagggcaaattccatgtgaccactctgctggcattggcagggacatgggacatggcacatggcacatgggacgaaggaacaggacactgtttgagcaatattgatgacaactggcttttgtttttagtttcccacagcaccactccacggcgagtcatccccagtcgataagaggaaattaaatctcttggctcgtcagtggtaacaaatattgacacaatttgtcggcgcttgccaaaggggaatgaaattggcgagtgggcgggccaaatagaagagggcggcaggtaggactcaactgagtgctgcgtcttttgtgtttgctcgtgcaaacatttgaaaaccaactgacaaacaggcaaacagattgaatacaaataaatacccagttaccgggcttaaagtccagggggcgtggccagcgaccagacgacatcatctataatgcaatcaatcgtcaatcgtcagctggaagctcaagttttccccgttggtcatttgtcatctctcaattgtcaaatgtcttttgttgtcgaactcaaatttcagcttgcttgtctaataagattggagttcgggcatccatggtatggtgcctaatggaaattgcagtttctaaatataaatgaatgactgtaataaaatccgtcaaaatagtttgtgtcacttctatacgattctaaataaattaaacaatcacataactggaacatggatgaattgaatttgtgtttttttttttttttgtgtcacttcacttgcaaacttgaacaaatcgaatagattcggctgcaaatcgatttaatctgcattgagtttaacgcacatcacgtttaatgcaaacgatgttaataatgcttttacttgcagtttcaatttaaacaaaaatttatttcacccgaaagccaaagtaatctgcaatcaaatttaatttaaaacgcaaataatcccgaattaggctctttattcgtgcttctgattaagttttccgcttggatactcgttctcgtgtcctactttcgaatggcatttgttggccagactttgtcggcgaagtgaaagatttgcgaacggcagtgtctgcctcttggcagccattacacatatcggatatggatagcgatggaaatgtttcctccaccttttcccatttcccttcgatccggcatcctccattttctatccaacatatccaacatttcagtgatacgagagccatgcaaaattacaacgatttttattgtggcgctgcttgaatgcattcgacacccacgccaacccaacatccatcccattcaattttccacacacacacacacacagacacatacttgtccaacacccagttttcccgcctttcctgctgcgttgttggcacgatctttgcggggttttgttacaattgaaaatcaatctaaatattaattgcatattccatggcagccggcaaaagtaaacaaatagaacagtgagtccttcagctttcgggcgggtattttgcagtattgtgcggttggctcagtaattgcggttgctttcgatagactctcgtcctgccggcgtttctctgtctcctgatggtttttggtgtttttagaaattactcgagctttaattcctttgcttgctctgcggctgaaccgagcttatcctgtatcttccgtcctgtttcgtttggctacgtttcgtcctgtttcctggccccttcccaccactaactccaccactctcctccgcaatcctcttccatttcgttgcattttgcgagcaaaatttaatttgccattttttgcccccaagtcacttggcagcgtttgtccaaaaagagaagaaagtgcatttggcttcacattcagcttatttcttatttatttttcattttatgctctgcttcgcctacagttgcccccggcgaactttgatctgcttctgttgcaatttttagatggcgctgccactgcgcctgcttttcttttttcccgccagattgcggtgtcacctcaaactaagcggtgcctttcccaataattacatttactgttttgactcgacttttgtctctcgactgacaggcgaggacaattgccgccgaaggatcaactgcaggcaaaaaaaaaactcgcttcatattggtgaaaaggacgcggtgatgggtgtacttcagtggctgtcacgtgtgtctgtgtgggcgtgtgcggatgtatgcgaaagaaatctgggtgcaaagttcaggccattgtctcgcccccaactgcagcagcaagtttccgagcgaacaaaaggggggatcacatgcaaacagtaaatatgcgtgacaaaaacttgctcttcctgtgccacagtcttttcataaaccgccacacacacacacacacacacacaaacttgcattcgaaaagatgaagaaaaataaagaggaaaataaaaacacagtggattgtggggcgttctagccaagtgaaaattgcaaactaactagaaaccacttaagagtcaagctgatgtgttatgccaaagacggaagttgtgcttggggcccagcagctcctcctttcgaggcagaacaatggtcgctgatgggagttgagctgcagggagggggcaatgggtgcaatggtgcaaggagaacggtctggcatttactaaatgcgcacaggaatcgaaggaattgtctgcgattatcacccgagtgttgaaagtccttggcgcaattcaaagtgaagtaacgcttttgccacctgccttatcaactggatttctttcaaatacggaaaacaaatattatggatttgccacggaagtgtgttcatgaacgcaggataatgtcttacgaacacctattaatttagattagccaaaaatggtgcttgcacatatttaatcacaagcaattccttgcatacttttctaattagaagtattttaatttaacttttgaaaacttgttctacatctacgcttctttccgcttgctgtttttccttccccaagtagccaaacacttgaaaatatgttaagtcatcagatagctatgcaaacatcgatttaatccgacatctttttttgcttgtttcatttttgttgctctaaatgttttgcaagcgccccggatagtcgctcttcccctgcggaaatgctacaaccaacagccggaaatatacggcttaccattgaatagtgcagattcaatttcaagcaaaatgcattcggcctctgatttttgcaccttaattatgcatttacctccgccgtcgatcctgccactctactggctggactggggcaacaaacaatgggcgccatgtggcaggagcagctgaagccaagctgagcacggctgatggtcggatgaagtgctggggatggatttattcaggcggtaactaaaaatatatgcggcgagcacctcgcagcgccaccagtttgcaataacaatgcgcatgccagctgcattgggagctgaaagccgaatgctgaaatccttgggaattcgccattcaaggataatggaatactttgcccttaaagagcagctacatgccgtaatacaagagcaaaaaaaggggggaaaaagaaccgagaggaacaagaacaacaactggcgtgttctaaaaatacgacagtaagttggtgtacatgcagcttaatgggcaaaagcggccaccagcggcgactgcgtctacgatattgattggaatccgcatatatatatatacatatattctcacacacacacacacacagggttacaactgtggggcataaccagaagcaaacataaactcacacaaacacaggacattgctgtggcaagcaaaagcaaacagcgaaacgaacaacaaacacaaaccaagctgaacacatatacccatgcagaggggagaccaggacactcactcatacacacagacacacgcacacacatacacacacacagcaagggctggcaacttaaagtggataatggacgtcgctgcatccccactttttcgcccacatcccctcttaaaaaagaggcagagaaaatggaaagaggtacgaccaaaaggatctggcgcaatcgaagaaaacgataccctagaaaggtatggtaaacatcctttgacagatttattcgggagatgtcttctttgagaaggatagcgctttattatctttaattcccagcactgagaaaaaaattgtgttaaaatcattaggattcgtgctttctacttttttttttccttattggtgttatcaaaaggatagtgggacacacaaagtactttttctattacatatctcaatatcagaaaatattgttataaaaaatgctaatttttctgaatgcaaaactttcgaggtgtaaagggaatgttaaatcaagctcgaaatccttggattcctttagtgtgaggaagggatatcaccggcaccattccaatgtcgaatggctgacgcgtttctgagttcgtttgcttttcgtcacttcgcctcgttgctatttttagtgccaccattgtgaggcaccagcagcagcaggagcagcagtggcagcagcaacaaaaaccagagcggacaacaacactttggccattatgcatttaccaagtcgaaaacgcttggctacagcactacaaatcttctgctcggcgctcagctcggtgaagctttcgcctagctcctttgggccaggattcgtgtttgcttgtgctggcttaaattgagcgcgtaaattgttttaattgcgcggccaaaagccaagtccgtccatttcaggccaagccaagccaaacagacgttaattgtaaatgaagagtgagcagcataaatgtttaaaaactaagtaagccaagaaattccaattgaataaatgcacaggaacacttgcacacactcacgagtgaggacgatgattcatatgcaaactgtccgcatacatcaatcaaggtccgttgacagttttgctgacagcgggaaaatttgcataaaactatttacaataacaattacataatgggacccgagggatgggcgcagatatatatgtattcatatatgttatggggctgaatttccataattttaaatgtcagtttttgaaatggtgtttgaacagttgccaaaacaggagaaaattcaatacacaatttgctcgcacagtgaatgtcctgaatgcgagcaggttgcctggcagtgtgtgagtgctgtgcactgcgagaaaatgagcttaagtcgagacagcatttattctccaattatttgctgctatcatgagtttcaacactttgcaatataatctaagaacatcaatgctatgacatcttacatcagcattctctcgcatttttttgagtgcattcggttgagtatgtgagagcttgtcgattatcgcaagcatttggcgaacggcaaacttttgcgcttgtcggcgttaacaagccacagccatgcgtttaactaagcgtaaatgtaacagtgtgtgtgtgtgtgtgcggaagggtaagggggtggcggttgagggggagtagatcctgtcagcgtgtgactaaagtgtgttggtgtgtgtgtgagtgtgtcggtgcggttgggtagcagcaacattgttgcaaaatgattttgaaaaaaaaaaaccatcaataactcaaatataatgacagttttccacttgttgttgcccgtcacaatcacccgccgcccctagctgccaaccaccaccatcccccgcccctaagtggggctaaatggatgaataacttaagccagctgcttcgcctttcctcttagtgtgcgatgttatgtaatgtaataacgtcaatcaaatttaaaaaggcagaccaactatttcaaaatcaattttcctgagaccccgccccagcgccccttcgccattgcgcccccacccccttttcatggaagcggtgggaatgtggaaaagtggaaaggcagcggaaggaaacaggaaagcgagctcggcttaagcaaatacacaagcacaagttgttgcagcatcagaggaatcctgagtgggctgttgcttgtggagcggaggaagtaggctaatgtagcagaagaagactccggactcagtcactttgcaaacagtatcccccactaagctctgactagcgaaatttgcagccaggcaccgtgacaccgagtgaaaaagtgcctgccatggttaaagttgggtttaaacttttgactggccgtggcgcgtggtttttgcccccgggagaaatgtatcattcgtgtcattaatcattcgtcatgtgggacggcgacaacatttcatttgcttatcatccggctcaaagtctttgggggaatgaacgcaacaagagcaggcctcaaagttgaatgaatcaaatgggctgtcggaaaacttatttctaagcctagaaatccctgacaagtcagtggcttcgcgtcccctgcgattgtagggatttgaggaggcggaggtagaagcattagacagaaggtgtggttaaataaatgttttcttatttgctgaaattacagcagtcttaattaggattttctcaaaaatatttcacagtatggttgaaatttaaaagtccaactatgatagcatttattcaatataattacttgaaactggacagggattacaaaaaatcctttcagctagtacaagagcatcctttcaatttatatgcccgcttgattttttatggccagcactccacagcacaactactgcccatcatcatcatcatcgtcatctaacatcattcctgtcccatggacggccactcaaaggcaagcgctgaattgacaaattgatggatggttctccaaacgttgcatgcttcagcatctctgctttccttattttttccctttattgccccttgtacgagtatatgatgcattattattccggaaaagtttgtgaccgcaacaacaacaattgcttgcctaagtgttttattagccatcgagaacagagtttgagttcggttgagttgagttgattgtcagttttcatacacatcggtttttccccatttctcctttttttttttgtattcctgattttcctgaactactttagggttttatttgctagtgccatgccttctttttccggcaatgagctgacgaatgagcatatcgacgaactgagggatgcctttgaaaagtatgatctggactcgaatggcacattatcagccaacgaggtgcgactggctctaatatcagtgggttacgaaatcactgaggcagagttgtacgatctcatccattcggtggctgtgagagacgaggagaggctggacttgaaaaaatttatacgcatgatggcgccccgaatggccaatgtggatagtgataaaagtctatgccggacctttaacatgattgaccgcgatcgcgacggctacgtcaccgtccaggatgttcgtgccattatggtcgtcctgggcgaagtcgtaaccgatgacgatattaaggatatctgccaagcagtcgatatggatggcgatggtcgcataagcttgcgcgatttcgtaggctttatgcacagccccatttgagctgagacagcaagcaaaattgaacatttttcatacagagtaagcaaacaaacaaaaatgtatctcacaaatctattgtagattataataaaaattattgttttcataattattaatatatttaatttttgtgtaaaaagccagtcagtgtttatgaattttcgtttaattttataatggttttttttttatttaaaatgttctttattttgtttttagtagggcttaatgtttgaagtacttaaaaattgaaattcaatacatagacgtacatatatttctgcctgctggcagaaaaaacgaaggcggctgaatggaaaacggaaggaaaaaattgagagcataaagccagaaattaattcaacagcacgtttcgtccattaagccgccagagctttgcttgctgactttgccatcctttcgccaccgcccctgccactccccctgcaggacatggacatggacacatgtgcaatggccgcacacacaaacacacatgcaaagtgttgtgtaaacaagtcagctgccagttggctgggcgctgcaggcggggctcacagtaggggaagagctagaagatgaagaaggagcttatccagaaggaacggccagcggaaatcaaggtgccacgcccccttttagacacgcccaccagcgtccaattgtgctttgtttgctacccgctggcaggagctgaccaaaccaccttgacccattgtcgtcgtgagtggctttaatatttttcagctgacgctgctcttaatgaaagcaagaaatgatgcccagcgctgtcgcatcttattctcgtttccgcttcctctaatgcgttttccgctagctctttgcactgaaaacaaattagcaattgtactcaatttgaaaaaggtatgcaagaaaattgttcaatgtgtgtcgaagcgtacttaattgcttgcttttagatatctgtagtatccttctggaattacacacaaatccattctatcacacttcttttttttctgagtgtacgctggtctagtactgctatgcctttcacttggcattttccacttagctgacttggattgctcttgcattttgtccagttatttatggcccggccgggtaaacgagttcatttagctaatggcctcacgcccaactgagcctacgagagaattctccacgagtccttcgggtccttcgagtcctctttgtatgccacaatgggcattactgggctgtcctgctgccacatcatcattgccatggcatcgccagatttcaatattttgcataaaattggcacagctttcagcccgcacaatattacacattccccttctgttgaaaacgcagcttaaggataagtacgaaagtatttgcccattgttatcctgttgcctttcttctttatccgcattcatatgctgcgaggtccttttccagttgtcaggacaacttcaagcaacaagttcggtcagttttggtaggaattctcgagacgctggaaaataccttcagcgctattgtgttgacgtccacatttctcatttgcattaatacgggtttccgcaggaatttcagtgataagttggatggcacatttaatatttcccaagctcatccttgaaaattgtctttcttttatcatgctatcagctttatttatatgccaatttattgtgctaaaatagaactgcagtatacaaacgaggactttaggtcctgtgccatcaatcacagctgtttccattcttttcataaaacaaaaacaataattaatcaggctaagtactttcgttagtatgcaggaaaatttattgtttaagaaaacatgtcgtgctttttaatgaaaaaattctttttgttctatttctggattatttctctttttttttgcatcaccagctgtcataaatttgctatgaataatgaaatgtttttttttgttttttgttttgtttgagtggcttgcatatgatatcgaaatcagcttcccagtctttatttttgtatataaaagtcgtcatatttgcaatatatattcatttatgtataatatatacaatttaaaggtaggttggactcaccttgaaactccttgcgcgctgcactcactgacgtcacaatgttggccacgtgccccagtaccgtggcgaagagcatcaggccaaagagcagctgcaggataacaaagacgtactcgcccttggagcgcggcttgggaagatccccgatggtggtcagggccagggtgcaccagtagtagctctgcagatactgcttgaccacgtccgccgactccgagtcgtggtagacccagttgcgtgatccgaacccattgttcttgtgtatgatgtggtagagacaaccgttccaatggaatatcacaagcaggtagtggatgagggccgtgctccggaacaggttcgggtagttggtgtgccgctcggtgcgatccatgaaggcccagaaccggtagatcttcaccagccggaagctgcgcaggatcgagttaaagccgatggacaaatagagaaagtccagcggcagcaggcacaggcagtcgatgtagaagatcgtcgagttcatgtagtgggtgcgcagcttcaaagcgtccgtctgcagcaccccgtcctccaggtatccggtgcgaaagtggaacagtatatcgatcagatacaggaagtcggacaggtagtccagacagaaccaaatggcgatcgttcgccgattgatctcctggaaggcgaagcggtagattatcacccagaagttgtacaggaaggccatggacaccaccatggaccagtagtagcacagtcgccccgccggatcaaagacgaagtgcagtttcctggccgccgttgctgctcgaatccgctgcgaggccgttcgtcgtggtttctggtggtgcggctggccaccatgagagcctggtccactgcctcccccactgccggcgccaccgtggtgcgggtgatgcggatggccgccgtgggggggtcccggcccaccagggccaccctgcgagggtggaccgtgtgcgtgcgggtggtgcgacaccgtggatgccgagtgctgcagctggtaggggtggtgcgcctgctgggcggcattgtggtgcccctgctgctgcgatcgggagcgcgggtagctatagaatcggaaaaataaataagaataatgtcagatatacttgtattcgactctcatattagaagtgcatgcttttagacagcaccttagttagtaactaatattactgatacccaccgatctgtgccgttgcagtagttgccaccgtactgattgtggccgcccatggccaaactggtggctccgccgccggccagtgtgttatcctgcgagccgcgtcccgtggatcggttccatgtgcccaggagcggctgatcgccgctggcagccgttttcagacgaccccgcgacttgttgcgttgcttgttgtgcagaagatccatttctgaggcagtgcttacggtggccatgtgcgagttggaggccctggaggcgcatggtgtggccaggctgtcgtgcgaagtgaagaaaccttgttgcgagacactctgcccgaatttcggctgggtcataccaaactttggtcctagatctgtggatgattggaaagttaagaggaaataattcgttattaaagcaatgcgacaattaactttttaaatgtgcaagtttggggatcacagaataacctattgagcagttgcttatgcaagtctgtgggaatgatcctgttacgaataaaactactatcgaaatctctttgatt

SEQ ID NO: 24368 - DNA, 2109 bp, DROSOPHILA
atggtggtgtccatggccttcctgtacaacttctgggtgataatctaccgcttcgccttccaggagatcaatcggcgaacgatcgccatttggttctgtctggactacctgtccgacttcctgtatctgatcgatatactgttccactttcgcaccggatacctggaggacggggtgctgcagacggacgctttgaagctgcgcacccactacatgaactcgacgatcttctacatcgactgcctgtgcctgctgccgctggactttctctatttgtccatcggctttaactcgatcctgcgcagcttccggctggtgaagatctaccggttctgggccttcatggatcgcaccgagcggcacaccaactacccgaacctgttccggagcacggccctcatccactacctgcttgtgatattccattggaacggttgtctctaccacatcatacacaagaacaatgggttcggatcacgcaactgggtctaccacgactcggagtcggcggacgtggtcaagcagtatctgcagagctactactggtgcaccctggccctgaccaccatcggggatcttcccaagccgcgctccaagggcgagtacgtctttgttatcctgcagctgctctttggcctgatgctcttcgccacggtactggggcacgtggccaacattgtgacgtcagtgagtgcagcgcgcaaggagtttcaagccaagctggatggcgtgaagacgtacatgcggatgcgacgtgtgccgaatcatctgcaggtgaaggtcatcaaatggttcgattacctgtggcttacgcaaaaatgctcggacgaggagcgcgccgtgtcctgtcttcctgataaattaaaggctgaaatagcaattaacgtccatttagatacgctcaagcgggtggagattttccaaaacacagaggccggcttcctatgcgaactggtgctgcgcctgaggcccgtgctcttctcgcccggcgactacatctgcagaaagggcgaggtgggcaaggagatgtacattgtgaaccgaggacgattgcaggtggtggccgacaatggaaagacggtgatggcctccctgaaggctggttcctattttggcgagattagtatactcaatatgggcaccgcaggcaaccgacgcacagccagcgttcgctcagtgggatacagcgacctcttcgtcctgagcaagaaggacatgtgggacgtgctgaaggagtatccggcggcgcgtgttcgtctggagtcgatagccgtcaagcgattggagaaatacaagaaggccccgctggagaaagtcaaatactttaatgtagttgccatgggccgctgccaatcgacgccgggcttagtcgagagctgtggccgcacgtctctggaggagatgtggctgccaccggcgacggctggcgcatcatcgctgatgcaccaccaccaggcgctccagcagcagcatcaggcatcccagcagcagccccatcgacaggagtccacacaaacctcctcccaaacacatgggtacagtccccgcagctatgccgatcgtttggctcgggccacggactcacccaggtcggttagccccagtgcccatggatccgaggaacgaccacgtagtcgaacgacttcgcaccactcaataaggccacaatcccaacccagccacacgggtcacatttgcgactccagttcgcagctggagtgctatggagcgggtgtgggtggagctggtggtggaaccacgcccctcttgggctcccacgaagttctcgaggacgagatcaagcggctgagggaacgcctgcacacggtggaatcagagaaccaggccctaaacacaaaactctcgcagcagcagtgggatctggagaatcgactagccgagatcgagatgcaaatctgcggagtttcgtcgacgtccagcgtcgatcccgagaatgagacggaggagctggaacggaacagagagagagcagcagcagctatacagcagcaggaggatcgcaaggatcgggagaggaaggctcaaagaggaagaccaatcgagagcgcaacgggatctcagtcctgtgccaagtacttctcgctttag

SEQ ID NO: 24369 - protein, 702 aa, DROSOPHILA
MVVSMAFLYNFWVIIYRFAFQEINRRTIAIWFCLDYLSDFLYLIDILFHFRTGYLEDGVLQTDALKLRTHYMNSTIFYIDCLCLLPLDFLYLSIGFNSILRSFRLVKIYRFWAFMDRTERHTNYPNLFRSTALIHYLLVIFHWNGCLYHIIHKNNGFGSRNWVYHDSESADVVKQYLQSYYWCTLALTTIGDLPKPRSKGEYVFVILQLLFGLMLFATVLGHVANIVTSVSAARKEFQAKLDGVKTYMRMRRVPNHLQVKVIKWFDYLWLTQKCSDEERAVSCLPDKLKAEIAINVHLDTLKRVEIFQNTEAGFLCELVLRLRPVLFSPGDYICRKGEVGKEMYIVNRGRLQVVADNGKTVMASLKAGSYFGEISILNMGTAGNRRTASVRSVGYSDLFVLSKKDMWDVLKEYPAARVRLESIAVKRLEKYKKAPLEKVKYFNVVAMGRCQSTPGLVESCGRTSLEEMWLPPATAGASSLMHHHQALQQQHQASQQQPHRQESTQTSSQTHGYSPRSYADRLARATDSPRSVSPSAHGSEERPRSRTTSHHSIRPQSQPSHTGHICDSSSQLECYGAGVGGAGGGTTPLLGSHEVLEDEIKRLRERLHTVESENQALNTKLSQQQWDLENRLAEIEMQICGVSSTSSVDPENETEELERNRERAAAAIQQQEDRKDRERKAQRGRPIESATGSQSCAKYFSL

SEQ ID NO: 24370 - DNA, 3181 bp, DROSOPHILA
ggataacattcttaactcgctgtaccagttgtggatcctgggagcactggaccacactggtgcgctgaccacactgggtcgccagatggccgaattcccgttggatccgccccagtgccagatgctaatcgtggcctgccgcatgggctgcagtgccgaggtgctgatcatagtttccatgttgtccgtgccatcgatcttctaccggccaaagggccgcgaggatgaggcggatggtgtgcgcgaaaagttccaaaggcccgagtccgatcacctgacctacctcaacgtttatcagcagtggcgccagaacaagtaagtcctacaattgcggcaaatctccgccagaaatgaacaactcgttgctttcgcccacagttacagttcgacctggtgcaacgaacattttatccacatcaaggcgatgcggaaggtgcgcgaggtgcggcagcagcttaaggacatcatgacgcaacagaatctgagcgttataagctgcggcatcgactgggacattgtgaggaagtgcatctgctcggcatacttctaccaggcggccaggctcaagggtatcggagagtatgtcaatctgcgaactggcatgccatgccacctgcatcccacgtccgcgctgtatggcttgggcaccacgcccgactatgtcgtctatcacgagctgatcatgaccgccaaggagtatatgcagtgcgccaccgctgtcgatggctactggctggcggaattgggtcccatgttcttttcggttaaggagtccggtcgcagcgggcgcgagaagaagaaacaggcggccgagcatctcaaggagatggaggagcagatgctgaaggcgcagcacgagatggaggagcgcaagcagcaggccgccgaacgggaggaacagctggccaccaagcaggagatcgccacaccgggcaatgccacgccccgacgcacgccggccaggattggcctttgagcagatgcagatacagatacaaatatccgtgtgaagcgtgtgttcaatgtattaatttaagtttaacaagtttttttgctacatcctaataaagaatcattgtgaactggatacaaaggaaggccacaaagcctcttagttgataattcgttgcggagttctccacaaaaacgcacttgttgtcctccagtcgatgggtcttactgcaggagcactcgccccaattgcacaccatgggatggccaatggatgctgtggcattctcctggtccatgggctgcatccggcattcgctatcgtttcgacagagtgccccgaacggcacgatgggtgcgcaagtgatccgctccagattgttcaccgcatcgagatcgtcgttttcgtccttggccacctcgttggctacccttttggggtagtgggtcgaacggcagacgcagaggtgatccaggcacctgccatcggcacccaggtttagcttgcacggcgaactgtgctcgcacgtgtcaccgtaagcggagcccttgatgcacttggtcatgttgtggttgtgcacaaagtttttggagcagccgcaccgcttcgtctttgtcaggcaaatcgaggctccacagctgccgcaatccttgtcctctagacagcttgattctaaggtaaatacagaggtggaatttcatgtaaattatgctatttctgccagtgtactcacgcaaaacagaaagacaacgtccctcgtggaactcgaattggttaaggcagaggcactggttgccaatgcaggagctaaaccgatccgcccgctggcactgttgctgaaactcacagcttccgcccaccgggaccaccgccggcaggcagcgtctgcggtcgtcactggacacatgaccctcggagcagtggcactgctgccatcgcgtgtggcatatggcattcggcatgggacatggacaggcaccaccaatgatgttggtcagcttgaggcgctcctccagcggcgtacacggcacccgttcgccggagccacgtgctgtgcagatgcaggccatgtccacgcagcgaccgcgctcaaactgggcgcactgtgcgtccgagctgcaggacaactccagcagatcctccgcccgaccagtcgctagaaatccggccagcagcagtaggatccacctgtgcatcgctagcatgtttctcagttcacttgggttgctccacttcgttcgactggagaaaaccagtaccgttacttgcggactgccagaaaagctcaatttaaaactgtccattggttagtgctgctaatttatccttttttgtttaagacaacagatctctttttatacacctcagtcaaaatgtaccttaattacttaatggttaacattaaaattcaattttgtgttcgttacttgaccaactattaaataatatttaaaaactttgaccagggcctaaacaaaagttaccatctgatataagcatttgctcacctgctcaatatgaagagattttttgctccaagataaattcaagcgatgagttatttaattattccaaattacttatctactttaaaaaaattttaaattccgatagttttaaagctcatcaaaaccatttagcgctacaagctcacagtctggcaacctttcacctcgtcgacgatccggcaacgctagaaaaacgcgagccgcctgaaaagcaaggcaaattacaaaacaccatgtctttcagtaatttgttaatgaaaagtggcctaactgtggccgtgcgtgatgcgcaggccgccgtcctgatgactgccacacggcaaggacacaccatacgcggcaagccgcccggcgtggcccgttctctggagcagcggattcgtggtaagttgatgtaaccactcgggatcacttttcggcccacaaaccagcgtatcatcgatgtctttccgcagaggagaacgttgaggatccggaggtggtggcccgcatcaacattggcttcccgcagctgaaggagtcgcgctcggcgcagctaaagaagcgactggagcacctgaagtcccagcgcagtgacaagcagctggagcagctggcgcggagcaacaagcgtgagtagcgatcctggggactattgatgtatatgtgctcattgctgtttatttgtctatccacagtgatcatcgatttggacaaggtgcagcgcacctatgtgaagacc

SEQ ID NO: 24371 - DNA, 1120 bp, DROSOPHILA
agcaacccaagtgaactgagaaacatgctagcgatgcacaggtggatcctactgctgctggccggatttctagcgactggtcgggcggaggatctgctggagttgtcctgcagctcggacgcacagtgcgcccagtttgagcgcggtcgctgcgtggacatggcctgcatctgcacagcacgtggctccggcgaacgggtgccgtgtacgccgctggaggagcgcctcaagctgaccaacatcattggtggtgcctgtccatgtcccatgccgaatgccatatgccacacgcgatggcagcagtgccactgctccgagggtcatgtgtccagtgacgaccgcagacgctgcctgccggcggtggtcccggtgggcggaagctgtgagtttcagcaacagtgccagcgggcggatcggtttagctcctgcattggcaaccagtgcctctgccttaaccaattcgagttccacgagggacgttgtctttctgttttgcaatcaagctgtctagaggacaaggattgcggcagctgtggagcctcgatttgcctgacaaagacgaagcggtgcggctgctccaaaaactttgtgcacaaccacaacatgaccaagtgcatcaagggctccgcttacggtgacacgtgcgagcacagttcgccgtgcaagctaaacctgggtgccgatggcaggtgcctggatcacctctgcgtctgccgttcgacccactaccccaaaagggtagccaacgaggtggccaaggacgaaaacgacgatctcgatgcggtgaacaatctggagcggatcacttgcgcacccatcgtgccgttcggggcactctgtcgaaacgatagcgaatgccggatgcagcccatggaccaggagaatgccacagcatccattggccatcccatggtgtgcaattggggcgagtgctcctgcagtaagacccatcgactggaggacaacaagtgcgtttttgtggagaactccgcaacgaattatcaactaagaggctttgtggccttcctttgtatccagttcacaatgattctttattaggatgtagcaaaaaaacttgttaaacttaaattaatacattgaacacacgcttcacacggat

SEQ ID NO: 24372 - protein, 341 aa, DROSOPHILA
MHRWILLLLAGFLATGRAEDLLELSCSSDAQCAQFERGRCVDMACICTARGSGERVPCTPLEERLKLTNIIGGACPCPMPNAICHTRWQQCHCSEGHVSSDDRRRCLPAVVPVGGSCEFQQQCQRADRFSSCIGNQCLCLNQFEFHEGRCLSVLQSSCLEDKDCGSCGASICLTKTKRCGCSKNFVHNHNMTKCIKGSAYGDTCEHSSPCKLNLGADGRCLDHLCVCRSTHYPKRVANEVAKDENDDLDAVNNLERITCAPIVPFGALCRNDSECRMQPMDQENATASIGHPMVCNWGECSCSKTHRLEDNKCVFVENSATNYQLRGFVAFLCIQFTMILY

SEQ ID NO: 24373 - DNA, 3407 bp, DROSOPHILA
atgtactccttgagcacgtggctccggtcgtcgtctggtggagagattggcgatataaggaacgggttttatgaaacattcgatgtcctcttttacctgacacaacacggaggacgacaccctgggaatcgtagctgcagagcagcgtgcagcttcccttgtatttgttggtaaactctagcttctgctcgtcggcaatcgagctgattaccacgccgcaaaattggcaattgctcagcggcgaaacggaggcggcggtggccagttttcgggcctcctcgggtcgcaggctggacatgttggctggctttttggagggtaaagaggcaaaggaacaaagcaggaccacaagcgtcttttttcccttgttaattgacaatgtagacctcgctatacacacgcacgcacgcacacacacaaacactctagcacacgcacacacacagatacgcagatgcagacagacagacgcgcaattttttctatctgcaaaattttccaccacacacaaaatggctggtgactcgggcagctggattaattggcgctgggaactatatagtgcgctgcttttcaactcggacgattactcaaaatcgatcgctcttgttgatttcgtattgatttcacacggaacatgcgttcttttttgcaaaaagtgctagagctggaacaaatagttgaggctagaggtgggaccaagtccgatgcttttcgataggattattaccgcgcactaccttaagactaagcgatttttcagtctagtgagatttacaaaagaattgtatgcaaggaagcttgcatcaatctcaatttcattttgaaatataattgaaaaaaaatagtgcggggaaaagaaatgtaaaaagaaataatatagttttttaagtggatagaatcaaggttcagaactctggaacacttctagcagggcctcgaacctaatgtgggtggtcggctagttggcaacgctagtacaaaaaagcggtcgcttgaaatggagagtaggtacctaaatgaggtaccttaataaatattgaccaaagtttaacagcaatttttagcattcattttaaaatatttttcctatttgtttgaattgaattaaatcgaataaacaacgttagacaacttaagttcgttaatttaaaagctatcaatctgatttgaagtaataccgaacctaggtacataactgaagcaaacttgccatcactgacacatccttctaatcaatttcgctatttttcggtggcattgcagaaaggactcccatcgctccgcggatgatgacggaaatgaggaggacttctacctcgaggatgccgacgacgacgtcgagcaggtgaagcccactctggcctccgagccgactctgagtcaccgggacatggcgcgtccgccgcacgaggatcccgagtaccagaagcagattgttggcaacttcaagtgggttctcttggtgcacgatatagatacatttaatgacattatcctttttcgattttccaggcaaggacgcggcggtagccactataaccatctagcgcagtcgcacggacgcaccatcagtggcagcaacatcccgagcacccaccagcagcagctgcagaacaacaacaccagctgcatccccacttcgcacctagcccaccacaactacacatgcccggcggcgacggcgacagtgggcagctactcctccacggggacggggtcggtggcggccagttcatcagcctcgccgatcggcaagcacgctcgctcgtcgtcctcccgtccgacccactcggtagcgccatatccatcgccgacgtacgtccagcaacagcagcaccaccaacacacgcaccaccacaattacgccggcagcagcggcagcagcaacagcagcagcagcagcagtccagtgatccacagcaatagcagtgccaacaacatgctgcagcagctgtcgcagcagaacgtcacagtgacggcgcaccacagccagcagcagcagcaactgcagcagcagcaacaccaccagcagcagcagcaacacagccaccaacagcagcagcaacatctcctgtccagtgtgacgatcacgcccaatttccatccggcgcagcagcagcaccaccaccaaccgatgcgcggccaccagcagcagcatccacagacaactgccggcaacatggttgcccaaaacaacagtaacaaccacagcaacggaagcaatccgctgcagcagcaacagcacatggcgcaacaggtagccgtcaagcatacgccccattcgcccggcaagaggacgcgtggcgagaacaaaaagtgccgcaaggtgtacggcatggagaaacgcgaccagtggtgcacccagtgccggtggaagaaggcgtgcagtcgcttcggcgactgaaagcgacagaagtcgtcgacggaggcggcaaaccaggcgtcggcgcaccagtccaaggcagcaacagcagcatcatcagcagcattatcatcatcagcatcagcaacagcaacacccaacccagaagcaatatcagcaactcccagcccggcagcaacatcctcaacgtcctctaaaatgaccaccacagtggtgcgtttggcggccgaggtggctgccggcaagcagctaccctcgtcgttgaccatcaaaaccaacaagcgctacggtggcccggtgcagcagcagcaacaacaaccgcatccgtatgcggtcaccgccaacagcaacacaattagcaatcggccggtgcgtatacgcagtgtggccacctcggtgattgtggcgcccattgcctgcgcagcaacgacgacgaacaccactcccagccacatggaggacacggatgctgacgaggatgctgacgaggagctagaggagatggagcaggaggatcaggagcaggtggatccggaggcgctcgaggatcaggaggaggcacaggtggctgctgccaacggcctgctggcctggagccgagcagccgccaatcagcagcaggcgcaggctgtgctgatgcagggctaagtccacctgagccgccaccgagtgcaccgatagcttgctgactcctggatggctgtcggtggcagctgttgccaccccgaggacacaaaacgcaaaaatgcaaatgaaaaatggtctcttcttatttactctgcattgaattgtgcaccttaaacacgtaacggtatctcttttgttgttgtgcaggtgtttgccaactgccgtgcaaatgttgctgacatttgcgcccgggcaacatttgcaatctacaataatctaattattattattataattattattattactattattgcagtgcgtaaatatacatatacatatacatatttatttctaaaatgactttgttaattcttatgttaaaaagctgaaa

SEQ ID NO: 24374 - DNA, 1089 bp, DROSOPHILA
atggagagtagaaaggactcccatcgctccgcggatgatgacggaaatgaggaggacttctacctcgaggatgccgacgacgacgtcgagcaggtgaagcccactctggcctccgagccgactctgagtcaccgggacatggcgcgtccgccgcacgaggatcccgagtaccagaagcagattgttggcaacttcaagcaaggacgcggcggtagccactataaccatctagcgcagtcgcacggacgcaccatcagtggcagcaacatcccgagcacccaccagcagcagctgcagaacaacaacaccagctgcatccccacttcgcacctagcccaccacaactacacatgcccggcggcgacggcgacagtgggcagctactcctccacggggacggggtcggtggcggccagttcatcagcctcgccgatcggcaagcacgctcgctcgtcgtcctcccgtccgacccactcggtagcgccatatccatcgccgacgtacgtccagcaacagcagcaccaccaacacacgcaccaccacaattacgccggcagcagcggcagcagcaacagcagcagcagcagcagtccagtgatccacagcaatagcagtgccaacaacatgctgcagcagctgtcgcagcagaacgtcacagtgacggcgcaccacagccagcagcagcagcaactgcagcagcagcaacaccaccagcagcagcagcaacacagccaccaacagcagcagcaacatctcctgtccagtgtgacgatcacgcccaatttccatccggcgcagcagcagcaccaccaccaaccgatgcgcggccaccagcagcagcatccacagacaactgccggcaacatggttgcccaaaacaacagtaacaaccacagcaacggaagcaatccgctgcagcagcaacagcacatggcgcaacaggtagccgtcaagcatacgccccattcgcccggcaagaggacgcgtggcgagaacaaaaagtgccgcaaggtgtacggcatggagaaacgcgaccagtggtgcacccagtgccggtggaagaaggcgtgcagtcgcttcggcgactga

SEQ ID NO: 24375 - protein, 362 aa, DROSOPHILA
MESRKDSHRSADDDGNEEDFYLEDADDDVEQVKPTLASEPTLSHRDMARPPHEDPEYQKQIVGNFKQGRGGSHYNHLAQSHGRTISGSNIPSTHQQQLQNNNTSCIPTSHLAHHNYTCPAATATVGSYSSTGTGSVAASSSASPIGKHARSSSSRPTHSVAPYPSPTYVQQQQHHQHTHHHNYAGSSGSSNSSSSSSPVIHSNSSANNMLQQLSQQNVTVTAHHSQQQQQLQQQQHHQQQQQHSHQQQQQHLLSSVTITPNFHPAQQQHHHQPMRGHQQQHPQTTAGNMVAQNNSNNHSNGSNPLQQQQHMAQQVAVKHTPHSPGKRTRGENKKCRKVYGMEKRDQWCTQCRWKKACSRFGD

SEQ ID NO: 24376 - DNA, 7682 bp, DROSOPHILA
agcagatgaacgtgtaccaggcaccgagaggatccgcgcctttgtaggtgcgcacctcctcctccatttgcttgcgttgtgccagcagttcctggccgtgggtggagtcctggctaagagaagcctgcagaaggctcacattgcgaccgctggccagcggctgaatgttctctttcgcattgtcaaagtccatatcgttctcctcaagcaaatgacctgaaacttttggttgtcttgtatcggttaaacaaaaactacgcgccgaagcaaatgctagagatgaatgatactacgctctttcgatatttttaattgtgtcgtatcgatacttcgattgaaaaactgttctcactgaagccgaaatacatacgataaaaattgaattgcttagcaacacaacgtcatcactgaccaccacttttaattggtaacgaagctcaccatcttgaccagtaaaaaagaagcgtaagaacagcttactccagttactattacatttctggtgctcctcaaatctttgtgatctaatatttatttgatcaactttcattattgcttcgaaaattatgatattttaaaatcaccgccatatctgtacaataattaatttttcttttcccttcgagttttgataaggcacgaaatatgttttgcatatatatggctttttattgtatatattgttgtcatgacatatgttttaaaaaggtctaattgcgaaatcagtaatcgtctaaaatgctagcagagataaaaaataatgattacacaggttcaccaaaagcctttatagaatgaatgtttttgatctcattttgtgacaataaacgatttccacgccttcacaaacgaaattccagcaatatatgtatgtatgcaacaggttagggaatgtcagcggaactatcatatttggttactatttacatacgttaactcgtgaatctattcggatcgcacatgcgtatttaatgccaaaaaaccaaaagattcaatgcgtcttatttgtataatcccttcagcatatcgaaatgcgaatagtaatgtttattattctttttgtttttgaaaaaaccaatacattttttttatgtatccgttaaaagttaccccagcggccgccttggtcgccatttctaaagccgccgcctgatcctctattgctttcaaatgagtctccaaatccacctctcttgttcccatatcctccgccattgtttccatatcctccaccattatttctataacctccgccattatttccatatccaccattatttccataacctcctgcattatttccatatcctcctccaatatttccatatcctcctccattatttccatatcctcctccattatttccatatcctcctccaaaagttctgccgtttccacggcgaccaaagctgctgttagtaaagcgtcctgtctcaaagcgacctcgtttgggcggtcctccgccgtcactgaactgacgtgattggtgcggcagaattcctgattcacgctgcagtccgaagtctccggcgctcttaacgcaaaggtctttgaccactttgaccagctgtgcatagggctcctcaaggcgaagtatgtcggaagggttgtcgcacgccaccgtgataagatcctccagggccggcttaagggcaccaatcttggccgcaagttccggctctatgtcgaagttaagccagttgtcaacgcgcactatattgttggcggccaagtcaatcttgcgcgatccaaacaatatcacctgcaagggcgagaccatagatagttgcttgcaggaaacagctcgcgtgcgaatcttctcgccgaaaacgaagaacggatacggaaatgtgacggccaagttgctgcaattcaccgaggttttgtgcagtaacgctgctttagactctgtagtcagcactttgcgcttctccttgtgcacgcaaatgttggggtagagacccaagcacagcagcgccagggacacatccagcacggggtcatccccatcaatcctttcgtctacctcgtgcgatatcatacactcttctgggaatcctgcctgctgaaggagatccagtaactgctgcttggcatcccagataacgttcatagtactcatttgcagtcctttccagtcacagaaccgagcttccatatgctcaccgcgttgtttctcgcgccgccacatttgtgaagctacaatcattgccacgtggtcggaacatttggtaccactcaacgctttctgatgatttgccaggcgacgttgacctatatcaagactaaacacctctgagaaggtgctagagtacgaagccataatggccattagatcggcgcagccaaatactgcgccgaggaccatcatctttccaagtcttggttcaattgggaggcgtgccagcaggcgccccaatggagtaagttcatcgttagcgtcaaggcagcgcatctcgcgaagcaacacctcagcttcgattactgcgtctaccggaggtggctccaatgcctttgacaaaaagtggtgaatggagcccagtctgagtaatttaatggtcaacgccatctcgtgcaacggtgtgcggaacatctccggcgtaagattgtcctctagcgcttggaagcgggcacgcgaacagagtgtgaagcagaagcctggtcggacacgtccagctcggcccttgcgctgctccaaattggttttgcttgcccaaacggtggcgtagctggttaggttgttatgtgaagtaaagagcttcatgcgcgccttacatatatcaattacgaaaacaatgtcgtcaatagttatagaagtctctgcaatgttggtagaaagtataatcttggttacgccttctggaacaggctcgaaaaccttgcgttgctcgtctcgtggaatctgcgagtggcacggcaaaatttggtattgggatgtatcaccaaaaatgtttgtattttgcagaaacttcataagcgcaaagatcaggttccaaccgggcaggaatactaagatagcaccgggaatattttttgacttaatatgcatcaataatgcctccagcagctcaaagctaacgtccgattcggatagcatggccatagcatttcgagtcttttgtgaatacttgtcctcgcacaccttgttatagttgatttccgcctcgtccttgtcctcggaaagcaattgctcctcgtcctccacttccttgcgctttcggcgcgactccgccgaaggcacaaagtctgtcatctgaataatgtcctccaagaaaaattgctgcacgggaaatgctcttccgggtacttccaatacgggacagatgccaaaatatttggaaaatttcgttgtatcaatagtggccgacataagaataactgcaatagaagagtttctattaattatagtgttttctaaaagtcatatcatattaaattaggactagaaatgtatgacccgtaatgcatataagttttaagttctgaatagtaattttgttgggcataagtaattttggcaagtcaactctacattaaatatgaaacacaaacaattggcaatgcaaattttcaatggaacaaactgacaaatcgactattaagaacataacatatacactctgggcggatccggtacaaacaatataatcataatcttcattaattaagccagtgaattagtgcaaaataagttattttcgcggctcaaaatctgctcaacattgctttttatacatgtaaatgtatgtatatatacaatacatatatacaaatgtatgtatatataaatatataagtataatcaacaattgtcgaagagtttcaccccaagaaatttgaatgcaggttatacatacggatttatgttagaaatattgcaccttattcgagcttaccatgcaggtccggatatgtgtcgaccatgtcgcgaaggatgaccagcaaaaagtcgctgttcacgtctctctcgtggatttcgtccacaataatatgcgacactcctcgtaagccagcctccagcttgcgcagcaacacacccacggtgcaaaagaggattgcgccgtagggtcgtggaaacacagactcaaatcgcaccgagtagcctacagtgtcgcccaattgctcgcaccgctcgcgagctacgcgctcggccacagaaatggctgaaatgcgacgaggctgggtcacataaatattagcgtacccgccctggccggagcagatgtagtcatcaagaatgtattgggcaatctgggtagtctttccgcaccctgtgtttccacgaatgattaccactggattgtcattaattgcggttaaaatttccgaccgcatcgctgcaatgggcagcttttcgcggaactcgaggaattgtcggtactcgttgtcgttttggcggcgatcacgcagcgagcgttcgtagtccatcgaaaggtcatcaatagaggtggttgccagttcgccttcgtcgatgttgcaggcatgccacgtattccagtttgcctgaggaggagcccacggaatcacggagctttcctgacgtttttcgccatcctgttgcgaggaatctatacggcttaagttcacctaggagaaaatattttacatcgtacactacattttttgttcgcaaaaaaaaggtggtttgggtagggcagcgtattcctatgctcatatagtaagggtatgaatgtaagagataacagaaataatcttgttcaagatcactagccaagtctatcacaacaaaagcttgaaagttaagattaaagacgcagattttagttatgctaacgtagcgtaaaaccttctttgaaatatcttttgaacacagaattggattaggtcgattatggtgtctgtcgacgcgtattgagagctatatatagaaaaaatacaaatgttacagccaagtatgcagtacaaattaatcgagttaaagtatttgcattgttgtttcggcatatcaaatatttttgagggactgaacgatgtgggagttactagcgtattcctaagtatatgacttacgtaaatcaatataataatatatactttataaagtactgttggatgtcatcaagaatattgaaaccggtatacaacatttagctaatagtctttgtctgataaaatctctaaactgttttttaatactctgagataagaaatttaattcaaattgctgatacatttttattttagttttctagtttcgtattacttacaatgagaggaatcggaggaccgtccagttcgattttgatattgcgcgggtttacgacaggaaggtccaaacccttaatcacctcatcaattttgtttatcagatttggcgaaagcttcaccggatatggcttcagctgctcatccttttttttcttcagagttccactaaagggctctatcacatttaaatggaaaagttggcgcaccagggacagggcgcatgacttgctggcagacttcttgtttgaacccgactcacgggccgtcaccgtgcgattgagcgccggcacataaatggacaattcggccaaaaagctcctacattaaaagaactttttgaaaaaatctggactggtaatgtagatcaaatccggaacttaccctcgggctatcgtgggagtctacggactgctgaaggagccagccgacagaacggcgtggtactaatgtgttagacgcagctggaaagtcagcgcttgaattattgtcagctaagccgcgttgcatgggcgtccgttttgcttacagaccccacgcaaggaagctggacgtggttcttgtagttcggagtatcgtaccacatcgttctgccggcgctgctctgcacaaatcaaattggtcacagcccgacatgattatgggctgcatttcagatttggccgtaggccatattcggtcaaatccgaaatgcaggccgaagaaagttgaaaaggaagcacatacctagcgtgttccgggcccactggtgtatatttgtaatcgtcgcgaatgttgttcgtctgcttgtaaatgttcagtcgctctttggcattctctatggtccagttaccgtggatggcagcgttgacatcgaaagcctccgcttcgttcatgtccctctgctcctggatgcgatcaattactgagtagcggttaccgccgtcaccgccatcgtggtttagagggcgataggcctcacccagatcctgtggacccgactgaccatcaaacactcgcttctgctgtccactgccccctgccatgcccgcaccctccagaccagtcctaggtccgccccccgaagcaccagcatccgctggaacatcattggtgttcagtttgcccacgcgcactaggtagttgacaaaatcacggcacgcatttttctcggcatcctttttgttagtggaattacccacaccaatataggtatttggctctacacgaacctcgcaaaggaaccgctggcgatttttgggacctataaattaaactgctacttgggaaacacgcctgggggagtgcaacataaccacttacccgtttggcgaatatcaaactttggttctatttgcgacttagcacaaaattggtacaaaaaagattttatatccattcttagattttcaataaactttctatcaactacggagctcaaattaaatttatttcttttgtgatgtctattctgatatcgattaatttttttgttgctttacaaaacactaacgcgtcttgaatcgcctatcaaaataggaacggataaaatagaacagtgtgtgtagatataaaaacatttaatgtaatttaatctaaaataaaagaaacctatagagagacttagacatatttgtatatattgcactataaataaacagacaaatttcttatatatatacttttatttatttatttaaatataacgtagagtataaaattttaaggtaactgaaacctagatgcattagcagctagcaccttccattttatattttttaaattaggttggagctttttaaaaagtttctaattgtgttgatgtcaactgttctatgtggcgaaagggaagaacagtatgctaggatgggattaacgtctaactggttgcaaagagcgcatataaatacatatacatatatatgggggacctgttcttgtaatggtcatttgtaaggttgatgtgatcaagcctgagactgttaataagaaatatcgttttcctgttgtgtgatgtggtgttgttgaaaggagtttgatgtggtatgttgaaggatgagcttgtatcagggagttatgttgtaatgcagttctgtttgttttgaattgacgtatatgcctatgtgccgagaagtcttttatgtataagtaataaatgaaatattgcaaaacaaaagaaacggaattccaattcaaattggtagacgaattttgagccgttttttgcgtaagatgtgtaggacagaatattatcgaataattgatatcatatgactatgttatgcccttcaatccgtcaagaaagattcctcatatcatagcaggtcttagaatccttaaataatttacgctaatttacgatgaaaaaaataataatcagcataaataatcatatattaaatagtcatttctggcaccaagaagaccactaaacttgaccagcgacacgaccattgatttctgttcaaataaaaata

SEQ ID NO: 24377 - DNA, 4059 bp, DROSOPHILA
tatcagaatagacatcacaaaagaaataaatttaatttgagctccgtagttgatagaaagtttattgaaaatctaagaatggatataaaatcttttttgtaccaattttgtgctaagtcgcaaatagaaccaaagtttgatattcgccaaacgggtcccaaaaatcgccagcggttcctttgcgaggttcgtgtagagccaaatacctatattggtgtgggtaattccactaacaaaaaggatgccgagaaaaatgcgtgccgtgattttgtcaactacctagtgcgcgtgggcaaactgaacaccaatgatgttccagcggatgctggtgcttcggggggcggacctaggactggtctggagggtgcgggcatggcagggggcagtggacagcagaagcgagtgtttgatggtcagtcgggtccacaggatctgggtgaggcctatcgccctctaaaccacgatggcggtgacggcggtaaccgctactcagtaattgatcgcatccaggagcagagggacatgaacgaagcggaggctttcgatgtcaacgctgccatccacggtaactggaccatagagaatgccaaagagcgactgaacatttacaagcagacgaacaacattcgcgacgattacaaatatacaccagtgggcccggaacacgctaggagctttttggccgaattgtccatttatgtgccggcgctcaatcgcacggtgacggcccgtgagtcgggttcaaacaagaagtctgccagcaagtcatgcgccctgtccctggtgcgccaacttttccatttaaatgtgatagagccctttagtggaactctgaagaaaaaaaaggatgagcagctgaagccatatccggtgaagctttcgccaaatctgataaacaaaattgatgaggtgattaagggtttggaccttcctgtcgtaaacccgcgcaatatcaaaatcgaactggacggtcctccgattcctctcattgtgaacttaagccgtatagattcctcgcaacaggatggcgaaaaacgtcaggaaagctccgtgattccgtgggctcctcctcaggcaaactggaatacgtggcatgcctgcaacatcgacgaaggcgaactggcaaccacctctattgatgacctttcgatggactacgaacgctcgctgcgtgatcgccgccaaaacgacaacgagtaccgacaattcctcgagttccgcgaaaagctgcccattgcagcgatgcggtcggaaattttaaccgcaattaatgacaatccagtggtaatcattcgtggaaacacagggtgcggaaagactacccagattgcccaatacattcttgatgactacatctgctccggccagggcgggtacgctaatatttatgtgacccagcctcgtcgcatttcagccatttctgtggccgagcgcgtagctcgcgagcggtgcgagcaattgggcgacactgtaggctactcggtgcgatttgagtctgtgtttccacgaccctacggcgcaatcctcttttgcaccgtgggtgtgttgctgcgcaagctggaggctggcttacgaggagtgtcgcatattattgtggacgaaatccacgagagagacgtgaacagcgactttttgctggtcatccttcgcgacatggtcgacacatatccggacctgcatgttattcttatgtcggccactattgatacaacgaaattttccaaatattttggcatctgtcccgtattggaagtacccggaagagcatttcccgtgcagcaatttttcttggaggacattattcagatgacagactttgtgccttcggcggagtcgcgccgaaagcgcaaggaagtggaggacgaggagcaattgctttccgaggacaaggacgaggcggaaatcaactataacaaggtgtgcgaggacaagtattcacaaaagactcgaaatgctatggccatgctatccgaatcggacgttagctttgagctgctggaggcattattgatgcatattaagtcaaaaaatattcccggtgctatcttagtattcctgcccggttggaacctgatctttgcgcttatgaagtttctgcaaaatacaaacatttttggtgatacatcccaataccaaattttgccgtgccactcgcagattccacgagacgagcaacgcaaggttttcgagcctgttccagaaggcgtaaccaagattatactttctaccaacattgcagagacttctataactattgacgacattgttttcgtaattgatatatgtaaggcgcgcatgaagctctttacttcacataacaacctaaccagctacgccaccgtttgggcaagcaaaaccaatttggagcagcgcaagggccgagctggacgtgtccgaccaggcttctgcttcacactctgttcgcgtgcccgcttccaagcgctagaggacaatcttacgccggagatgttccgcacaccgttgcacgagatggcgttgaccattaaattactcagactgggctccattcaccactttttgtcaaaggcattggagccacctccggtagacgcagtaatcgaagctgaggtgttgcttcgcgagatgcgctgccttgacgctaacgatgaacttactccattggggcgcctgctggcacgcctcccaattgaaccaagacttggaaagatgatggtcctcggcgcagtatttggctgcgccgatctaatggccattatggcttcgtactctagcaccttctcagaggtgtttagtcttgatataggtcaacgtcgcctggcaaatcatcagaaagcgttgagtggtaccaaatgttccgaccacgtggcaatgattgtagcttcacaaatgtggcggcgcgagaaacaacgcggtgagcatatggaagctcggttctgtgactggaaaggactgcaaatgagtactatgaacgttatctgggatgccaagcagcagttactggatctccttcagcaggcaggattcccagaagagtgtatgatatcgcacgaggtagacgaaaggattgatggggatgaccccgtgctggatgtgtccctggcgctgctgtgcttgggtctctaccccaacatttgcgtgcacaaggagaagcgcaaagtgctgactacagagtctaaagcagcgttactgcacaaaacctcggtgaattgcagcaacttggccgtcacatttccgtatccgttcttcgttttcggcgagaagattcgcacgcgagctgtttcctgcaagcaactatctatggtctcgcccttgcaggtgatattgtttggatcgcgcaagattgacttggccgccaacaatatagtgcgcgttgacaactggcttaacttcgacatagagccggaacttgcggccaagattggtgcccttaagccggccctggaggatcttatcacggtggcgtgcgacaacccttccgacatacttcgccttgaggagccctatgcacagctggtcaaagtggtcaaagacctttgcgttaagagcgccggagacttcggactgcagcgtgaatcaggaattctgccgcaccaatcacgtcagttcagtgacggcggaggaccgcccaaacgaggtcgctttgagacaggacgctttactaacagcagctttggtcgccgtggaaacggcagaacttttggaggaggatatggaaataatggaggaggatatggaaataatggaggaggatatggaaatattggaggaggatatggaaataatgcaggaggttatggaaataatggtggatatggaaataatggcggaggttatagaaataatggtggaggatatggaaacaatggcggaggatatgggaacaagagaggtggatttggagactcatttgaaagcaatagaggatcaggcggcggctttagaaatggcgaccaaggcggccgctggggtaacttttaacggatacataaaaaaaatgtattggttttttcaaaaacaaaaagaataataaacattactattcgcatttcgatatgctgaagggattatacaaataag

SEQ ID NO: 24378 - protein, 1293 aa, DROSOPHILA
MDIKSFLYQFCAKSQIEPKFDIRQTGPKNRQRFLCEVRVEPNTYIGVGNSTNKKDAEKNACRDFVNYLVRVGKLNTNDVPADAGASGGGPRTGLEGAGMAGGSGQQKRVFDGQSGPQDLGEAYRPLNHDGGDGGNRYSVIDRIQEQRDMNEAEAFDVNAAIHGNWTIENAKERLNIYKQTNNIRDDYKYTPVGPEHARSFLAELSIYVPALNRTVTARESGSNKKSASKSCALSLVRQLFHLNVIEPFSGTLKKKKDEQLKPYPVKLSPNLINKIDEVIKGLDLPVVNPRNIKIELDGPPIPLIVNLSRIDSSQQDGEKRQESSVIPWAPPQANWNTWHACNIDEGELATTSIDDLSMDYERSLRDRRQNDNEYRQFLEFREKLPIAAMRSEILTAINDNPVVIIRGNTGCGKTTQIAQYILDDYICSGQGGYANIYVTQPRRISAISVAERVARERCEQLGDTVGYSVRFESVFPRPYGAILFCTVGVLLRKLEAGLRGVSHIIVDEIHERDVNSDFLLVILRDMVDTYPDLHVILMSATIDTTKFSKYFGICPVLEVPGRAFPVQQFFLEDIIQMTDFVPSAESRRKRKEVEDEEQLLSEDKDEAEINYNKVCEDKYSQKTRNAMAMLSESDVSFELLEALLMHIKSKNIPGAILVFLPGWNLIFALMKFLQNTNIFGDTSQYQILPCHSQIPRDEQRKVFEPVPEGVTKIILSTNIAETSITIDDIVFVIDICKARMKLFTSHNNLTSYATVWASKTNLEQRKGRAGRVRPGFCFTLCSRARFQALEDNLTPEMFRTPLHEMALTIKLLRLGSIHHFLSKALEPPPVDAVIEAEVLLREMRCLDANDELTPLGRLLARLPIEPRLGKMMVLGAVFGCADLMAIMASYSSTFSEVFSLDIGQRRLANHQKALSGTKCSDHVAMIVASQMWRREKQRGEHMEARFCDWKGLQMSTMNVIWDAKQQLLDLLQQAGFPEECMISHEVDERIDGDDPVLDVSLALLCLGLYPNICVHKEKRKVLTTESKAALLHKTSVNCSNLAVTFPYPFFVFGEKIRTRAVSCKQLSMVSPLQVILFGSRKIDLAANNIVRVDNWLNFDIEPELAAKIGALKPALEDLITVACDNPSDILRLEEPYAQLVKVVKDLCVKSAGDFGLQRESGILPHQSRQFSDGGGPPKRGRFETGRFTNSSFGRRGNGRTFGGGYGNNGGGYGNNGGGYGNIGGGYGNNAGGYGNNGGYGNNGGGYRNNGGGYGNNGGGYGNKRGGFGDSFESNRGSGGGFRNGDQGGRWGNF

SEQ ID NO: 24379 - DNA, 5541 bp, DROSOPHILA
tggggaacaaaagcgcacatttgtctgatattcaaatgtacacacgatgactatatacttcaatgaatgtgtacatacatattatatatgtacgtacgtacctacatatgtgtttggatttcgagttttatcagcacgcttcgccgatatcgtgcgggcacaacgggcggcgttgggtgggtggcataattataatcagaactaagtttatttgtttaaatgcctaaagagacgcatttgccaccgtctctccggtcgactgataaatgtttattaaactcggttatgcccatgagcacggccacgcacttttttcgagctctttgcataaatataaacaatatggaggcaaatatgaaaagacttgttgattcttagttttgataagcgttatgctttttattcttttcttttgaggggtttttgaaactagccaaaggcacgtgatctcaaaagatacgataaatacgataaatttgttttgtacaccagctagttcttatggttggttgaaagcgtaccttgttttatcattcagaaaaatcaaataaattattaagaatgcattctgagcgtagttgttgcacttgttgttgggacaaaagttgatttcatttgccttcaactatttcaaggcttttgaatatcaaccaattcgtaagtcttgtttagataccaccgaactctcagttttcaaggtgcgcaggtctttccttcttaagatatagtaatgttgtaagggttcctaactctttatctatcaatgaaaaagtttggtagctcataggattgggacttggttctctgggagagtcttcttggtctctctctctccgatttccatcaaaataccacgagttcttttttccgaagcgtactgagcgttatgcttttcaagcgataacatttgaagctagtcacttgggcgatacggagctttccgtttggtttgtttcgaatcggttggattcgtttttcgggctaaataaatggtctaatttccctaacggatcgcagaaggcaagatgaccaaagcaacgtaaataataccaaaaaatgaaagaaactctaagctcaaaggtgccaacaagaataggagtaacgtttgtgtctgaatcggatccaaagaaaaagttcaaaagttcgccatcaacgtcgagctcaacaatatcaacggcgacaataacaagcacaacaacaacaacaacaacaaccgcatcgcccccaccgccccaaacttcgtatgtgattaaatgtctattgaagaccgctcgttttatgtggcaagtgacgacaataccctctaaaatcggtgataccattggtaccctgtaccgttatgctcaggattcagttgatagttttctatgcgtagctgggtgagactcctaaacagatctatttaaccattcacactttgtattttcgattatttgctaaacaactcatcatttaattgtaattcatctttcttctcttgcatatttacagcaaggcccgtcgcaaggaacgcgatggcgatcaaaattcaacagacaccaaattgtatttggaggaaagtgtcctagaacgtaaattacctgaagctgatctcaaagccctagtggatcttccagctggtttggactacaatgaatggctagcgtcacacagtaagtttctaaaacttgaatatatacatacattaccacccacaattggctaattgaacttcacgtgattctctgtgtttttcggattcctttcgaaattgcctttattattatttactcacatctgtcatttgcctccattgttggcagcagctttatcgtgtgatttacaaatgagtttaacgagcgtcgtcagctgctgtttggcaaaagtttgatagcctaatcgccagtggctacgctcgagtaccccgatttacgaaacgctgcccacggtgcactatatgtatgtacattatcgtccagccaatgaacttgaacagaagaattcagactgagcgatagcattatctgtatgcagtttaagaagtgcaagggcaccctgcaaagtttgagatcaggcagttttctttgtatccaaaagtttgcgatactagaaatccaattaaaaggatattttcctttgtattcatagtgaaattattaagtgtatacatactcttttgccttgagtttcttgtttcgtgctgaataaagccactcactgctttaattacatatcaataaaacgtctaatatcatcttcgaaagccaatatacggtgagtcacatcttaattggctggttgccccaccgcctggagggatcttttttggttacatcatgggtggagaacagaatcgattttgagaaattacatcatcttgtaaataatctgtgtgcgctgggtggcagaatgcaaattacacagttctttcttaactcaaatgaggcaaataattggcaatgtatcagcaaattgtagccaccaaaagcagccggagggcatcagaagcaatccctcagacctccatttgcttctcccatgtccaccaacgttttcattatcatcctcctctcgttttggaaaaacaatcaaagccaaactgtttgtcgtgggcgatgatcagggtcatttcacgtcgcccgatggcgtcagctgcaagttcatatgcaaatttaatatttgaaattgctgactcgagaggcacaggccctcgactcctgctctggttatctgggactgggacttgtttgggctataaggaaagctaaaagttaagccatcggtttattttgctccaattctgctggcatttcaaaataatgcagctcttcttccgctgacgtaatgggaacacttgtgcaaatattgggtcggcattgaccttacccgggtggttccgctcaataaatatcgtcgtatgtccactgctgtgccttatcactgcaaaccagacactgaaagaaaccaataaaacccgcagccgtctcatttcgatgataagattgcttctgttttgaaggtaatttgtgcaccagctattattaaccgaagagttggccattatttagcaggttgttgaaccattatttttaagacgaaccaactttcgctattgtcttagaagcacataaagaagtgcctacttcaattctaatcaatattcgcttcttttttttagccctcgctctatttgagcacgtgaatttggtctatggaactattagtgaattttgtacacaatccggttgcgctgacatgaccggacccggcaacaggtgagtcctaatcagattattttcttcaatttaatttacttactaagtgtttcgtttttgcggcagaacgtacttatggttcgacgagaagggcaagaagacgcgcgtcgcagcaccacagtacatcgactatgtgatgacgttcacccagaagacggtcagcgatgagtcgatattcccaaccaaatacgccaacgagttccccggctcgttcgagtcgattgcgcggaagatactacgcttgcaatttcatgtgatagcgcatctgtatgcggcgcatttcagagaaatcgcgctgctcggcttgcacacccatctaaatctgactttcgcgcacctcaccgcactgcaccggcgcttcaatttgatcgacgagaaggagacggacgtgctgcgcgaccttgaggtggccctgcgcctcaccgacgataccggtggatgccaggatgctacctccacgacgtcgtcggtccatgaccactcccactccggcgatctccagcatcagtcgctgcaacagcagcagcaacaccacaacagcagcagcaacagcacctcctcggcggaggcgtttcacgtcaattcacaaagcaacaatggcagcacatccgcctcggcatcggtatccctaatcgatggcgatgcggtggcgccgcccatttgcacgcaaccagaggcgggtgcgggctgcaagccagcgggcagcagcggattgctgggcggtatactgggcgacctgaccagcggcgaatttggtgatacaacgcgctactgcacatcggcagttcctcaggcggcggcagcagcgggtgcgggtgtgggtggtacagcgatcggtgccacggatgctgccgcattgaacaacggcgctggcgcactacatttaaactttagcaacaataataacaataatcataatctgaatcaccatcaccaccatcatcaccaccacggccaccatggccatcatcatgcggcacagcagcagcagcagcacagtggactcatacagtgcaatgcggcgggcggcggagggaatgcaacaggggtagccacgggcggagcaactgcagcagcgtcctcgaccaccacggcatagtggggcaaaagctaagaagagagcagcagcagcagcagcagcaacagcaacaacaaaaaacattagaaatactagatttacgcaaaaatgttatttaatgttacttctatgatcctaaagttgaaaatattgtaaaaataataaaaaaaaagagaaaacattaaaatgcataaacagctaattgcaaacaacaagcaggcattacataaatgacacacagctactaagttattgaaaagctaatcgaagttggcatcgtagttccgtaaagttgatttagatatgtacttattgtatagaacgacagagatgagctgcaagcatagagtttagagttgtcgcgtgcttatgctttacacgtattttaacctttctcttctgcaacaaataaaatgtcctgactgaagccagagtgcaaatgcaaagtcaacgccttcaaggcaatcataataaagagttttgaactgctacaaaagttgagaaaagatcacttgaaaaaaaaattatacagcaacagaatgctttcatttcaacatggttttctttaaatgatttttcaagccaaacttcttacattacttacctcacgaaatatgttgaataaacctaacttatactattgtaattacttctaaacgtagcattttccagcgattagatgtacctaactaccataccctttcagcaaggactttaattttcgtatttagttccaattaggcgttttagtaggcattcagttagttgatcgctgtttaaggaaatgtaactacaatattttgtaatatattttgttgtaattcgaatctaagcagagtcacattttaaaatagagcgtcgagtactggttcaattgttcaggaatatagacacacatattctactaggcggtgaaacgcgttttaaaatagctaactcacccgtattttacatgcagtgtacttggcacagccagcctgaaagtatgcaccgaaaagttaactacacaaactgcagaatggcgcctaccggtatgcaccaaatatgtcacaacttacgtaccacacacttcacacaccaacacaaccacaaatcgcaccgaataatctccgaaaagtatacagcggaaatcacaatccacacgttgttaatgtatggcaattttaaaccaagtttgcaatgattggaaacatttaataataaatacgt

SEQ ID NO: 24380 - DNA, 1858 bp, DROSOPHILA
tccctaacggatcgcagaaggcaagatgaccaaagcaacgtaaataataccaaaaaatgaaagaaactctaagctcaaaggtgccaacaagaataggagtaacgtttgtgtctgaatcggatccaaagaaaaagttcaaaagttcgccatcaacgtcgagctcaacaatatcaacggcgacaataacaagcacaacaacaacaacaacaacaaccgcatcgcccccaccgccccaaacttcgtatgtgattaaatgtctattgaagaccgctcgttttatgtggcaagtgacgacaataccctctaaaatcggtgataccattggtaccctgtaccgttatgctcaggattcagttgatagttttctatgcgtagctggcaaggcccgtcgcaaggaacgcgatggcgatcaaaattcaacagacaccaaattgtatttggaggaaagtgtcctagaacgtaaattacctgaagctgatctcaaagccctagtggatcttccagctggtttggactacaatgaatggctagcgtcacacaccctcgctctatttgagcacgtgaatttggtctatggaactattagtgaattttgtacacaatccggttgcgctgacatgaccggacccggcaacagaacgtacttatggttcgacgagaagggcaagaagacgcgcgtcgcagcaccacagtacatcgactatgtgatgacgttcacccagaagacggtcagcgatgagtcgatattcccaaccaaatacgccaacgagttccccggctcgttcgagtcgattgcgcggaagatactacgcttgcaatttcatgtgatagcgcatctgtatgcggcgcatttcagagaaatcgcgctgctcggcttgcacacccatctaaatctgactttcgcgcacctcaccgcactgcaccggcgcttcaatttgatcgacgagaaggagacggacgtgctgcgcgaccttgaggtggccctgcgcctcaccgacgataccggtggatgccaggatgctacctccacgacgtcgtcggtccatgaccactcccactccggcgatctccagcatcagtcgctgcaacagcagcagcaacaccacaacagcagcagcaacagcacctcctcggcggaggcgtttcacgtcaattcacaaagcaacaatggcagcacatccgcctcggcatcggtatccctaatcgatggcgatgcggtggcgccgcccatttgcacgcaaccagaggcgggtgcgggctgcaagccagcgggcagcagcggattgctgggcggtatactgggcgacctgaccagcggcgaatttggtgatacaacgcgctactgcacatcggcagttcctcaggcggcggcagcagcgggtgcgggtgtgggtggtacagcgatcggtgccacggatgctgccgcattgaacaacggcgctggcgcactacatttaaactttagcaacaataataacaataatcataatctgaatcaccatcaccaccatcatcaccaccacggccaccatggccatcatcatgcggcacagcagcagcagcagcacagtggactcatacagtgcaatgcggcgggcggcggagggaatgcaacaggggtagccacgggcggagcaactgcagcagcgtcctcgaccaccacggcatagtggggcaaaagctaagaagagagcagcagcagcagcagcagcaacagcaacaacaaaaaacattagaaatactagatttacgcaaaaatgttatttaatgttacttctatgatcctaaagttgaaaatattgtaaaaataataaaaaaaaagagaaaacattaaaatgcataaacagctaattgcaaa

SEQ ID NO: 24381 - protein, 537 aa, DROSOPHILA
MKETLSSKVPTRIGVTFVSESDPKKKFKSSPSTSSSTISTATITSTTTTTTTTASPPPPQTSYVIKCLLKTARFMWQVTTIPSKIGDTIGTLYRYAQDSVDSFLCVAGKARRKERDGDQNSTDTKLYLEESVLERKLPEADLKALVDLPAGLDYNEWLASHTLALFEHVNLVYGTISEFCTQSGCADMTGPGNRTYLWFDEKGKKTRVAAPQYIDYVMTFTQKTVSDESIFPTKYANEFPGSFESIARKILRLQFHVIAHLYAAHFREIALLGLHTHLNLTFAHLTALHRRFNLIDEKETDVLRDLEVALRLTDDTGGCQDATSTTSSVHDHSHSGDLQHQSLQQQQQHHNSSSNSTSSAEAFHVNSQSNNGSTSASASVSLIDGDAVAPPICTQPEAGAGCKPAGSSGLLGGILGDLTSGEFGDTTRYCTSAVPQAAAAAGAGVGGTAIGATDAAALNNGAGALHLNFSNNNNNNHNLNHHHHHHHHHGHHGHHHAAQQQQQHSGLIQCNAAGGGGNATGVATGGATAAASSTTTA

SEQ ID NO: 24382 - DNA, 8316 bp, DROSOPHILA
gcaagcgctgctggcgctcctcctgcgcggcagaggtgagagtcaacacattggacagattcgaagggggttcggattcggattcttgggggcagtgggtactttgatttcgatcgagagtgattgggacaactatggtatgctattcgggtgactttgcgtgggacagacacagaacacagtataactaaatctaaatctacatggctttttgactttcactgggattgtgctaagttagttttatgtggattgagagttacgcatcacacagagtggaccatgtagacgacactgggacacttggacactaagtgaactgacctcattgatggtttcgaatgcgctaatggcgttactgatttcatgacagagagctgttctcagcaggagctgaaccttgggaacagattttcgatggttttgtttttatgatattggttttcttgcgttttacatatgtgattaacaattaaattctttgaatgtacatgagatagctgagttcgaacaattttaaacgagcaatggtaatgaaatataaatacacaatgtttgtgtatatagttaacaagatgtttgaatggatgattaagtgacgcgatggcaatcctcagaccttctgcacattcgcgtatgaaccaatccatgatataaaataatgccagcatttactcacaatattggcggttttgtcaacctgacggcgcttcttggaccggcgtggcgtatcgttttgacctgtcgaggaaaataacataaggaatcagaaatcacttaattaattaattaacaaaatgattaacattaatatgtctctggagtggctacttaagctgacagaactttttaagtttaatctgttacattttacttcttgttattattttctttttcctgttaataattatagtacattttttgctccttctctttaaatagcgaaaacaattagaaaaatgtaaataacatttaatttaccagcgaaacattctaatctaagcttagttgttttatatattttattgtcaccatttaatttaacatatatatgctcatctagcagccactccgaaacttattttccatcagactatggtgtaagatagtgatcttcaacagaccctgcgttgtggttcctgtcccgcttccggcaactccggcggcggctcctgctgcccctccaccgatgttaagaagctgctcgtggcgacgctgccgcttggctcgctcctcctcgagcaccgagcgccgctgcactgtcgtgggtatgtccacagcatcctgcatcggcgacttggccttgggtttcgttgccagcagcttggagaagtcgggttgggcatgcgtatggttgatacgatacttctggcgcaaatcgctaaagtccatcttggggtgcttgatatgggggatctcgccgcgaaacaagtcgcagatctggtccaaatagttgagccagattcgcgactccagctcggtcaagtccagcgactgtttggcactcatgacgcgatcgatgtggagttcgcgctctaggacggcgaatgacagctcattgcactccacgggactcatgtccttggtggcagcgtagtcgatgagatcaggacgatagctaaatggtgattttaatgattttaacgtgtcaaaatatatatgtatgtatgtatgtataaaccacaacttaccgattgataagcgcacacagaacgcgtccattccggaacacatccgaagcctccttgagttcgggaataaactgataggaatgcagctgggcacttatccatctcagcaacgtggcaccctggggcagcaagtctttaaaaaaaccccaaagtaattattaaataaaggcagatcgattgataattatttactaacctccactgcgtcgcttgcgtctgcccggtgtgtccaaatgcggggtctgcagagcatgcgtgtccatgaaggtctgctccagaatggacgggtcgtccgtgtcgaccagatgtttgacctgccagctattgaccgactccctgttcagattcggatagcgcgtggccggatccacggtataggcactgatgtcccgctgcagggtgtccggcgtggtctggttaagcagccggtagatgctttcgcgctgcgccagaacgccaagtgtgctgttctgcgggttggaccaaagcttgatggcataggcagcatccatgctggataagaatccacgggcacaacccgatccagtgggccaaaacggctcgagcagactgtcacccacgaggcactgcatcaggcgagctcctttgcgcacaatcacccgacaggacatctcggcggcaaacatcgatgtgaagtcgaacatggccacatctggtttgccgtagtgattaacagcgaactccaggtttggcatttggtattgggtggagaactccgcagcctcgcgtgcatagtcgtgcagcttttgtgtatccacattggctggggcgagaagctcgccgggatcggccatatcctcgataataacgcccttgtcaattagactgtgcttcttggccgtcatcacgaagtagtgcgtctcgtccttgtagtagacgatgttttccaggtcgatgcccgtcttcccgtacagctccttgaagaaggcctggttgaagatgaaagccaccccactgatctcctctactttagcctccgcctccgtcttcttgttgataaagttcgctgtaatagcgatggccagcttcccgcggaactccttcctcctaaagtccagcatattccgcttgccatccgctccgatcaacacatcgaattcgtagtgagatacaggatgatctgcgggagtaacagctgccctccatccgccgccatcgccagagggctctacagcgtgatcaaaactgactccctcgtggatctctacgcccaggagcagcgccaccttgagcagcatgcactgcagctgccgaatggagatgtgatcgatggagccggcgcaaaacttgccgtagaacttctttgcgcccaagttgcgcagatccgtgatgacgaatggccacagatggagcacattgttccgggtgatgcgatcgcgtttctccagcaccaccaccttggcgcccagcagttgggcctcgatggcggtgcgcagtccacagggccctgctccgatgaccaggacgcgtgtgccagtacaggcagctcccttgccgtagactctatgggcagctctggcgtcgaacttcttccacagggcctgcgccttccacgaacgcaccttggcctttagccgtgggtagaagtcgttcagaggcgagggtctcaatcccacagcctcgcacatggcccgatggagcgccaggatctggcgcatcgttgtggccacgcacagcaggtcgaatagctccgccgcctccgcggccgccgcgtgctccgccatcagcagctgctgttgttgctgctgctgcgccgtcagctgctgctgttgttgcggcatctgctgctgcggttgctggtgcggcggcaggtggtgatgctgctggtggtgccgctggtgttggcggctcattctgcaaaaggagagaggtttggtagacaaagaaattagtggggtgcttcgatatgacgactacggctactaaaaaacgaaacttgaacaacataatatattaattaattatttttgtttgacagatttttcattcaagttttcacgcgtctaaaccaagcacttttaggtgtaaaataattcgccctaagaatcaaacaaaattaagtttgaattgataatgatttcagagtaagttgcgacctcctttgaagtcaacgaaccattgcatgtttactcagaaaggactgcttcgcatgtaaatgtaaacaaaatacaagttttactttttaaatattcccggaaagcggaaagaaacacatcccctttcagacttttttacttttccacccggggaactaacaaagagcttttaaactgaacttgtcatcatcttgcttgtttgctctgctttttgttttgcttttggattcaaatgacaactgaaatctcggcacagcattatacttttatacttcaattaattgaatcagaaaatcagtaagaattactcattctgaggtccagcgataataaaaaaaaccgttgaacaaagcagcggagagcaggaaggaaatcttcccagggaaaactcaacctttgaatacccttgaaaccgattggcttgaaccctctcataaatcatgaaaaatcccaatagccaattaaacccctttgaactcaagtagagcattttgtgcgcacctatttcattcgactgcggactataattggaatagcctttgagtgctgacaagtgagccagacaaaagccaaaggcaaatgagccggtaaaagctgccactcgagtttgaacttctgtttggatccgcctagacaggcaacaacctgacaatggacagtagggaactgagagcttgagaaccgagagccgagaactgggaactgccaagtgggagctgcaaggtgggaatcctgaagtggagtgccatttgcgtccggggcaaatggggggaaaaagtaagccacaagaccgcagctgtttgttctttgtgagtgcgtttctgaatgtgaatgtccctcattcactcactcgcataaaggacaatagcctctgggataacctgagaacaaactgggcaagtcactgacccattttcagggacatcattaggaataacgtttatcggggttaaccaagcttttaaggatttcaatcggatattaaacaattaggatgagaaaagattggaaacccataaaaataatttgtttataaaattctttcaaaaaaataatttggtccaaattcgaagccgttgcctcgacatcattaggaataacttttatcggggttaaccaagcttttaaggatttcaatcggatattaaacaattcggatgagaaaagattggaaacccacaaaaataaattgtttataaaatcctttctaaaaaataatcttgatccaaattcgaagccgttgcctcgactttattgaacccgagattttttctgttgcacaaaccacaaaacagttcactgtctgatacaatttgagagatggagaattttcatagtactcgaggaaagggcagcatgagacgggcgtccaaggacacatcgccggagggcatgtgttcgcgttgctcccccgagctcactcggggatacctgatccccgtcatcatgggcggagacccgtccagttgctgtagcttgagcatcagggtcgacatcttgggcagagaaccctcgcaactatatcccgccagtatatcggctgcatactggtctatatcccgtcccagttgctccacaaccggctgcaccaccgaataatggccattgaggctgctaaagaatccatgtcgtgatcctgcctccaggacgtcggtgaccacgggacggatgcggtgcagcggcagcctgtagacgtcggccactctttccgccacctcgtaactggtcgccgggcgacccagcaccttcaacacttccaacaccagagccccattctgtctgcccagattagtgggaatcattctgaattacgcgactggatggcgacgctgcgcctccctttctactacctagattcttgcttttggtattgaaaaaaaaattaacaatgaatttttcaacggctttggttttgcctcgccagggaaaagggaaatcgaaatattttggtcgatagagacaatgaatatgtagtttgatcggaagtttgaaacacactaaatacaatggcaatgaattttgtggttggagatgagacgagggggttactaggatctactgtttggataaaggtaaaatttcttgggatcatcatgctatttcaaaagatgtatcatcatatcatccccttattaaatcagttgtcaaattgaacaatggaataaatagaataaatttgtatggtactgagctctttaatagagaataataagaaagctttctttgtttacgagttttgggaaacggtattgcaaaaaaaaaaaggttccctttttgcatagatttcatccttgacaaattattctacaccaacccacacacaaggcaggaaatcccatatccaatgccgaaaggcggttccaattttttgttgtctcatcgtctattaaagtttgggacccaaatgcgattggcgccaacaaactcataaaaaagagctgcctccatgccccccaaccacgcccacattgcggacaggaaagaggcggtgggtcacgcaattggcgacagctcgactgtcatccgctaccactctctacactgagggaaaaaattaaggggacttttaaaatggggcatctgatggtacaaattctcaattgatgtaccatatgcgatttttcatcacatcaaaaactaagcatatctttcgttccgtgtagttatcggtattttttcgctcattgtttgtccgggttaatcaaaagccttgtgggtcacattgggcacacaccacattatgtcattgcgccaaaagaaagggggtgttgttgggtggtcgtatgagatgaaatacgaaaattaaagtcgaaagaaaatgaaaagttgagcgcttatcgatttttgtgttggctgctttatctaccaaaagtcgccacaacgcgaagtttgttggggcagggagggaaattaaaatcagccgaaactttaggaatgggtagggtatcaaaacaaccggcgagggtgaactgcagcaggtttttcttttcgccaactgggggtgagatgaatgactcatcttcgaatactattcgagggtggcccgaaaatatcccaccatatctacagcttaattactcataaattcagaaataaaaccaaaattgtggactttgcgtaaacgaatgaattcatagtttataaagtgttgcacatggctgccgtacaagatcaaggttcccgagaacaaaatgaaccatttcagtttgaaatgttgaaatttctctttcgtttccttgtgcaaacttggccaatggccaggaaatttataacaaatattcgaaacaccaacatcatctcgtagtcccattcataaacaaaataattaattttgttcaaatttttgttatttcttccgcagtttgtttttgtccatatcatatgctcacctgatgcaatgcaattgacacgtttgtccgaattatcacaatatttatcgcttatatcacaattttttgtgtttatttatttaattttttattcggaacgattcgttgcgagatgcagagccacttgatcggtaatgaagctacgccactgcctgggatcatttttaaggcatttctgtaacaacagatgacaaagatacaatgagtccggccaggtacacaaaagccaggaacattcaaaccacccccacaatgtgagaagttcgtcgcacacttttgatatacacaaaacatcataaaggcagctctaattatagatttatagatactgtatctacatgcaagttttgtttattatcactcatcgataagaaagctcattcttgggcactttctaataacaaaaccaagaagaagaatgctttccgacttgggcatgaaagtcacgtaatttgaatatatctttcttattttattcgttcgcctttatgtgacaattgtaaatagaaatatgtcactgaaacgtgaagagttttcagaagttatggaaattattttctatagtaaccgaatggaaaatttcgattggtgctgcattttatattttgaactgataaacgtcttaatttcaaatcgatctgcttagcacctaggcgcttcagaactcttgccgaatgaatacagctggggcataaaaaaatatgcaaatagacagccgcttgattgatttgcgttcgttgttttctaattttggttcctatgccaattgatcgacagcctcgcagacgagcgaaaattgttgaaattgcagcaaattgatttatgaacaccaaaccaagcagacatttgagcaacacgaaccacaatgcggaagcgccatcgaatttttactttggggattaggggcactcactgctggcgggaaaaaaaaaatataaaattaaataaagaaatcattcggccaagtgtgacaattaaaagacgcgcctgtggcgcttttctataccttttggctggttttcacaattacaacaagatgtgacaagtgtagaaacaatgaaaatagatttgattgaataaatcttgtcggcaactttttggttggcagccaaaacttaa

SEQ ID NO: 24383 - DNA, 2549 bp, DROSOPHILA
tctgcatctcgcaacgaatcgttccgaataaaaaattaaataaataaacacaaaaaattgtgatataagcgataaatattgtgataattcggacaaacgtgtcaattgcattgcatcagaatgagccgccaacaccagcggcaccaccagcagcatcaccacctgccgccgcaccagcaaccgcagcagcagatgccgcaacaacagcagcagctgacggcgcagcagcagcaacaacagcagctgctgatggcggagcacgcggcggccgcggaggcggcggagctattcgacctgctgtgcgtggccacaacgatgcgccagatcctggcgctccatcgggccatgtgcgaggctgtgggattgagaccctcgcctctgaacgacttctacccacggctaaaggccaaggtgcgttcgtggaaggcgcaggccctgtggaagaagttcgacgccagagctgcccatagagtctacggcaagggagctgcctgtactggcacacgcgtcctggtcatcggagcagggccctgtggactgcgcaccgccatcgaggcccaactgctgggcgccaaggtggtggtgctggagaaacgcgatcgcatcacccggaacaatgtgctccatctgtggccattcgtcatcacggatctgcgcaacttgggcgcaaagaagttctacggcaagttttgcgccggctccatcgatcacatctccattcggcagctgcagtgcatgctgctcaaggtggcgctgctcctgggcgtagagatccacgagggagtcagttttgatcacgctgtagagccctctggcgatggcggcggatggagggcagctgttactcccgcagatcatcctgtatctcactacgaattcgatgtgttgatcggagcggatggcaagcggaatatgctggactttaggaggaaggagttccgcgggaagctggccatcgctattacagcgaactttatcaacaagaagacggaggcggaggctaaagtagaggagatcagtggggtggctttcatcttcaaccaggccttcttcaaggagctgtacgggaagacgggcatcgacctggaaaacatcgtctactacaaggacgagacgcactacttcgtgatgacggccaagaagcacagtctaattgacaagggcgttattatcgaggatatggccgatcccggcgagcttctcgccccagccaatgtggatacacaaaagctgcacgactatgcacgcgaggctgcggagttctccacccaataccaaatgccaaacctggagttcgctgttaatcactacggcaaaccagatgtggccatgttcgacttcacatcgatgtttgccgccgagatgtcctgtcgggtgattgtgcgcaaaggagctcgcctgatgcagtgcctcgtgggtgacagtctgctcgagccgttttggcccactggatcgggttgtgcccgtggattcttatccagcatggatgctgcctatgccatcaagctttggtccaacccgcagaacagcacacttggcgttctggcgcagcgcgaaagcatctaccggctgcttaaccagaccacgccggacaccctgcagcgggacatcagtgcctataccgtggatccggccacgcgctatccgaatctgaacagggagtcggtcaatagctggcaggtcaaacatctggtcgacacggacgacccgtccattctggagcagaccttcatggacacgcatgctctgcagaccccgcatttggacacaccgggcagacgcaagcgacgcagtggagacttgctgccccagggtgccacgttgctgagatggataagtgcccagctgcattcctatcagtttattcccgaactcaaggaggcttcggatgtgttccggaatggacgcgttctgtgtgcgcttatcaatcgctatcgtcctgatctcatcgactacgctgccaccaaggacatgagtcccgtggagtgcaatgagctgtcattcgccgtcctagagcgcgaactccacatcgatcgcgtcatgagtgccaaacagtcgctggacttgaccgagctggagtcgcgaatctggctcaactatttggaccagatctgcgacttgtttcgcggcgagatcccccatatcaagcaccccaagatggactttagcgatttgcgccagaagtatcgtatcaaccatacgcatgcccaacccgacttctccaagctgctggcaacgaaacccaaggccaagtcgccgatgcaggatgctgtggacatacccacgacagtgcagcggcgctcggtgctcgaggaggagcgagccaagcggcagcgtcgccacgagcagcttcttaacatcggtggaggggcagcaggagccgccgccggagttgccggaagcgggacaggaaccacaacgcagggtctgttgaagatcactatcttacaccatagtctgatggaaaataagtttcggagtggctgctagatgagcatatatatgttaaattaaatggtgacaataaaatatataaaacaactaagctt

SEQ ID NO: 24384 - protein, 765 aa, DROSOPHILA
MPQQQQQLTAQQQQQQQLLMAEHAAAAEAAELFDLLCVATTMRQILALHRAMCEAVGLRPSPLNDFYPRLKAKVRSWKAQALWKKFDARAAHRVYGKGAACTGTRVLVIGAGPCGLRTAIEAQLLGAKVVVLEKRDRITRNNVLHLWPFVITDLRNLGAKKFYGKFCAGSIDHISIRQLQCMLLKVALLLGVEIHEGVSFDHAVEPSGDGGGWRAAVTPADHPVSHYEFDVLIGADGKRNMLDFRRKEFRGKLAIAITANFINKKTEAEAKVEEISGVAFIFNQAFFKELYGKTGIDLENIVYYKDETHYFVMTAKKHSLIDKGVIIEDMADPGELLAPANVDTQKLHDYAREAAEFSTQYQMPNLEFAVNHYGKPDVAMFDFTSMFAAEMSCRVIVRKGARLMQCLVGDSLLEPFWPTGSGCARGFLSSMDAAYAIKLWSNPQNSTLGVLAQRESIYRLLNQTTPDTLQRDISAYTVDPATRYPNLNRESVNSWQVKHLVDTDDPSILEQTFMDTHALQTPHLDTPGRRKRRSGDLLPQGATLLRWISAQLHSYQFIPELKEASDVFRNGRVLCALINRYRPDLIDYAATKDMSPVECNELSFAVLERELHIDRVMSAKQSLDLTELESRIWLNYLDQICDLFRGEIPHIKHPKMDFSDLRQKYRINHTHAQPDFSKLLATKPKAKSPMQDAVDIPTTVQRRSVLEEERAKRQRRHEQLLNIGGGAAGAAAGVAGSGTGTTTQGLLKITILHHSLMENKFRSGC

SEQ ID NO: 24385 - DNA, 3340 bp, DROSOPHILA
ggctttcccgccaatccctaattgtcagtcaccacgaataaccgaacttatttggtgtggccactttataacaacgaagtgtggcacctctttcattttctggataatttaaatttataatacgcgccaatattttatgtgcgtcaagttagcgtcgatggcggaatttccccattaaagaacatttctttaaggacatttaaggaaaacttcacgataaagtagaactataaaatcgtccttaggtttcataaaatctttattcaattcaaaataaatcgaaaagttacataataaattcgataaatatgtttttatatatgcaggttataaataaagttacgcaataatttaaatgatttcgttagtatacagttaatggttgctttctcgcttacatcgctatgtgtaggctctcgcatttagaaaatatttgtgtgcatctctttgtgttcactttgatttcgattgggggcaaatgacataatacatacatgggtgtgctgatcgggaggatgtgcggaaggtgctttgtcaaataaataataatacactcaaacggtttacatagaaatcgacaaacaatcgctaagtgaaaataacctaagaaaactcaaatacaccatttacatttgctcaaaatcacataccctttgcacacgctcactacattacattaaataaaaacacaacatattgcataggacatacaaaaatcagacagatttcagtggcaacgactaacaaaacgtacaattaggtcgaatacgaaactaaaggtattcgcaaaaacattcgtaatccctacttttaaattgcgaaattagttttttggttttgatttcatctctgcctgtttttacattaaccttgcgcgcttctcccatattagttaggctctctacttatataaatattgaaattgttcttagccagcttatccactttgaatagttagttgctcgtttcggttacagctcacgggttttagtattgttaattctgtatattcagctgcctttttggtacgctctcccctgttcccttgtttcatcttaagtatttaggctcaacagtccatgcaccacttcgcagaccagcaatctccagggaaagttggctattcaaatctgaaacaagtggtgttgtcaatttcaaatttaaacatataggtcctatttactcacgatcgattcttcgtggtcatgcggttgtcccgtcagcttaatgcccgttgcctcggcggacgtggatgctgatcccgctgccgtgaggtcgagctgggaggctgtgggtcgtagggcggctcgcttggcgacaatttccagcatctcgttgagaattgctccctcggcggccacatcggcagagcttttgtccagttctgcaatgatggaattaaatattatatcaaagttttgagaggaaactataacactcactgttgcaggacaagcgcagattgagctcttccttcagctgggcatgccgatactccagttgcagttcctgttgccttatagtcagttcctcatcgcgtttcctaaaaacaaaattacattagatttgtttattatagagcttcattgattagcatacttgagtgctgtgatgttgcgccaaatctccaaaagttccttaagtagcttctcgtcgttgtcctttgtcgcatccaggctgtagaagagatttcatttaatgggtattcaaggatatagccagatcctagcactcacttttcaatattctgcgcctcgcctcgcaaggccttctcaataagcacgccgcgtgcctccagatccttcagttgcacctcgatctcctcctgttcccgctgaatctcttgagcgattcgcaatcgcttgagctcagcttgtcgtgaagccttcgatatggcacgttgcttcttatgctctcgtgtctcgttagcgtagctctcatctgggaaataggaaaggggatcaaatcaggccgtaacgtttccgcttgtatgaatattcagtgggtcgggacaggaaaaatgggtggacggtatatgcagacatagaatgagaagaacaaaccatcggatctctgataattcagtggaagaggcggtatgggtggtggtgtctggtcgtccagggcactgggatgagctgcggccaggtggtggggcttgtgtatatagagctgcggactggatgaagagaacgattcgggtttcggtttcgcagtgttcgtttgctttcgatagcgactgttgttcgtggtgttcagatactcttgcgagtgatttttctgtgatgcggatgtggctcctgctggagatgctgcattgcagaccagcatatccttgtcctagtatagcatggcgttaggaggtatcagaatatatatcggtttaaatgattgagtgtttttcagaggaggaaaaaaagaggtcgagaaaaacgtatggaaaaataaacaatattcaaaatcttattagaaacagcttgttatttactaaaatatagtacatgtaacgtgcaaaatgtccaaaggcaaaaaacttaacacataacttttattgattaccataaccgggaatccagggaaaccaatcatgcaaaatatccattatgcttaaatcataaataacacttcttaaactaattcccattaaacaaaaagctgccaagtacttaagccataaacacttaaagtttaaaacacacaactgaatatccttatgtccgtaaggtttccctgaaacccatgcgctcctaatagatattaaactaagaaaacatatatgttatttttgaggcaaaagaaataattcagcagtcaatcttaaatgttaagacttagattacttttgctgcaaagggtaaaagaaaacaaaaaataaagtaaatgaaaagaaatcataagaaaattgtggcaactttattgtgttaataggacagcaaacagacaaaaagcccactcagatgaagaaatgtgcgattagataaaaaataaaccaaatgtaacggatgccaaataataagactaagctgttgagagtgtaagaaatttggaaaactcgaaagtgtgtggtaaatagagtttagaatagttaaaagtccttacaccaaaaccgaaattcctcagatcaaagcaagactgcaaaatgattaaaagaatttcatatgttataaatggcacacttattacaccagacatcgagtcctcggcagttaatataacttatatgctagatgaggtcgtgtgaatcgatagcttggactagccaatctccatgaggcagacaacacttggttacaccaacaccgactaaaaccacattacaattatatatttggtacaatca

SEQ ID NO: 24386 - DNA, 988 bp, DROSOPHILA
gacaaggatatgctggtctgcaatgcagcatctccagcaggagccacatccgcatcacagaaaaatcactcgcaagagtatctgaacaccacgaacaacagtcgctatcgaaagcaaacgaacactgcgaaaccgaaacccgaatcgttctcttcatccagtccgcagctctatatacacaagccccaccacctggccgcagctcatcccagtgccctggacgaccagacaccaccacccataccgcctcttccactgaattatcagagatccgatgatgagagctacgctaacgagacacgagagcataagaagcaacgtgccatatcgaaggcttcacgacaagctgagctcaagcgattgcgaatcgctcaagagattcagcgggaacaggaggagatcgaggtgcaactgaaggatctggaggcacgcggcgtgcttattgagaaggccttgcgaggcgaggcgcagaatattgaaaacctggatgcgacaaaggacaacgacgagaagctacttaaggaacttttggagatttggcgcaacatcacagcactcaagaaacgcgatgaggaactgactataaggcaacaggaactgcaactggagtatcggcatgcccagctgaaggaagagctcaatctgcgcttgtcctgcaacaaactggacaaaagctctgccgatgtggccgccgagggagcaattctcaacgagatgctggaaattgtcgccaagcgagccgccctacgacccacagcctcccagctcgacctcacggcagcgggatcagcatccacgtccgccgaggcaacgggcattaagctgacgggacaaccgcatgaccacgaagaatcgatcatttgaatagccaactttccctggagattgctggtctgcgaagtggtgcatggactgttgagcctaaatacttaagatgaaacaagggaacaggggagagcgtaccaaaaaggcagctgaatatacagaa

SEQ ID NO: 24387 - protein, 284 aa, DROSOPHILA
MLVCNAASPAGATSASQKNHSQEYLNTTNNSRYRKQTNTAKPKPESFSSSSPQLYIHKPHHLAAAHPSALDDQTPPPIPPLPLNYQRSDDESYANETREHKKQRAISKASRQAELKRLRIAQEIQREQEEIEVQLKDLEARGVLIEKALRGEAQNIENLDATKDNDEKLLKELLEIWRNITALKKRDEELTIRQQELQLEYRHAQLKEELNLRLSCNKLDKSSADVAAEGAILNEMLEIVAKRAALRPTASQLDLTAAGSASTSAEATGIKLTGQPHDHEESII

SEQ ID NO: 24388 - DNA, 2557 bp, DROSOPHILA
cacaggttgctgggattatgaattttcccatgtcctttttgccgccgttatcgcagctgagccgcttgcgcacggttagctgcattgtccttttttttttagatttttcctccagtccttggtccttgtgcgcatgcaagatgatgcattaggcacttccgagtcgagacggtaatgccgtggcttaagccgcttaggccaagtgtcctcccattgatccttcggctccgatttggctcctgttcctcggggcattgtcctttggccaggagacaaggagactcgttgcttctgtttggttaaatgcattttagccaaatgcgcttgacagatgatcctcccttgtcgtctcgatcttttacttggctcctttggagtcatcagcaccgacattcaatcattctgcgatccttggctcgcacagctgacaaggatcaatgcactggtcgaagcattttcgatgcaattaatcgacagaggagacgaacaaaaactaaaaacacctaatacattttaagtgtaatgcattttccaaatgagtacgtttgttaaggttaatagccagtccattgatatttcattgcgattatatgcaatattaatattaatatatatttatgcggaaattttaaatttaaatcgaacgtttttaatataattactttattaattcaatgctctgctaatggtatatttaaactaaaaacattatttgtgttttatgttgttatgaaaaattacagataatatgaccaagccattgccttaaatatgtgcaccattttcttgaactcatccagcaaattttacccctaaaataggaatctcaattaggttagtgacgggataaggataagggtgatcggatcccaaaggtatacaatttctttcagtgtccacagaaaaaacagcgggaaaaaattagcagaaggtgtaggtgtagtggcaccctcgaaactctcctgtgcaccaggctccgttggtagctaattatgtaattatgttgtcaaagggtttcgccttttattttactttcttgttgtttctttccgttttcggtcgtgccaggcgtcaaccgactaaatgtgcagcccataaaaataaaaacaataaaacgaaaaacaccagaaacgacaataacaaccgtgactggtcgaatcaatttgatgttgcttcgttgcggttgaccaaacccgctggccactcacttggaaccaaaacccgctgcctttgggagccccagagtcggcgtcttggccatttttggctcctaagaccccggagcttagccatccatgggtcgaattatggtggcacaaaatccgatgcgttttcaacccaagcgcgttcaaccgaaatgaactgcttagtgtgaccaggcccctaagtgggtgtgtttgaggtggccatagctgcggaaacttcacttatggcggcttgaaagcggaaggccaaacgatgtgggggaatgatttaatatggccccaaatggatgaatgaaatgacattaacggaccgcttaataatttgttttgaggtttttcgaacttgtgttcgtgaatttatttgtagtccaacttttgagtagtatctctatactgtgttcactcataatcagcaataaaatgttggaaattcaagaaagcaatacataattatcgttgatgaagtaaacttaacttcgaaacgaccaaacgtggcattcccttaaggcaggccttaaacacaatgcccaaccaaccgccaaatgtcctttaagtcctggaccactgggcaggcccacaggcgcgtcggccatccagtgcagagatttgaccattaaaatgctcattaatatcgtatggcatggccgtgttgttgcagttggccctttgtttgcattcatgtcgccgctcggctgccgttgggctgcattttgacattttgacgaagaggaaatgtcacgtcacgtcgtgttttgccgcacacctccaatttccggttcagtgagcctatccccatcccccatcacccaaccaatatcccctcactaaccaaccctcctcctcgatttctccgctgcaagagcggacggaccagtgccggagtagtttaagtcccccatcgaacttcagcagaagtctgggccattgcaatcaaaaattgcacgcgcaaaatcatggcgaatgggggcattcgagcggttttcgtgggaaagtgcaggtggagtggggcttgggtgggggtttggcgctcgttttgtggatgtgcatgccgttctcggacgcacattttgggcatatacttttgcggtgggcgacgtgtgtggttcttcttgtttcggagtttgcttctcgttaaagcttgattagggaaagataatgagaagactcgtctggttttttgattggaaaacccagctcagcatttttaaaccttggatgtattaaagagaatgtatttaactattagtttcagtgggaaggtatttattcaacgtgctaatagtttcaatctaaaatttcatgatatttgtatagctaaataatttaaatgatatattttataaattgttgct

SEQ ID NO: 24389 - DNA, 557 bp, DROSOPHILA
atgttgtcaaagggtttcgccttttattttactttcttgttgtttctttccgttttcggtcgtgccaggcgtcaaccgactaaatgtgcagcccataaaaataaaaacaataaaacgaaaaacaccagaaacgacaataacaaccgtgactggtcgaatcaatttgatgttgcttcgttgcggttgaccaaacccgctggccactcacttggaaccaaaacccgctgcctttgggagccccagagtcggcgtcttggccatttttggctcctaagaccccggagcttagccatccatgggtcgaattatggtggcacaaaatccgatgcgttttcaacccaagcgcgttcaaccgaaatgaactgcttagtgtgaccaggcccctaagtgggtgtgtttgaggtggccatagctgcggaaacttcacttatggcggcttgaaagcggaaggccaaacgatgtgggggaatgatttaatatggccccaaatggatgaatgaaatgacattaacggaccgcttaataatttgttttgaggtttttcgaacttgtgttcg

SEQ ID NO: 24390 - protein, 124 aa, DROSOPHILA
MLSKGFAFYFTFLLFLSVFGRARRQPTKCAAHKNKNNKTKNTRNDNNNRDWSNQFDVASLRLTKPAGHSLGTKTRCLWEPQSRRLGHFWLLRPRSLAIHGSNYGGTKSDAFSTQARSTEMNCLV

SEQ ID NO: 24391 - DNA, 3208 bp, DROSOPHILA; identical to SEQ ID NO: 8551

SEQ ID NO: 24392 - DNA, 664 bp, DROSOPHILA
tcaaatatacaccatgaagtacctgctcagcatgaccttgctgctggccatcgggctgcagcagatcgacgcccacggcatgatgctgtccccgccgagccgatcctcccgttggcgctacgatggatccgcaccccagaactggaacgacaacgaactcttctgcggcggtttgtacacgcagtccaacaatggaggtcgctgtggtctgtgcggcgacaacttcctggatgcccagccccgtgccaacgagatcggaggaagcatcggtggagctggtatcaccaccaatcacttgggttacttcgagttccacctgtgcaacctggacgccttcggtgccgagtcggaggagtgcttcgatcagaaccgcctgcgattcatcgatggaagcgatagaaaggatatcggcgatcagatgggcgaattcgatgtgacagtcgtcctgccggagggtcttacctgctctcactgcgtcctccgctggacctatgtgggtgccaacaactggggcatctgcgataattccggaaacggagccttgggctgtggcccacaggaaacattcaagaactgcgccgatgtgagcatctactggggtcgcaacctggtcaaggaattggtcggtggcggagatccagtggctccggttgaggtcgcctga

SEQ ID NO: 24393 - protein, 216 aa, DROSOPHILA
MKYLLSMTLLLAIGLQQIDAHGMMLSPPSRSSRWRYDGSAPQNWNDNELFCGGLYTQSNNGGRCGLCGDNFLDAQPRANEIGGSIGGAGITTNHLGYFEFHLCNLDAFGAESEECFDQNRLRFIDGSDRKDIGDQMGEFDVTVVLPEGLTCSHCVLRWTYVGANNWGICDNSGNGALGCGPQETFKNCADVSIYWGRNLVKELVGGGDPVAPVEVA

SEQ ID NO: 24394 - DNA, 3521 bp, DROSOPHILA
cgctttgaatgtgagatcatgaccgatatgttggcaatagttgccaaaaattataaacaaaatgtaaacaaaactcgagacgcttataaacaaatttaattagagaagttgcagattgacgatgcccggcaatagcgacttgttgcgcaagttagtggggttccaaaactgagctcaattactcacccgttggtttggaggactgccgggcttagatatcaattcaatggtggcaagggattcactttctcggtttagtttacgaaacaaatatacaattttgacatgaaaaacatgttataggtgctagtatgaccgtaaattcgtaatgatcagctgtgtgaaaacagtgttgttaagcgcagcaagaccactgttgtgggctaacagaatgttatacgcgtgccaaggcaaacaaaaatacatggtcgttttcaaaaaggggacaaatatttattttgaaactattaacaaattcataaagatgccccaaaagtagccagaagaaccgaaatattctattcgaatcattttggttcatatgaattaacttagttactcatgcttctgctgcctaagtgatgtcttcacttccatcattgtttgtgtagaaataaagttttttatttttttaatgagttgactataaaatgattttattgcgtttttggttaattccttacaaatttaaagcttatgtcaggtgagttatacactaacatcattaagtataaacaaacaattttttagaaaagagttaaaattgaaaggtggagttacttacatttttcaagtagttattcaaccttaaaatgattagaatcaaaacatgattttgaactagaattatttcctaaccaattaccccactgtaagcattttcggctacgccccagacaacagttattaatatttccgacgaaagctttcaagctaagctttcgcgcaaccgcccagatgttttaactgtgggtccttcaattccgtcagttccttatagacccaccggcatgacataacacagccgacccactgaaaatgccgcccatcgcaaaagaaacgacttagccgccctatctatcacatttgcaataggtataggaaatcatatcaattggcatccaaataatatacatatgtatttgtatcttttaccaccttctagctaaagataactaacacgcaaaatgccccaccaagagagaaaatcgatgtggttctttggcggattggcgagcgtaggtgcggccatggtgacccatccgctcgacctcatcaaggtcacgctgcagacgcaacagggtcacctgtcggtggcccagttgatccctaaactcgcccgcgaacagggagtactcgtcttctacaacggcctctccgcctcagtgttgcgccaattgacatactccactgcgagattcggggtgtatgaggccggaaagaagtacgtcaatacggacagctttggcggcaaggtggccctggcaggtgcatccggtctcgtcggaggaatcgttggaactccggctgacatggtcaatgtgcgcatgcagaacgacgtaaaactaccgccgcaacaacgacgcaagtatgtgaaaattattttaatcctttaaatagtagtttgcagggtaaatcatttttgaggctttaaacttactgattttttgtatttcagctacaataatgccttcgatggactggttagggtctaccgccaggagggattcaagcgactcttttctggagccaccgcagcgactgcccgtggaatcctgatgacgattggccaaattgcattttacgaccagacgaagatctacctgctggccacgccttatttccaagacaacctggttacgcacttcaccgcctccctggtggccggaacgatagccaccactctcacccaaccgttggatgtgctgaagacgcggtccatgaacgcgaaacccggcgagttcaatggcctgtgggacatcgtgaagcacacggcgaaactgggtcccctcggcttctttaagggctatgtgccggcatttgtgcgtctgggtccacacacgatcatcacctttgtgttcctggagcaattgcgtctcaagtttggcaccttgaattagccgcgatgccaatcgataccttaactaggcaataattctccttggctggctggcagattcccttgagcaatgcaacattccagcagcaattcgttcaccgtgtagaacataacttagctttagcccgttccagttgttaaccaagatgcttttatgctagcaaaatatttgttgttaagcgttcaatgcccgctatcccgaaatatatactttttaataaaatacagaaatgtattcatttaccgtgaatattaatgcttaaatagtgtcgattttttcgcaatttgcttgtttaaagtaaacataatatctttccactgcgtataacaatatgtatatttgtactggattttgaacaaactttaagctaagagcaattaaacagaaggtagaccattaaatatattctgtgctaattggtgtgggcatagaaggtaaaggttgactctatcgtactccatcgtcattgtcgtgctgttactaattataaatattttgttaacaatggctaagcatttgtttgttgttgctttatgtgtaaaatcggccattcaataaataaataaaaaaaaggacaaacggtttctacgaaatgtaaatagtctttgtttttctataaacaaataaattaaaattaataatgttatcccaagacgtaagaaggattaaaataaggtgctcagaatttaaaacagctcgattttttttttaaatcagttaaaagaaaatgaagggtaataattatttcataggtgtaccgtccttaaagtgaattcaatcgtatatttcgtgatgttggcaattaaatataactgtgcaatagcttaataaaacaaagggatcgcgttttgatatcaatgaaccatttctgggaataaccgaaacaagttcgtttccggtacaagcgatcatctatctaaatccttatataccaatgacaacgaatgatcagccatcagtcgtcaaagtatcgtaatgggctcctctttatgtcccgtctcttatctggcggtcttggcaattatcgtcctaaccagtaatattacagtccaggctaaaaggacattcaggatccagaaattagaaaaggtgactgaggatacctcatatctgcgcagtcgtctgcgtatcgctgagtccgaggaaaatgagttgaaagtcagcggatatctcgatctgaatcaacgactcgacaatgattggacggtacgtagtttataatatatagtggaggaattaattatttattattccttcaacaggttgtgcttaaggtttcaagatccccggatagcgatggagactacgagaaggttttgacattcgaaatgcagctttgcgactttatgaagagctactacaaggatatcttttacgaacggatcaaggaatactcgaatg

SEQ ID NO: 24395 - DNA, 1361 bp, DROSOPHILA
acccaccggcatgacataacacagccgacccactgaaaatgccgcccatcgcaaaagaaacgacttagccgccctatctatcacatttgcaatagctaaagataactaacacgcaaaatgccccaccaagagagaaaatcgatgtggttctttggcggattggcgagcgtaggtgcggccatggtgacccatccgctcgacctcatcaaggtcacgctgcagacgcaacagggtcacctgtcggtggcccagttgatccctaaactcgcccgcgaacagggagtactcgtcttctacaacggcctctccgcctcagtgttgcgccaattgacatactccactgcgagattcggggtgtatgaggccggaaagaagtacgtcaatacggacagctttggcggcaaggtggccctggcaggtgcatccggtctcgtcggaggaatcgttggaactccggctgacatggtcaatgtgcgcatgcagaacgacgtaaaactaccgccgcaacaacgacgcaactacaataatgccttcgatggactggttagggtctaccgccaggagggattcaagcgactcttttctggagccaccgcagcgactgcccgtggaatcctgatgacgattggccaaattgcattttacgaccagacgaagatctacctgctggccacgccttatttccaagacaacctggttacgcacttcaccgcctccctggtggccggaacgatagccaccactctcacccaaccgttggatgtgctgaagacgcggtccatgaacgcgaaacccggcgagttcaatggcctgtgggacatcgtgaagcacacggcgaaactgggtcccctcggcttctttaagggctatgtgccggcatttgtgcgtctgggtccacacacgatcatcacctttgtgttcctggagcaattgcgtctcaagtttggcaccttgaattagccgcgatgccaatcgataccttaactaggcaataattctccttggctggctggcagattcccttgagcaatgcaacattccagcagcaattcgttcaccgtgtagaacataacttagctttagcccgttccagttgttaaccaagatgcttttatgctagcaaaatatttgttgttaagcgttcaatgcccgctatcccgaaatatatactttttaataaaatacagaaatgtattcatttaccgtgaatattaatgcttaaatagtgtcgattttttcgcaatttgcttgtttaaagtaaacataatatctttccactgcgtataacaatatgtatatttgtactggattttgaacaaactttaagctaagagcaattaaacagaaggtagaccattaaa

SEQ ID NO: 24396 - protein, 280 aa, DROSOPHILA
MPHQERKSMWFFGGLASVGAAMVTHPLDLIKVTLQTQQGHLSVAQLIPKLAREQGVLVFYNGLSASVLRQLTYSTARFGVYEAGKKYVNTDSFGGKVALAGASGLVGGIVGTPADMVNVRMQNDVKLPPQQRRNYNNAFDGLVRVYRQEGFKRLFSGATAATARGILMTIGQIAFYDQTKIYLLATPYFQDNLVTHFTASLVAGTIATTLTQPLDVLKTRSMNAKPGEFNGLWDIVKHTAKLGPLGFFKGYVPAFVRLGPHTIITFVFLEQLRLKFGTLN

SEQ ID NO: 24397 - DNA, 3282 bp, DROSOPHILA
aagagagtgtaaaatcgatttgtcacaaataatttgcggcttgcccagatttttttttgcgatttaaacatcaaataatcacaggtaaatggtaaaaacatacagttttgtactcacaattctttgatctgcatctttgccaattattatccggtattttcctgcttgattcgctgcgagagagtacaaaatacagaattagatttaatgcgaattcgctggcggatttcaactaaattgtagcatttattatttccaaatataaatgcacttgcactctacgcttaaccttcgcacgcactttctatatttaatttacatatatatctgccaataacactttggtgtttttgtttcgctgccaaatcgctgcgcccgcactttttgtttatgtttggccaagccaactttagtttagttagccaattgggattctaatgctttttctccaattgtcggctaaacgcacgagtcatatgcacacacacactctcttgcaaatacacacgcacacacagcgggcggaatatcaatagcaatttatgcgatttgccgctgatttattacttaagtgatgacgtacaactggggagtgcgattggcctggtatcgggatcggtacgcgtttgcaaatcggcggcagtaatatactagtaatgagtttgttatttagctactgcgtgtccggagcggagctaaagttcgatgttcgtgcaaaacacttcgattccgataggcggatgctatcgatttcggcgatgccccttggtcacacttggtggtgggcgctgcccgtcgccgactatcgatagcacaagcgggttatctaggtgtgcgcagcttgttagggtgactcatgctgttaaaattattataaaaagttaatgaatataatatagttataataaaattatatataaatctataagatcaaagatcatcagttatcatttatcatttgattatatgaaaaacaagaacagaaacaagatttaataggtttttgaaatgtgaaaatgtgggttacccccaattcttattcgaaattaaataacctaaagaacacctacacagataggtaatttgcacataagcaaattttgtctagaattccaaatggtaataatagtagtaatagattccaattcttataagcttggtggctccgtcatttcctccttcttggcatcatttcccattgcgtctagtgcgtccttctcatcctctggcggtggcggcaattctaatcctccgagcatactttctggtcgatttggagatggcggttcgggaacgagctcttcggattcgagatctatttcgcggggtgccttacgagtggagggcctttcgaaatccggattgccgtcatcatcggtgcgcatgctcagcgcgaacttgataattcccatgccctggtagtcatcgtcgatgggtatgtttcgggcccacaccttgcagctgaagaaggtcttcgcattctcgggcatcttgttcatctggatggccaccacgcgcgtcactcctctcatgttctcggaggcctcgaaatatggacccggatagaagaccatttcgggcttgggcccattggtcacctcgcaggtgatccaaatcttgggcgtgttgcccagcttgcccacggtgtcctgaaggctcgctggcgcctccttgggcaagtcatctggcgtgtcgtaggtctccggcacatagccaataaccttgttcagcttgatgaagacggtcggcttttcggtggcgtagccccacgtagtgtcctggttgaaatcggcgaagaagtcaatggcattgtcgttcaatttgttcaggaaatcgtcgatgcggtccgcaatcggattgacctcactcatgatgtgcgtaaagtaggccagcacggatcgattctggttgggcaccatcgacagacccggcggacccttgagccagcgcggcttattcggatcaatgatggccagcataaagatgcccaaccaaaaggccacaatgcacacgattagggcgtatagtaccaggtagaagccagtgatacgcatccaacccagagctgtgcgtccgaacaatttgtgctcgtctatgtcgaatatcctcttcgaccacggcaggtccttcttgcgacgtgtctcctggttccggcgtatctgcttgaccagcttgtagtccccagcgggcaccattacgtcctccggcatcgtggcgatcgttccggttctgatttggctactggttacgtgggcgtaagtgggaaatattcgaagcttgtagcttcggttcactatgaaatctaaagcggagtaaactataattctcaaatagttttattattttgttaagtatttattaatacattaataaatccagctgagttagctgatctcactcgtaccactcgtccagcaccaatggagtggttggatgaactggtgccgtcagacgcaccagcatcttgaccgttaccatatggagcggtatgttcttagcccacgccttgcagtggatttggatgtcctcgttgatcggaatgttgctcaaccgaacactgatgatgcgcctgaggcggggatcctccttgtaagtaggtccgtcgtcgtccgaagactcgttgagaaagacattgccggaggtgaagagctcttcggcatcgaagaagcgaaccggatggtagtcgaactgaatgtccactcttggctcaataacctggcaggacacccagatgcggttgaagcgctcctccgagcccaggcccaccacatagtcgaatagctcatccggagcgtactcgggcagcgttagggcgtcatcgtaggttaccgcctggaagcccaatgcctgggtgatctttattagaatgcacggcgtgccggacatatagccccaactgtcgtctatgttacagcccatcaggcgcttcgggccttcgagaccgtatcgtttcaccgttcgcattatcgcgcgttgtatgttagccacatccttaatgttattagggctccacataatttgcttctgatcaccgacatggtgtccgggtgcggttgctagtccggggaactttttgcatcccggcctatccggatatatatgattcgcaatcatcacgagggccaatccggttgtgaatacgcccaaaacgaaaaagaatccgatgaagtagagcagcagtttgataaaacggcacacggtcatctcgggatccgcattgcgtgtgcgaatggaacgcctgtagaggtactccgccacacgcatatcacgacgccggcgaag

SEQ ID NO: 24398 - DNA, 1282 bp, DROSOPHILA
tacaagcttcgaatatttcccacttacgcccacgtaaccagtagccaaatcagaaccggaacgatcgccacgatgccggaggacgtaatggtgcccgctggggactacaagctggtcaagcagatacgccggaaccaggagacacgtcgcaagaaggacctgccgtggtcgaagaggatattcgacatagacgagcacaaattgttcggacgcacagctctgggttggatgcgtatcactggcttctacctggtactatacgccctaatcgtgtgcattgtggccttttggttgggcatctttatgctggccatcattgatccgaataagccgcgctggctcaagggtccgccgggtctgtcgatggtgcccaaccagaatcgatccgtgctggcctactttacgcacatcatgagtgaggtcaatccgattgcggaccgcatcgacgatttcctgaacaaattgaacgacaatgccattgacttcttcgccgatttcaaccaggacactacgtggggctacgccaccgaaaagccgaccgtcttcatcaagctgaacaaggttattggctatgtgccggagacctacgacacgccagatgacttgcccaaggaggcgccagcgagccttcaggacaccgtgggcaagctgggcaacacgcccaagatttggatcacctgcgaggtgaccaatgggcccaagcccgaaatggtcttctatccgggtccatatttcgaggcctccgagaacatgagaggagtgacgcgcgtggtggccatccagatgaacaagatgcccgagaatgcgaagaccttcttcagctgcaaggtgtgggcccgaaacatacccatcgacgatgactaccagggcatgggaattatcaagttcgcgctgagcatgcgcaccgatgatgacggcaatccggatttcgaaaggccctccactcgtaaggcaccccgcgaaatagatctcgaatccgaagagctcgttcccgaaccgccatctccaaatcgaccagaaagtatgctcggaggattagaattgccgccaccgccagaggatgagaaggacgcactagacgcaatgggaaatgatgccaagaaggaggaaatgacggagccaccaagcttataagaattggaatctattactactattattaccatttggaattctagacaaaatttgcttatgtgcaaattacctatctgtgtaggtgttctttaggttatttaatttcgaataagaattgggggtaacccacattttcacatttcaaaaa

SEQ ID NO: 24399 - protein, 353 aa, DROSOPHILA
MPEDVMVPAGDYKLVKQIRRNQETRRKKDLPWSKRIFDIDEHKLFGRTALGWMRITGFYLVLYALIVCIVAFWLGIFMLAIIDPNKPRWLKGPPGLSMVPNQNRSVLAYFTHIMSEVNPIADRIDDFLNKLNDNAIDFFADFNQDTTWGYATEKPTVFIKLNKVIGYVPETYDTPDDLPKEAPASLQDTVGKLGNTPKIWITCEVTNGPKPEMVFYPGPYFEASENMRGVTRVVAIQMNKMPENAKTFFSCKVWARNIPIDDDYQGMGIIKFALSMRTDDDGNPDFERPSTRKAPREIDLESEELVPEPPSPNRPESMLGGLELPPPPEDEKDALDAMGNDAKKEEMTEPPSL

SEQ ID NO: 24400 - DNA, 2768 bp, DROSOPHILA
atatacaagttattggcttcagttggtgcgccccctcttcagccagagtaagtgcctcagttccgccctcctgcgctccctggtggccctatgcctggcctcctgggcagcacaggctgccttctcggcggcgtttttggtattcttgaaatccacacgggccacctccagctggcggagcaatagctccacccgcttcttggccgcttccacaagctgttgcttctcgcccagctcctgctgagcgccactggccacgtgctccgagttgaccacattatcctgcgcattcttcaccgccagcgtaatggtgttcagctgatctgccgcctgtttggccgcttgcccggccgcagcataagtagtttgggtggtctgtaacaaggtgctctcctcctggaccactagctccccctcgcgcacctcggactccagttgctcgacaatctgttgcttgccggccagagcagcttctgccgccttggctgcggccagcgctttgtcggccagttgctgcttcacctggcgggcagctgcctcgccagcctctatctgggcatcggatgcctccatggcttccttggccgccttctgcgcaatgcatgaggcctttaccctggtctttccattcatcttgaagtcgcacggggcaccgccggaggatgacgacacactgttgtcgccatcaccatgatgatccgacattagagcagctatctcattggaggactgcggcaacttgtggcccgcagaatgatctgagaacaggaagaaaagtagaaatgcgattcgtgctatctccatgcttaactcgaaatagttgtattaaacggatttctaaagatatttaagaaatatatactccaggtaacttgtggttactgtacaaatatttcaaataatagtgatttgaaaggtggagctgctatattcccattattatctccacatttcgatttcctgatgagccttgagatttatgtacgatgcaagattcccaatgcgttgcgactccctggttacgatgttgcttctttcgaacatcctgctgtcgaccgccgcgcatcctgcccagcggaatgatccgcgtttcaagcccggctcccttccctgcaagacgagcatgaaagccagccaggtggcctcgaaggcggccaaggatgcgaaggacgccaaggatgcgcagccatgtgccgcggagatggcgggctacagggcacgggaaatgctggcggacagggcgttgcaggcggccaaggctgcggaggcggctctcaacgggaagaagcagctcctcgatgaatacaccaaaagtctggcagaaacgaacagggttatcgaggaaatccaacgagccattgctgccagctcgtgctcggcgacgtcggcaaaggggatccgtgacaagctctgcacatccgtgaacattatgaagagtatgctaaaggaaatgggcggaaatctcgataacatccggaggatggccgacagtgcccagaaagaggccctggaaaagcgcagccttctgaaagcggccaggatgcgggtggaagagctccatagctgcatgtgcgaggctcagaaggatctggagcgaaataagcagagcgctaagaaggccaacgacgccgccaaggaagcacagcaacggatcgaagctttgcaaaaactggtgagcaggattaagatgctgaagcgaaaggatcttcagtcgctcgagaacttcctgcgcaggagaagaagtagcactccggaaaaaacaagttgagtttcttgtttgttatggcaataatcatatttatattttataaaatacaataaataagaacatatattcactttaaattttttccgcccgatatcagtgttgccacttgtcgcaaaataagtgaaaacatatcgatatcaaattaaatcgacgccgattcaataatcgattgttgctaagcaattgataggccacccctagtaagcggaccgcatttttttctgtgaaagtcagaaaaattagccgaaaaagactgtaaatatttattaatatcagccgaaaccgcacgcgaacaaatcgtgaacatggcgcgcaagaatgcccaggcggaggacctctccaacgtggagttcgagacgagcgaggatgtggaggtgatacccacattcaacgccatgaatctaaaggaggagctgctacgcggcatctacgcgtacggtgagtggtgtgtatacctatggccggtctagaactaatccagttttctgcactcccaaggcttcgagaaaccctcggccattcagcaaaggagcattacgcctatcgtcaagggacgggatgtgattgcccaggcacaatcaggcacgggcaaaaccgccaccttctccatctccatcctgcagagcctggacaccacgctgcgggagacgcaggttctgtgcctgtcgcccactcgcgagttggctgtgcaaatccagaaagtcattcttgccctcggcgacatgatgaatgtccagtgccatgtgtgcatcggtggcaccaacctgggcgaggatatccgcaaattggactacggtcaacacattgtgagcggcactccaggacgagtcttcgacatgatcaagcgacgagtgctgcgaacaaggtatgtttcattgtgcccgatcaaacaatattataattataagtacattttatagagccatcaagatgctagtgctggacgaagctgacgagatgcttaataagggtttcaaggaacagatatacgatgtgtatc

SEQ ID NO: 24401 - DNA, 768 bp, DROSOPHILA
atgcgttgcgactccctggttacgatgttgcttctttcgaacatcctgctgtcgaccgccgcgcatcctgcccagcggaatgatccgcgtttcaagcccggctcccttccctgcaagacgagcatgaaagccagccaggtggcctcgaaggcggccaaggatgcgaaggacgccaaggatgcgcagccatgtgccgcggagatggcgggctacagggcacgggaaatgctggcggacagggcgttgcaggcggccaaggctgcggaggcggctctcaacgggaagaagcagctcctcgatgaatacaccaaaagtctggcagaaacgaacagggttatcgaggaaatccaacgagccattgctgccagctcgtgctcggcgacgtcggcaaaggggatccgtgacaagctctgcacatccgtgaacattatgaagagtatgctaaaggaaatgggcggaaatctcgataacatccggaggatggccgacagtgcccagaaagaggccctggaaaagcgcagccttctgaaagcggccaggatgcgggtggaagagctccatagctgcatgtgcgaggctcagaaggatctggagcgaaataagcagagcgctaagaaggccaacgacgccgccaaggaagcacagcaacggatcgaagctttgcaaaaactggtgagcaggattaagatgctgaagcgaaaggatcttcagtcgctcgagaacttcctgcgcaggagaagaagtagcactccggaaaaaacaagttga

SEQ ID NO: 24402 - protein, 255 aa, DROSOPHILA
MRCDSLVTMLLLSNILLSTAAHPAQRNDPRFKPGSLPCKTSMKASQVASKAAKDAKDAKDAQPCAAEMAGYRAREMLADRALQAAKAAEAALNGKKQLLDEYTKSLAETNRVIEEIQRAIAASSCSATSAKGIRDKLCTSVNIMKSMLKEMGGNLDNIRRMADSAQKEALEKRSLLKAARMRVEELHSCMCEAQKDLERNKQSAKKANDAAKEAQQRIEALQKLVSRIKMLKRKDLQSLENFLRRRRSSTPEKTS

SEQ ID NO: 24403 - DNA, 3959 bp, DROSOPHILA
ccagggctaacgattgctaataagaatcgtggactcagaaggagtactttgagaaccactcaacttaataaataagaaaaatatttattcaacacagtatttattaatgcattgccaaaattatttctgtaatgcccatcacacttaagaaatacatattatatcccatcaaattatcaaaaattgctaatcacctgaaaatgactaaaataccagttttcggacctttgcggtgcgaggcaaccctgatgttgtggtttttcttgccgtttgccgctctggtcacactggtttccagttttcttcctagcgtggcggccatagtaagctgttgaaaagtattcgacgtaaattaaatttgttgtaaaagtgaaacttccaggaatcgggctgcgaaagttactatttgctttaggcacgacacgacacgaaaaaaggtgagctggggcggctctgggctaattaagattaccacctgattttgcacatttcgtctcgcattgtgcggtttgccaatgtgtgtgtctacttggtagacacttcctttgcgcttggttttctcatctctgtcgttaagtaatcatcgataattgttttttgtcagagaatttgccttcgatttttggcattagatttgcaaaatcgatggccatctagctttttttctcttctttgttcaatcgaattcttctgacgcagcgtcttgcgcggcacatgttggtacgcatacaagcgcaaagtctggtgcatgtgtgtgctaggcactggtgaaaatataataattgtatctattgatttgcctgctaaatcgaaggctgcttctagaattcatttccattcttattttcgactctgccctttctcctttcatttgttccccttttcgttcttttacggttttttcattattaccctctccgctttgcagtcgccgttcgcaaaaccagggctgcaatgcgctgacgaaaacttctagaaactgtgtgtatgtgtgcgtgcgaaagagaagcggttgttgtcgaaagggggaaagagagcgtcagctgctcgccgtattgaaatacgacaattgttctagaaaatcgactagaaaacgtcgcagttattttcgcgaacacatggcggcgtaacgaccttgaatcccgggctctagcttccggcaatgcctactattttccgttgccccccaaattacacggaaaaaaatgggtgatggcatcaagtcacagctgtagaaatcaataaacaagaaagggtcatatgatcgagtggtttctggattttgaaaaatgtatttctacaaaaaaaaatgggtaacaaaatataggttactgatttttgtttacaatactagttagagaggaatcagccctttgaactatgaaatgtcattagatataaaactgacaataacttccatcgggaacctagctgccatagaaacagcaccacaaaataaatttttttttttcattttttataagaactggcatccaaatcggttgaaacttcaaaaattttcggtattacacaacttcataatttctacctatatatgcctggagcatacacaaatctgttccccaatctgttatttacaagctcccagatagtaattacgcactacttcgtctgttcacagtaaacagcaaacaaaatggttaaggagactggatattatgatatacttggcgtgaagcctaatgccacgcccgacgagctgaagaaggcttaccgcaagctggccctcaagtaccatccggacaagaaccccaacgagggcgagaaattcaaggccatttcgcaggcttacgaagtgctgtccgatgcggacaagcgacaggtgtacgacgaaggcggcgaggcggccatcaagaagggcggcgcagattccggtgacttccgcaatcctatggacttctttgagaagttctttggcgctggattcggaggtagtggcggtggacgcaggcgcgagaggcgtggcaaggacgtggtgcaccagatgtccgtacagctggaggagctgtacaatggagcgacccgcaagctgcagctccagaagaatgtgatctgcgacaagtgcgagggtcgcggcggcaagaagggcagcattgagaagtgcttgcagtgccgtggtaacggtgtggagacacgggttcagcagatcgcccccggcatcatgcagcacatcgagcaggtgtgccgcaagtgttcgggaactggcgagaccattcaggagaaggaccgctgcaagaactgcagtggccgcaaaacggtgcgggaacgcaaggtattggaagtgcacattgagaagggaatgcgggatggccagaagatcgtgttcacgggagagggcgatcatgagccggaatctcagccgggcgatattattattcttttggacgagaaggagcactccacattcgcgcacgccggacaggatttaatgatgaagatgccgttgcaacttgtcgaagcgctctgcggattccagcgaatcgttaaaacgctcgatgatcgcgatctgattgtgtccacacagcccggcgaggttatcaggcatgagatgaccaagtgtattgccgaggagggtatgcccattttcaagaaccccatggagaagggcacgttgatcatccagttcgaggtgatcttcccggaggtgatcaatccgtcggtggtgcccacgcttaaacagtgcctacccccggcgccggaggttgacattccaatcgatgcagagcagacggttttggtgagtatttcagtagtagtttatatcacgatatataaataatatattatttataattaatttatttatcgatttgcttatctttcgcaggaggactttgatcccaagcaacgtcgccagcaacaccagcgcatggcctacgatgaggacgatggcggctatcaggatggcccacgcgtccagcagtgcacatcgagttaagcgcccccgctgcgtgttgcatccccggacacacagccctaataataccccaaccaacaagccgtaataatatgtaaaccagctcccggaacactgtaattgcgcttgcaagtgccgaagaactcccaaaagcaccttaaaacaccatccaattcacactaggaggcccaaccaatcgagagatctaaagttatttcatgcaagctacgatatttaggtataaatcaaagaaacttatcagatatatgcactatgtctataacgcgtggttgtttgtaaaccaacatttttctttatgtttatgttgcgttggattgtcaaagaatcgaaaacggaaactgaaactaaactaaactgaaattgaaattagccgccactagaaccgtatctaaagtccgcgccagcgaacacgtctaggaacaagtttaagttatttaattccagcataaataaaagcgttagtttaaacggatataacaaataaataattaatacacaatttcaacccaaatgctgtatattcttcttcccatagttccagtatcacttgccttcctccggctatctattgattccataatcgctgcatagtcacccgcaggtgtgaatcattcgaataatgccaattggagatatcaggcatatggcagtagtttcgtcttgagtacattatttaaaatgctatctgggataagtaaaagataaaaagaaagataaggatagtttgggatatatatggtaatgccattaaatcgttaaggatataatgagggattttgtagttgttgaggattataaagcatcctataaatgaatctgcggacctgcctgtcgcaaggaataacatcaaaagcaaattcaaaatgtaaaatgttttgtaaatttatttacaaaatttcaaaatgaactacaacataatctggtggaaactagtgcgcaaagtttcggagagcggccacaactccagttccatagatgagcttctcctccacacgctgcc

SEQ ID NO: 24404 - DNA, 1540 bp, DROSOPHILA
aaagagaagcggttgttgtcgaaagggggaaagagagcgtcagctgctcgccgtattgaaatacgacaattgttctagaaaatcgactagaaaacgtcgcagttattttcgcgaacacatggcggcgtaacgaccttgaatcccgggctctagcttccggcaatgcctactattttccgttgccccccaaattacacggaaaaaaatgggtgatggcatcaagtcacagctgtagaaatcaataaacaagaaagggtcatatgatcgagtggtttctggattttgaaaaatgtatttctacaaaaaaaaatggtaaacagcaaacaaaatggttaaggagactggatattatgatatacttggcgtgaagcctaatgccacgcccgacgagctgaagaaggcttaccgcaagctggccctcaagtaccatccggacaagaaccccaacgagggcgagaaattcaaggccatttcgcaggcttacgaagtgctgtccgatgcggacaagcgacaggtgtacgacgaaggcggcgaggcggccatcaagaagggcggcgcagattccggtgacttccgcaatcctatggacttctttgagaagttctttggcgctggattcggaggtagtggcggtggacgcaggcgcgagaggcgtggcaaggacgtggtgcaccagatgtccgtacagctggaggagctgtacaatggagcgacccgcaagctgcagctccagaagaatgtgatctgcgacaagtgcgagggtcgcggcggcaagaagggcagcattgagaagtgcttgcagtgccgtggtaacggtgtggagacacgggttcagcagatcgcccccggcatcatgcagcacatcgagcaggtgtgccgcaagtgttcgggaactggcgagaccattcaggagaaggaccgctgcaagaactgcagtggccgcaaaacggtgcgggaacgcaaggtattggaagtgcacattgagaagggaatgcgggatggccagaagatcgtgttcacgggagagggcgatcatgagccggaatctcagccgggcgatattattattcttttggacgagaaggagcactccacattcgcgcacgccggacaggatttaatgatgaagatgccgttgcaacttgtcgaagcgctctgcggattccagcgaatcgttaaaacgctcgatgatcgcgatctgattgtgtccacacagcccggcgaggttatcaggcatgagatgaccaagtgtattgccgaggagggtatgcccattttcaagaaccccatggagaagggcacgttgatcatccagttcgaggtgatcttcccggaggtgatcaatccgtcggtggtgcccacgcttaaacagtgcctacccccggcgccggaggttgacattccaatcgatgcagagcagacggttttggaggactttgatcccaagcaacgtcgccagcaacaccagcgcatggcctacgatgaggacgatggcggctatcaggatggcccacgcgtccagcagtgcacatcgagttaa

SEQ ID NO: 24405 - protein, 403 aa, DROSOPHILA
MVKETGYYDILGVKPNATPDELKKAYRKLALKYHPDKNPNEGEKFKAISQAYEVLSDADKRQVYDEGGEAAIKKGGADSGDFRNPMDFFEKFFGAGFGGSGGGRRRERRGKDVVHQMSVQLEELYNGATRKLQLQKNVICDKCEGRGGKKGSIEKCLQCRGNGVETRVQQIAPGIMQHIEQVCRKCSGTGETIQEKDRCKNCSGRKTVRERKVLEVHIEKGMRDGQKIVFTGEGDHEPESQPGDIIILLDEKEHSTFAHAGQDLMMKMPLQLVEALCGFQRIVKTLDDRDLIVSTQPGEVIRHEMTKCIAEEGMPIFKNPMEKGTLIIQFEVIFPEVINPSVVPTLKQCLPPAPEVDIPIDAEQTVLEDFDPKQRRQQHQRMAYDEDDGGYQDGPRVQQCTSS

SEQ ID NO: 24406 - DNA, 16687 bp, DROSOPHILA; identical to SEQ ID NO: 15943

SEQ ID NO: 24407 - DNA, 3470 bp, DROSOPHILA
cagtaccagtttgctcttcgtgcacagcacatcgaatatttgtgaagacggtattcaacgacgacgacgacgacaacaacaaattgtcttttttcgcgaacgaatagaaaaaagtggcaaagaatttgtttactagtgtgaaagcgagtgagtgcagtgcccacgggagaaaagtgaaaacaacacaaatacaggagtaaaaatcagccaaccgccaaactaacggtaactgcgtgtccttgctgtggattaaaaaggattctagaggcgtcttaaaaggctcgctggaaatcattgccggagaaattctagagctctttggaaccaactccaagctgtcgctggcgtagccaagtcccccaatccaagatgccggcggaaattaaaccatccgcgcccgctgagccggaaacgccgaccaagagcaaacccaagtccagctcatcctcgcacggaaagcctgccctagcacgagtcaccctgctggatggctcccttctggacgtgtccattgatcgcaaagccattggccgtgatgtgatcaactcaatctgcgccggtctgaacctcatcgaaaaggactactttggtctgacctatgagacgcccacagatccgcgcacttggctggatctggagaagccggtatccaagttcttccgcacggacacttggcctctcaccttcgccgtcaagttctatccgccggagccatcgcagctgaaggaggacatcacgcgctaccatttgtgcctgcaggtgcgcaatgacatcctggagggtcgactgccctgcacattcgtcacccacgctctgctcggatcctacttggtgcagtcggagatgggcgactacgatgcagaggaaatgcccaccagggcctacctgaaggacttcaagatcgctccaaatcagacggctgagttggaggataaggtcatggatcttcacaagacccacaagggacaatcgcccgccgaggctgagctacactacctggagaatgccaagaagctggccatgtacggcgtggacttgcatcccgctaaggattctgagggcgtggacatcatgctgggcgtttgtgcctccggtttgctcgtctaccgcgataaattgcgcatcaaccgctttgcctggcccaagattctgaagatctcctacaagcgccaccatttctacatcaagatccgaccgggtgaattcgagcagtacgaatccaccattggctttaagctggccaaccatcgtgccgccaagaaactgtggaaatcctgcgtggagcaccacaccttcttccgcctgatgacccccgaaccggtcagcaagtccaagatgttcccagtcttcgggtccacctatcgctacaagggtcgcactcaggccgagagcacgaacacacccgtggatcgtactcctccgaagttcaataggactctgtccggagctcgtctcacttccaggagcatggatgctctggccttggccgaaaaggaaaaggtggctaggaagagcagcaccctggatcatcggggagatcgcaatgccgatggcgatgcccacagccgcagtcccatcaagaacaagaaggagaagtcgagcaccggcacggcttcggcctcctcgcaaagttccctcgagggtgactacgagaccaacctagagattgaggccatcgaggctgagccccccgttcaggatgctgataaggaggctaagttgcgtgagaagaaacaaaaggagaaggaggagaaggagcgaaaggagcgggagaagcgggagttggaggagaagaagaaggccgaaaaggctgccaaggcagcacttgccgctggtgccgctgcaggagcggctgttaatggcaatgacgagctgaatgattccaacaagtctgacaagtcctcaggcagacgtgtggaccccaatgacccgcgtttcgctggcgcccgcaccacggtcacccacacgatgacgctgacaggagagattgatcccgtgaccggcaggattaagagcgagtatggcgacattgatccgaacacgggagatattgatcccgccacggctgtcacggatcccgtgaccggaaaactgatcctgaactatgcccagatcgatccctcccacttcggcaaacaggcgcaggtgcaaaccaccacggaaacggtacccatcacccgccagcagttcttcgacggagtcaagcacataagcaagggtgctctgcggcgggattccgagggcagctccgatgacgacatgaccgcacagtatggcgccgaccaggtcaatgagatcttgatcggcagtccggcgggacaggcgggtggcaagctgggcaagccagtgagcacgcccacggtggtgaagaccaccaccaaacaggtgctgaccaagaacatcgatggcgtgacccacaatgtggaagaggaggtgcgcaatctgggcaccggcgaggtcacctactctacgcaggaacacaaggctgatgctacacccaccgacctgagtggcgcctatgtcacggccaccgcagtcaccacccgcaccgccaccacgcacgaggatctgggcaagaacgccaagacggagcagctggaggagaagacggtggccaccacccgcacccacgatcccaacaagcagcagcagcgcgtcgttacccaggaggtgaagacgacggcgacggtcaccagtggggatcagaaatctccgctgtttacgacctccgccaccactggaccccatgtggaaagcacccgagtggttctcggtgaggacacacccggattctccggacatggcgaaatcatctccacccaaaccgtgagcagcaaaacccgcactgtggaaaccattacctacaaaaccgaacgcgatggcattgtggagacccgagtggaacagaagataaccattcagtccgatggagatccgatcgatcatgacaaagccttggccgaggcaatacaagaagcgacggccatgaatccggacatgacagtcgagaagattgaaattcagcagcaaacgcagtagattttataattatttttaaaccattcggatgattttctaagtaaacccgcacacacactcacacacatgaacaccagcccacgcatacgcagcacttgcagtacaccttttatacaacctatatctaaatataatttaaacaaatatatatatatatacacacgagtgtatatttgagctcgagctgatgacccacatgacataacactaagaaacataaaaagataaattcccaattatccgttaccgcaaccgtctacgagaaaatgcatctacatgtttattatttttattacaactgttgtttataattactttttattacgtatattatatattgaatgtgcaaggcaacgttgaaatgaaaactctatatattgtaaaccacgattgcattcaaatacaagaataaaacctaaatgtacacacac

SEQ ID NO: 24408 - protein, 889 aa, DROSOPHILA
MPAEIKPSAPAEPETPTKSKPKSSSSSHGKPALARVTLLDGSLLDVSIDRKAIGRDVINSICAGLNLIEKDYFGLTYETPTDPRTWLDLEKPVSKFFRTDTWPLTFAVKFYPPEPSQLKEDITRYHLCLQVRNDILEGRLPCTFVTHALLGSYLVQSEMGDYDAEEMPTRAYLKDFKIAPNQTAELEDKVMDLHKTHKGQSPAEAELHYLENAKKLAMYGVDLHPAKDSEGVDIMLGVCASGLLVYRDKLRINRFAWPKILKISYKRHHFYIKIRPGEFEQYESTIGFKLANHRAAKKLWKSCVEHHTFFRLMTPEPVSKSKMFPVFGSTYRYKGRTQAESTNTPVDRTPPKFNRTLSGARLTSRSMDALALAEKEKVARKSSTLDHRGDRNADGDAHSRSPIKNKKEKSSTGTASASSQSSLEGDYETNLEIEAIEAEPPVQDADKEAKLREKKQKEKEEKERKEREKRELEEKKKAEKAAKAALAAGAAAGAAVNGNDELNDSNKSDKSSGRRVDPNDPRFAGARTTVTHTMTLTGEIDPVTGRIKSEYGDIDPNTGDIDPATAVTDPVTGKLILNYAQIDPSHFGKQAQVQTTTETVPITRQQFFDGVKHISKGALRRDSEGSSDDDMTAQYGADQVNEILIGSPAGQAGGKLGKPVSTPTVVKTTTKQVLTKNIDGVTHNVEEEVRNLGTGEVTYSTQEHKADATPTDLSGAYVTATAVTTRTATTHEDLGKNAKTEQLEEKTVATTRTHDPNKQQQRVVTQEVKTTATVTSGDQKSPLFTTSATTGPHVESTRVVLGEDTPGFSGHGEIISTQTVSSKTRTVETITYKTERDGIVETRVEQKITIQSDGDPIDHDKALAEAIQEATAMNPDMTVEKIEIQQQTQ

SEQ ID NO: 24409 - DNA, 6872 bp, DROSOPHILA
taacgttcccgcgacagaatactttgcatactttgcggatcagtcataaaaaacgacttgtaatacttgtaatatatggaatttaaaggtcaatccgcaaaagaccatcaatccctgcttcaccttgaagaccttaagtcccgtcaccgcacccatagagctggaaggtgtaatcctagatcaaccttcacaggctaagtacctcgggattacccttgataaacggttgactttcggcccgcacctgaaagctacgactcggagatgttatcaaaggatgcaacaacttcgatggctgttaaacagaaaaagcaccatgacactgagagccaaaagagcagtctacgtccactgcgtagccccgatctggctgtacggaatacagatctggggtatcgcagcaaaatccaactacaaccgcattcaggtattgcaaaatcgtgccatgcgtgcaattacagactgcccatactatgtacgtggcactacccttcaccgtgatctgaatcttcatacagtggaagagcagatctccaggcacaccagcagatatagtgatagactaagacgacaccacagtatacttgctagacgcttactccctgctaggcctctaaagagattaaaaaggaagggtttcgccaaaacacttggacaaccctaaagaccccctcgaaatatgagacaaagttgtaagtcctcacaaagtgagaggtttggttttatcttttatatgttaattgcgctgttatgttactgttattgcattgtattgattcatcgcttctaaataaataaatatataaaaaaaaatacttgtaataaaatgccttgtttattcgcaaaaacactcacagtgagtgtcgtgaaagactaaatggattaacatacataaatatagacacaatggtgcgcatatcgctagcatcacaaaaacgtaacaacgacaaatactagggcacaaaattcatgatgtgatgaagccgccaaactaaatggcttagtccttcaattcggcgccactgttaacaaaaccggcagtttgggtcaactgcagttgggccttctcctccgcctcctgggccttctgctcgggcgtcttggcccattcctgcaaatcgccggagcagtagaaccagtaaatgacgcagccgacgaggtaaatgcccgccgaaatgaagaagataatgcgccattcgtcactagtctggttggtgaccacgtagcccgttagcagcggactcacgatgcccggaatggtggcaaatgtgttgccaatgcccatcagaacactggcgtgctggggcgcaatgtcgaggtgattaacgctataaattaggtacgggactgagtaccacatctcgaagggatctcccccctttggggaaaattaacactcacgcaaatccagaccaggcgaaggcacccaagcccacggcaatggtcagactcaccaccgaccacgtgggatccagcaaataggccgtcagcatcatgaacaccgtctgggccagaaaggctccacagttgaagttccgcctaacctgggtggtcgtccaaatgcccttcacctgcagccaatcagccaaataaccggacacggccagcaggatgcccatggccaggtatggaaccgccgaaagaatgcctgttttgccaaggtcaaagttgagcgtgtctgaaatggcaaagaaatagaaaataagtacacttaaacgtaaagtttaggtcagctatacccattagttttgtacttaagttctccttttaaagcttaaactattaaaatcaataattggaaaattttaataaactagcacaggtactaatattattagtcattagctcatatgaaatattagtaagtataagtaaatgtgaaagcaacaatcaatactaatttcataagtatttcaacaaaacacttacccctgaggaagctgggcagctgggtgagcagggtgtagaagccccagttctccgagaaatgcgaggccatgatggcataaaatggcatcgacgtgaagatggccctccaggggtgcttgacgtgcttagagcccacatacccgatggtcttctggatgtagtcgcattcctccttcgaacagaagcgatccagctcgggtccagctttgacgaagacgagccaagtgatgtaccagatcacgccgatggtgccgaatacgtagaatacgctctcccagccgtatttggtagccagaaatccggagcatggcatcgccaccaccgttcccgcatagttgccggcaaatgctatcgatgccattcgggatcgttccaaaggcggagaccagcgggcccagaccgcatgaataccggggaaggtgacgccctcgaagaagccctcgatgatgcggacgaacaggaacatttccaagctgtgcgaggcagccatcggagtgagcagcgtcagaatggcagtgcttccaattccagtaccaaatacctatagtttagatagattttaaaaacatataaatatattcaacaactttgatttaaatgtaaatatatcagtaattattcataatttaaatgctatcttaaacttacaatgttgccaccaattttggtgccgatgtagccaccgaggaactgtgtcaggatgtagccgtagaagaaggagctcaggatcaagcccttctgcttggagtcccagggaaagtcctgctggtaggacacatttccatcggcatcgaagacggtgcgattctcggtcatggccacaatggccaccgaaagattcactcgcagtgagtagacattgaagaatccgaagaaagccagtagcaccacaatgtagcgctgtttacgccaaaatcgccaggtgagtggttcactctccgtgatttcattgctgcataaaagatatataagcaaattagtatggttaccatggttcttcgattattaaatataaagtggtggccaaacaaatgaggagccggcaggtttactttccctttcggtccgcaatcacttgctgcaagcggtttcgcttaactttgttgctttatgtctagacccgtaaacccgttttcatgttgtggttattcaacccatatcgctccagggcctcccaaactctatttatttattatacaaacagttgtgtttgcaggtttatgcaaataagaaacattatttatgtttagaaattaagggaaatattattcgtttgtatttatttattatctggttgtcatattacccaccttcttcaagtttgaattttctaaagaaatcacgtgtattgcctctattcaaaaattgaatatttcattcttgtacattgtattttaaaacttgtttatcgtatacttatttcatagatcgtctggtatttctgcggctcttaagctatgcggaaccacttagtttttccacctacatgaccttgcagaaactactcacttgttttggtgcacctgctccaggtgcttgccgttcttcggagactccaggtcggtcattgtgccagccgatcaacgtgagcctgaaatacgtttaatttgtttatacaatgcggcaattgtggggcccggcaactcgtgtgcgtgctggcgattcattaaactcgaattgaagctgattggcccaacacaagtgcagtccaacagataatgaactccccatcccacacacaaaagcgtgttataatttcccgatttgttagatctcgaatagcacccaactagacgagtatgcgaatatctatatatttagagccgggcatctgttgcgtgccggttgtcgtaattgtcattgacactgagcgaagagcaaacattttgctaagcaatttgtgggccactaatgcggaaacataatacgccaaagatgccagttctgagatgagaatagaaatctgagctgggcatccgccgcgggaacgcatcttaactcaattatccatttagtcgattaagcaaatggttcgccaattgtggcacgcgaaaacccgcagagaacctcactctcactctggatgccataatctaataattgtggcgtaagtgagccacgtctggccgacttgattcgccttgatttgcaaattgcaggaattttcggcactattcaacacgcgcggcttttgaatgtcatttcaaattaaagcaattgcacacgcacgtgtttaaagccggctctctgcgctcagtgaaagtacttggtaatacactgaagaaaattctctactctttttgatgtcagatatacactgatgaaaattctctacttttctgatgtaaggtataatgtaataaggtaatatggtttatagtattcaacaaaatgatgggaacaaacaattatagcaaaatttgagttactgttatcactgttatttccttagaagcagtatataaattatatcattattactattaaatgaaaatacatttttaagtgtacaagctcttgtagatactgaaaaatcttctcacaggcagcttatcattataagtttatgacaactaccgtgcaatagtctgccataaagcaatggaaagtgctttgaaaaagttttccatgctatcaaatatttccacaagtcacataataaaacagtttgctggttggttttgagaacctaattgatatttaatagggttatttctgatggctacacttcaaactttgtttatgcttctagattagtgctcataaaatgatatatatagccaggtcttggtcttttattgccacatggttatcttaagcgacttttttttattttggacgcagaataacaagaaatcccgctgagattttggttttatagagcgctattttggataccataaattcccgcctcagctgataggtttgcctgggacagaccttttcgacaacctcataagaaacctattgcctctgataagtagcagcttggcaagaaaatatttactttgtttctaaaaaaaaacaaagttaactaaaaagaatcatggaagaacatggcacatttgtgcagtcattaattctaatttgaataacactatgcgaaatttgcgaaatattaataagctgttaaaacaaattgccagtaagttttataaaatctggatttagccgaaaagctgaagcttatatacaattaatgtacttaaaaataataataaaaaaactcatgtatgatcaaaagcaaccaggctcaaatcctcccaaatactttacaaatattctggaaatattatggaaactttatgatattttgagccaatttatgttgctacctaccatagaaaggaaaatttctgaaatgttttatagtcagctttaacactaaaacacaaacttccgtagaaactgacggacagcagacgaacatatctgtgtacttatataaactcggctgatattacttatgaagagtatatatactttttaaggtcacaaacgtctcctttactgcaagcttctgtctgaaatcaatataactaactaaatcaatataacttgttctaactaaaaaaaggtgctggccaatgttttattttattaactcttactcaaaaacacttgttatttcgaagaaactgttttgcaaacagctgcaccgcatgcaaaaatgcgacaaaatgccttaaattaaaacttaatcgaaagctgttgaccgaacagttggttcaataaacaccagcacaaaaacacttggtaagatgtgaagacactgcacaaacgactgcacaaacttttcgcgatttaataacgaaagttaagctcaaaacgcaccaatgaaagttaaaaattagaactggaatccgaactgcttgttctggtctcggtcgatccgttcggtggacagcactgcttgcaggtgggcgggcaggtgtaaagtcgccgatggctggcagcggactgaaacatccagccgttttcgatttatcagctcaactcgccaccggcagcggctcggcatcggcagctcgatccaatcagctgcgttttcgggagcgggagctgggatctgggattttcataccgctcataccgctcctcatatcgtgcatctcccgttgcccaagccaacttcaattgaggcactggcagtgccaggtaataaagagctaagtccggagcgctaaatcgagagaaagaggcaggaaccttgacgtgattagaccgccagcacgctgatactgatcggcataaagcttatcgtttgattacgcggaatatgtgacgcttgtaaagataaattctttcggcgatttgggcgaccagaggagagcagctttcgttttgctgcttaattgaatatgccagatttgccaaacttactagattcggtagctaccacaaagggaataagtggaaaattaactatatataataataaacagaagtctacatggcatctatatatttagattattatcatttaagtttcagtatcaatagcttacacaatagttatggcatgtatgtttattatgtatatttattgatatacaagttaagaaccctcttcttgcgctcttcgtcaggactcaccagcgctcggctctcgtgttttcgggccccgtcagcaggcgactcggggcctgtctagtaacatgttcgtgtaagttacgaaccctcttcttgcgatcttcgtcaggactcaccagcgctcggctctcgtgttttcgggccccgtcagcaggcgactcggggcctgtctaggaacatgtttgagtatgtgtgcattcggaacaagtgccgttggtcgcactcagggtgaggggtcaacgggggaagcggatataaaagcagcggggcgggagaagaggccccagtctcgaacggacacataacggaaccgctagcagatcgcgaactgaatcttaaaataaagctaa

SEQ ID NO: 24410 - DNA, 1641 bp, DROSOPHILA
gcgactttacacctgcccgcccacctgcaagcagtgctgtccaccgaacggatcgaccgagaccagaacaagcagttcggattccagttctaatttttaactttcattggctcacgttgatcggctggcacaatgaccgacctggagtctccgaagaacggcaagcacctggagcaggtgcaccaaaacaacaatgaaatcacggagagtgaaccactcacctggcgattttggcgtaaacagcgctacattgtggtgctactggctttcttcggattcttcaatgtctactcactgcgagtgaatctttcggtggccattgtggccatgaccgagaatcgcaccgtcttcgatgccgatggaaatgtgtcctaccagcaggactttccctgggactccaagcagaagggcttgatcctgagctccttcttctacggctacatcctgacacagttcctcggtggctacatcggcaccaaaattggtggcaacattgtatttggtactggaattggaagcactgccattctgacgctgctcactccgatggctgcctcgcacagcttggaaatgttcctgttcgtccgcatcatcgagggcttcttcgagggcgtcaccttccccggtattcatgcggtctgggcccgctggtctccgcctttggaacgatcccgaatggcatcgatagcatttgccggcaactatgcgggaacggtggtggcgatgccatgctccggatttctggctaccaaatacggctgggagagcgtattctacgtattcggcaccatcggcgtgatctggtacatcacttggctcgtcttcgtcaaagctggacccgagctggatcgcttctgttcgaaggaggaatgcgactacatccagaagaccatcgggtatgtgggctctaagcacgtcaagcacccctggagggccatcttcacgtcgatgccattttatgccatcatggcctcgcatttctcggagaactggggcttctacaccctgctcacccagctgcccagcttcctcagggacacgctcaactttgaccttggcaaaacaggcattctttcggcggttccatacctggccatgggcatcctgctggccgtgtccggttatttggctgattggctgcaggtgaagggcatttggacgaccacccaggttaggcggaacttcaactgtggagcctttctggcccagacggtgttcatgatgctgacggcctatttgctggatcccacgtggtcggtggtgagtctgaccattgccgtgggcttgggtgccttcgcctggtctggatttgccgttaatcacctcgacattgcgccccagcacgccagtgttctgatgggcattggcaacacatttgccaccattccgggcatcgtgagtccgctgctaacgggctacgtggtcaccaaccagactagtgacgaatggcgcattatcttcttcatttcggcgggcatttacctcgtcggctgcgtcatttactggttctactgctccggcgatttgcaggaatgggccaagacgcccgagcagaaggcccaggaggcggaggagaaggcccaactgcagttgacccaaactgccggttttgttaacagtggcgccgaattgaaggactaa

SEQ ID NO: 24411 - protein, 502 aa, DROSOPHILA; identical to SEQ ID NO: 8367

SEQ ID NO: 24412 - DNA, 9213 bp, DROSOPHILA
acgaccaataaagaacaacgcaatgttatttaaggacgagtctacgactgaagggattctcgcatgcgcccgccgcattacgcgttacgtgggcacgcagagtcgggaaaatctagcaacgggtacggtatccgggtctgggcctgggcggtacaacagactacggactacggactacggactacggactacggacaaacggacagcggaccccgtattccggatcacggacgtattatgtgtaaccggtagccatttcaacggctcggccatccgttttcgatgccctttccgcgggcatagcgcatttcaaaagaagtttggcatagacaacagatagtaagatgtatcatagttagatatattatatacatatcaccatatttcaaatacaagtaatacaacctatgaaatgattactattaatctcttggattaagtaatagcgataaggatatcgagggtatcaccacagtcggtcatctgaacaaatattccaattcttaactgtgtttcgctttgttgctgtgcgtggctaggggggtttttttggcagtaagtttaggggttgggtgcttaaattgaaggcgtgacacatttatgggcacattttgtaacacaacgtggcaagctgatgaaaacttctgcggcagcaactgtggaacttcattaacgtcattatcagtgtgtggccggctccattcgccactgtgcaggcgaaagactcgaagggatgtgaaaggcaaatcgaggagaacaagggggtcgacccacaaccacaccctgcacccggcaccctgcacccactgcatcccctggcaaataataatgcccaacttgccctcgcccacttggccacttggctcgtggtcacattcgcgcaatgtgcgattccaaaggtattctatccatacatatgtaaattaattaaatgtattgtgcaggtccctcgccgcggtctccggcgtaggttgcaggtaacagggggttcctctgtcactgggaggcagggcggttgccgcagacctcttctcctagattgggagatatggtgggagaacgtctctccgttgttgactgcccttaaggctagccaaccaattcaatgataacagcagtagctggagttgattgaaggcgcgatgcgctctttattgaatacaaaatcaaactgactataagctaacaaagggaaaaacatcatagcggcctctgccaatgcgcagagcttctgccggctatgcatgagcttccggccaaatgcttggtcagcaatttgaccggtgctggtgtgcggacgatcagtccggttaacttagttaactattccctcctcaagattaaggccgccctcggctgaccctatttgggcgagaacttccttcagttgggctgtagatttcttggccctagtggttcgctgccaggttaaaccgatgcagataagagcgcagaaaattgctcccgcaactagcgctatctgacttagtcggtatccgtcgacgtccttctcgaagttcctgatttgctccaagttcttttcacttaaacggtgaaggtatgggaggctcaggacctcgtgtttcatcgagatattaaggactggggaattagccactcccggcgccctattctggaccatgtcatgattaaagaagacggtctcgttgaccatggcactctcaatgaatgttatgagggtgcgtgcctctaatgtggatggccgttccattgtccacacgcacgagtgctggtctgtcattgatgacgattattccttcgtcgacgtaggtgatcggatgtagatcactctgctgtgcgtcgcaatgtgctacgaccccagcgtggagctcctgcgcacacgagctcactgaagataactggcaaaatgttgcccctggtgttatggagcaattctttactgtgcgtatttctctgttgcactctgctaccacattatctttcaaccttaacaccgtatcgtggtgtaccactggaaggatagtgactttgttgcacgccatgataatcttggggaatttaataataaagtgtaagatgttaagggattgtaggacttttacagacgcaacggacaaaatctcccttatgggggtgttggtgggctcctcgccccaaatactctccagatctgcgtggtccaagaagtttggactcactacgttaattttagcgagggttatagtgagcattaagttttgcaattccattacaatgattctgttgcgagtagaaagcgtttcatacaggtgacctgtatcaatctgagcgcttttggaaatttttaaaagtttatttatggtatcagtgagttcgttaattcgaacttgtgttttggtgtttatttcgatttggctattgtgtgcatcaacaagccgcgcttcagtgaacttgactttctcgaagtcttccgcgtcaggtgtccctgcgacaacctttaacgcagttcccaagaagtctaggctccttgccactctgtgatggatgctcaaagaatcaagcatgtcacggaggtgagcgatatcaacgctcaggagtttcttcatatgggactgggggaacatatcgagcatgctgtcggtttcgtcaattacccgcctatactcggagaggttagccgagtgtctgacataggcgaattcctcccagactaagactttaccgtcaatgacgggaaatgtaattcgctcgggaatagtcagtaatgtgggccgatgtcgtggccaggaaacaaagaagaagggttgggagcgacctgtaacgtgtgtgataaattattacttgttcggaatggagttgcccaccaccaataatagcgaaaatatataaaaaatatgccaagtggctaaaaaaataaaaaacttatgccaagtggctacaaattgaaagaataaaagtgtgcctccgagggagccgcggctaggctctgcttgggtcacttgaggttgtctttatggaccaccctccctttaataaggactgtggtccccaagtctgcctcgatgatcttctcctcacataaaggagtaagtttgttgcctaatcgtctgtttgactttactaggactttgtcgccgacctggaacactctgttctgccgagaagcgttctctcgttttcttgtcaaaatctgggcgtttttgattttttcttggacatcggtatgtggatcgtccggatctgcccgcatgacttcggccggttttttattgatgacggagtggatggacatgttatatctggctgtggccagcaagaccaattccactgtgtcacttatgcctttgtcgatttttaggcatctggcgagctcaattaacgtgctgtggaatcgttccacctgtccgtttgagacgctatgtaggggcggtgcattcgaaatgctgacgccaaaatggttttccagcatagccactattgtctgcgatttcaatgatggttcattgtcgcagtagatggttttggctttggggaaaacattcataagttgtaaaaggggtgctttcaaatcttctatggttctagacagaatcggctgtaccatggcgaatttagaaaacttgtcaacacaggtgagaaagtattttttatccgttgagaaaatatcgatgtgcaatatttctcctacgtgggtcgggactggtgtctcaccgagctcctgcttcttcggatgtctgtcatacttcgcctttgcgcaagttttgcaattggctgctatttcgctcgccaatttggtcattttcgggaagtagtactcggagagtacttgtttcacgttttcttgggccgacctgtgagctctgttgtgctcgacggtcaggatttcttttctctcctgcatcgcgaagatgtcggtgaccctattcttacaatgccagaatttcgtggctggaaactgtcgaactacggtcgtcctggattagcgccacgcggtgtgaagatcacagtggaaggcgtttacaccattagggataatgatgttggcgagttcctccagcaaagcttgtttgcacgagaaattgatcgagtgccgcctcttattcccaaataatataaaagtgcgtttccaatgggagcgcgcctcttccaaaattatctggttctggaagcaattcacgggtttgtccgtggactcgatccgtgtgcgtaagcgaaagttcgctgtgaatcgtggccgcgcacgactccggttcttgctcttcaacaacgttgagttgttgtctcgagagggcatctgcaacgaggttgtttttcccaggcttgtaaaaaattcgtgcgccggactcgtcgatgcgtgctttccatctcttaattttggcgttcggattggactccgataccgcgaacgtcagaggttggtgatcggtaaagatgtttatctctttaaccgcatacaggtagtgccgcaacttagccagtgcccagactacccccaacagctccctttcgttggtagcatagttaacctctctgtcagacaatgtccttgagatcattgtaatgggacgtccctcctgggacagcactgcgccaatgccgtaggccgaagcgtctgtcgttagatcaaacgcttttttgtaatcagggtatctcaggatgacgtcctcagacgccaggatattgcgtagcttttcgaaggcacgttgttgcgcttcggaaaattctacctggatactcctggacctgtgtcggctaacactaccgttctcgcccttcaatatgtctgaaatgggcctagctattgatgcgaagtctttgataaagcaacgataatagctggctaagcccaagaatgaccttacctcaaataccgtttttgggttccggaaattcctttatggccttaaccttttctgggtcagtggccgccccattgttggtgacgatgaaccccaggaagctcacgcttttcttaaaaaaacgtgacttttctgccgatattctcatgttagcatcgtacaggctcttcagaacccaatctacatgcttgacattgggtcgttttcatcttccgaaaagatgatgacgtcattcgacgtaaacgtagcagaactttccgatctgctctcgcagaatatcgtcaattggtctttggaagatgcttgcagcattcctgagtccgaatggcagccttcggaactcatacttccctccgtttactgcgaacgatgtcttttcacgggcgcgttctgcgagcgtgatttggtggtagccagacttcagatcgagggtcgtgaagtatttggccttgccgagattccccaatatcatagagatatttggcatggggtatctgtctggtaccgtcctttcgttaagttttcgaaagtccagcaccaagcgcatttttttattgcccagcatcgtcagtgccctttttgtctacgacccatattgggttattgtagggggactttgacttttggattatgccatttttaagcagttcctgaatttcgccgttgacgaagtcagctgctcccatgggatatgggtataacttggcataaatgggctcctcatcaaccggccggatggtggctaccaccgacgtattgtaaggaagagcctcattaggatcagcaaaagcttttttcctattcccgagcatttttaaaaaagcacccttaattaagggcggtgcgtccgagcaatctactttggtgaaattgacatcggggcaagtatgaaagtcaatttgctctgctccggagccccatttgagcttgccggaagctaggcaaagtgacgcgccggcctgttttaacaggtctaggccaacgatcgcgtcaaaggaggtcaagtctggtaataaaaaaaaggtagctttaagattaaaaatggacacgaaacatttcttagttattgtagtcacaccatgaatcgaatggattgtaaatggggactgcaccgggcggacgcctttcaaccccttaaatggtcggataaaattttttgccgcgcccgtatcaatcagtagtttcatgtcgatccccgctactcttcgtctgatgacgggtagcagggactttcccctaaaaaattaatggtatccgagtcgtactctaggatggaatcgtcgtcgactttaactgctgcactggaggctgcggtgttataaaccttgtccaaatcatcagaggcctgggcaacatggttgaccctttgcctttttggtgggaccgaacggccagacgcggccggcttcgatttcgggtaagccggggcgtgagatggctgcatcctggacaacgacgggtcaacgtccatgggttctggcatgttttctcgggccattcggtcgctacgtggagcggagtgcacctgtgctctatgctgcttagtaaagtgcgggttcttcccagcacttccctgcgagccggcttgtgggggggcccgttggcgctcctgcactttgggatattgcttgtggtccctatcctcttggcttcgtgcaaatgaagttgcaaaagtgtaccgctcatgattggactctacttcttgcgccagggcgagcgctgacggcatgtccttaggctttgccgcgaatagcacgtctgtgaggttgcgcctgagccccgagacaaaaactctcaaagcatcatctcggaacttctcacacagcaccgttgctgccgacgcttcataagacatagtcgccttattggtgagtaaggtgagttttttctcgacctcatcataatactggaggagcgtcaggcttccctgtctgagggtgcctagctcctgctcgataacgtgtatcgggcgtttgtcactatacgtgaaatcgaggcgacttatgatcgcatcgaaattcagtatagtcccaaaggacgacagaactgcatcagcagggcctttaactttgctcctgatgatgaccacagcttgatagtgccgcgaactatcctcatatttcctgaacatatggtaagcggcatttgccgcttgccgccaggagacgtatgtctcctgtgtccccataaagtctggaagacatttaacggcatccaatgtttccccacaagggaccagtccggtgatttctactggtctgtaaactttgattgggggagcttctgcccgggcaggggcaatctgtatggccgcgacctggccggccagatcttgaattgttttacgcaagtcagcctccctgcgttgactctctaaggcttgctcttgtaatgcccttatgagagctttaatttgttccgtttcgagggacattttatatgcagtgaatgcgttagttggggtgtttttacgtacagagttttctgtcgaatcgtcgctttcggactctgagtcggctagcgcactttttagaattcctatattgtcggaatgactcgctcatgggtagctatgtatgtgaatactcaggccgttgtgcccgtggggccaaacagtacggcaagggggtcgcgggggctgagtcgccgctttgaaggcattggacgaagactcaacgagcagagccactgtccaagctaagtaacgataaggtgaagggcctgcggggagcgggtctccaataaggcaaacaaatatacaaagacaaaaattgccacagcaaagacaaagagataaataaaaggcacaaaattgtcacagcaatgcatgcgccagtatcgggtagcgaagtggagtgggtcaaaaacaacaaagcttgaaagggctgtgaagccaatgtagcgaattaaatttcgaatgaaacgacagtgtcccgcggatgtgcgaaggcggaatgaaatgcacacaatatggattgcaaagtcaaccacaaatcaaaattcgatatttaaacttcataacagtaacataatcttaattcgcaacacatataaacgtttattgtagtggaaatgccgattttcttaatttatttatgtaactcgcacaaacatcccaaatattttaaaattctagacgcagtttggagtagtgtttaggttgagaatcccacttacatgattcagggtagtggtgtgggttcctggagttgggtgccaattaattaaatgtattgtgcaggtccctcgccgcggtctccggcgtaggttgcaggtaacagggggttcctctgtcactgggaggcagggcggttgccgcagacctcttctcctagattgggagatatggtgggagaacgtctctccgttgttgactgcccttaaggctagccaaccaattcaatgataacagcagtagctggagttgattgaaggcgcgatgcgctctttattgaatacaaaatcaaactgactataagctaacaaagggaaaaacatcatagcggcctctgccaatgcgcagagcttctgccggctatgcatgagcttccggccaaatgcttggtcagcaatttgaccggtgctggtgtgcggacgatcagtccggttaacttagttaacttgtacatatgtttttgccacatttgatataaatattttttgattttataactttaaattttctcgtaagggtagtttaatctatagaactttaatggctacgattaatgcgaaactttatataaagccgaaacgaaaatgtgtttccacttcagattttaataacattttcgataatgatggcaaacacaaagggggcggcaaattacgttgacgacaaatgctggctgaacccaagacgaaccaaaaagaggggtaggaggagaagaagaagaagaagtagtagctgtgaaaaaaaaaacaaaaaaaacagcaagtgaaatgtcgaagaaaaatcaataaaattcaataggaggcaaacgattttatggtcgcttcgggtggctatattagtgataaagctgactgtagtggcggcaaaaatctgttttaattttttcccactgccattgtatcgccttaccccaccgccccgcgaccacgcctcccaaccgtcgccgcgcccctcccctttatttatttatttatttatttataaggcatgtattatatgtggaagtctgatccctgggcgttgttttttttttgttttttgttttttatttcattcgggtttttttcggaggcggtccacactgttggtccgctgtcgcctgcttatttatgtatgttactccgatgggcggaagaaaagtgggcggtgctcgataatggaaaccgtgggtcagcagtccgaaatcggattaacatctggtcaagaacggatgtgttg

SEQ ID NO: 24413 - DNA, 1917 bp, DROSOPHILA
tggctagccttaagggcagtcaacaacggagagacgttctcccaccatatctcccaatctaggagaagaggtctgcggcaaccgccctgcctcccagtgacagaggaaccccctgttacctgcaacctacgccggagaccgcggcgagggacctgcacaatacatttaattaattggcacccaactccaggaacccacaccactaccctgaatcatgtcgctcccaacccttcttctttgtttcctggccacgacatcggcccacattactgactattcccgagcgaattacatttcccgtcattgacggtaaagtcttagtctgggaggaattcgcctatgtcagacactcggctaacctctccgagtataggcgggtaattgacgaaaccgacagcatgctcgatatgttcccccagtcccatatgaagaaactcctgagcgttgatatcgctcacctccgtgacatgcttgattctttgagcatccatcacagagtggcaaggagcctagacttcttgggaactgcgttaaaggttgtcgcagggacacctgacgcggaagacttcgagaaagtcaagttcactgaagcgcggcttgttgatgcacacaatagccaaatcgaaataaacaccaaaacacaagttcgaattaacgaactcactgataccataaataaacttttaaaaatttccaaaagcgctcagattgatacaggtcacctgtatgaaacgctttctactcgcaacagaatcattgtaatggaattgcaaaacttaatgctcactataaccctcgctaaaattaacgtagtgagtccaaacttcttggaccacgcagatctggagagtatttggggcgaggagcccaccaacacccccataagggagattttgtccgttgcgtctgtaaaagtcctacaatcccttaacatcttacactttattattaaattccccaagattatcatggcgtgcaacaaagtcactatccttccagtggtacaccacgatacggtgttaaggttgaaagataatgtggtagcagagtgcaacagagaaatacgcacagtaaagaattgctccataacaccaggggcaacattttgccagttatcttcagtgagctcgtgtgcgcaggagctccacgctggggtcgtagcacattgcgacgcacagcagagtgatctacatccgatcacctacgtcgacgaaggaataatcgtcatcaatgacagaccagcactcgtgcgtgtggacaatggaacggccatccacattagaggcacgcaccctcataacattcattgagagtgccatggtcaacgagaccgtcttctttaatcatgacatggtccagaatagggcgccgggagtggctaattccccagtccttaatatctcgatgaaacacgaggtcctgagcctcccataccttcaccgtttaagtgaaaagaacttggagcaaatcaggaacttcgagaaggacgtcgacggataccgactaagtcagatagcgctagttgcgggagcaattttctgcgctcttatctgcatcggtttaacctggcagcgaaccactagggccaagaaatctacagcccaactgaaggaagttctcgcccaaataggcaccggtcaaattgctgaccaagcatttggccggaagctcatgcatagccggcagaagctctgcgcattggcagaggccgctatgatgtttttccctttgttagcttatagtcagtttgattttgtattcaataaagagcgcatcgcgccttcaatcaactccagctactgctgttatcattgaattggttggctagccttaagggcagtcaacaacggagagacgttctcccaccatatctcccaatctaggagaagaggtctgcggcaaccgccctgcctccca

SEQ ID NO: 24414 - protein, 303 aa, DROSOPHILA
MLDMFPQSHMKKLLSVDIAHLRDMLDSLSIHHRVARSLDFLGTALKVVAGTPDAEDFEKVKFTEARLVDAHNSQIEINTKTQVRINELTDTINKLLKISKSAQIDTGHLYETLSTRNRIIVMELQNLMLTITLAKINVVSPNFLDHADLESIWGEEPTNTPIREILSVASVKVLQSLNILHFIIKFPKIIMACNKVTILPVVHHDTVLRLKDNVVAECNREIRTVKNCSITPGATFCQLSSVSSCAQELHAGVVAHCDAQQSDLHPITYVDEGIIVINDRPALVRVDNGTAIHIRGTHPHNIH

SEQ ID NO: 24415 - DNA, 36445 bp, DROSOPHILA
aaaataaaaaggggaaaagtacacatcagttgatggctctgccggcggaggacaacatcatccgagatacacggacttatccggggaaagggtttcatttttttctttttttgggcggactgggccggacgtcatcgccctccaatggagcggagtggggtttcattagagcaggcataagaattaaaaatgtggcaagagaaaagctatcgattttctaccagcgagtagggctttcacatccactggggaaaacgagcactcagggcatataaatatttatcttttgggcctaaaaccttaaatatatatatttattaaattgatctttatgattccttataagctaagcttataaagtagtaagctgtttaaattaggcaaatgaaatgttcacataaatacaactttgtaaagtttctgttttgctgatctatttgcctacagcttttgtgcccacttacctttggcaattaaagcctttctttcgggaaattgaattttgcacaagcgaaaatatgaaatggtatatgtatgtgcatagggtaattgcgagcaagtagtcataaatttgcagcatacctcattagcaaccctcgctgtttcgacgacggcgtgtgcattccgccagccttgaagcgcacttagtacaactctaattgaattagccggcaacgggtgcaagtgcaggggaaaaaaaaaggaaaattacaaataaactgcagcaaaaatgtgtgaaacaaatgctgtgtggaaaggcataaatagcgagagagaaaagcgacacttggccaattttttgcagccttagaaaaggggaatccattgattgacggacagttggccaagttctggggcgtggcttgaaatcactaggcaaaaccaattttctgcaaacgaagattgtgtatgtttagtatgtgcgagaaggggccaccattctactggcccttttgccttttggcccggccaacaacagctcagttgcagtcgagcggcggaagcgtttagttcccccagttagttctcctccattagccaaactctccgctggccatgaactgggccatttcgaatttaacgggcggcaatcgcgttagccgtgcgatcctcgttcgctactcctcggttcctttggcagacgccaccaacgatggatcctcgacggcaccccaaacgcccaccgcctccacgccacgcccctcgagctcgcactcctcactgtcgtcgaccttcgccgccaccttccttcatgcctcttcgcgtcacattcccggacgcgctgtgccgcgccaaaatgccaatggccagaatggcgggaagggtaatgcctctggagcaggtggtggcgcgggtggcggcggagcgggtggcgctagtgggggaacaggtggcacgggtgctcaggctgcaggacaactgtcactcccgctggacgttgaggagaccgtcacgtgcttctgtcggtaaggagtggcaaactatggaatttaatagatttatatatttatgaaatcaaatatatgtatatcctgaaatcaaatcagcaagtgcattctaggacataaaatatcataataatttcccttgcatttacagaagttgaatagacttactaataaattctacaatatcaaatatttacttctctgacttataaacatagaaaagaaattattatttattttttatataaacgttttgccacacagctaacgttttctagtcaatagaaaatgtgcaaacactttcaaattaaatattccattaagaagcagacccttttatctttgaattttcgttaatcgaaagttcacagcttgaattatttattggtcattctatttgccgtttgtaaatattcaatgcaaaacttctttatctccatacttttttttattgatcttttccgggaaaattgttagaaataagtttgatgaaatgaaaatatttatagcatgattccgccaaatgtgaaaatctctttgttgcattcgatttgcagtctatttaaaaagtatggcgaattgtttattcagcttaatgggttgatggaaactgccaaaatgtttgacgggctttatagtttttctttcatgttggacagcaccttaattgccttggaaaaatcgcgaaaactgcgtcgtttcttttgccttcgtttagtttagggacaaggcaattttccaaggcaatggtgtgtgtgtgtgtgtgtgtgtgagagttgggtgatgattacactttcaccctctttacctctctctcactctcgctctcgctctctacctctctctttctttctttccgtttgttggaaactctctgcgactcgaagttcgctcattttcctccagtttccctcgccgcatcacatgtgctgacagcgggcaaagttcgccaaacagctgatttctgcgtctgcctatcggtgtttgcgcttttctttttgttattggatttcccggctcgacttcaacgccatccgttttataaattattaaatttgcggcgcatttttccttggtctgcttttcggttcttgtagggtttccatgttgcggagaaacccccgcgaactttagtggcgcgaccaggaggcaggtttcctctgctgggtctctggtgattcacacctccagacgacgtttgctgcacatatacattactgttagcatttcggtattaacctccgccgacgcgatttacacacgccccccctttcgtttaacggcgacacataaatctcacagcgccacgtccgagacgcatattaagtctacagtggggggcacaaatgaaggacacttttctaaaatgaaggacacgcaggatatagaagccaacccaaactatttaattatctaaaaaaaaataagaaaacatgtatgtacatattttacttaaaatgattaattaataaggaaaagaaaagtttaatttacttaaaaattttttaatcactttatcatttttatcaagctgatccatttatcttgtacttccgctgaccaagcacttatttttttttaagaggaaagattttttatggttcttactaccatttaagttcaagcatagtgtacaaaacgagcgccaattgtttcattgctattaatttaactaccgctgtgtgtttatgcgtatgtgttttcgtttatgtggcgctcattcaaattcattgttttgccattttttgtggctgttttttgtttttgcgcatttcctaatttgatggcaacatctgacgtcattggcattgcgcatgacccgcagaagcagcactaacaacaacaacaacaacaacaataataacggcagcaacatcagatacaacaacagcgcagtaactacagtaacgctggcaacaacatcttgatacgctttgttgttccgtcttatttatgtggtggcgtgaccgactaaacggaactcccgcccccctgccccaccgcccagatcgagacccccttcgtggggccactcccccgcaccaaccccctcgaatcgcagccccaagcgaaactagaaacgtataagcgagctgtaaaaacaacaacaacaacatcgcaggcacggcagcaataaaaacaaatcacactaaactaagtacacagataaaaataatatgatgaataacaatttacaatttagagaaatattcgtaaactatttattgaattgcttgtatcaaacataatcaatagaaaaaattactttcttaaccttttttattataaaggaacttctttaaaaacttatatttgccaaaaatgtagaactcaacattaattgggttttattcttgaaaacgtttgatacatttgttttcagtgtaaagtgtagtttgaacaattgtattttctttgcatacatatgcagctgtgttgtttgtttgttatttttctcgagcaccaggaaacaatctccttaactctttcactttgcaattaagtagggaagttggttggggaggggtggagtaacagcaagtaatcataaatcaaatattaagtttgataagcagcaacaaccaagttgtttgccaagttaatatttatatggaaaattgaacgtatggaagactagtgtctcggtaaaactttgatataaaatattctttctgatcaataaagaaatcattagcatggctacgataaaagcatccagcaattatggaaatcagtgtaaagaaagtatatatttgccatactatgctaacaataatcataaccaacattaaattatctacttccagcgtaaatataaatacaatttttgctttaaaagaatatgttcattgttcaatgtacctagtacaaataagaaaagtttacccttagtgcatatgaacttttgcggcacattgtttgaacttttataagccaatggagcaactctttatgttttttttttttgctttttattgggagcaaaagtatataactgaaggtataaatgcaacatggcatttatatacaaattgtattttaaggcacttaaacatgttatcaaactgatcgaaactgtcatctgacttctgaaagaagtcaacatgtaatgccttaaaatgtcctataaaatattgtatttaattgtaccgaatcctggtggtctctgtaaactctgtttactaccattttgcattttcctaccttcttgccgcaacatccgcaatatccgcagatcgcgatcgtgtgccgtttttgctgtccgacggcaacagtcgctgccataagtaatgggcacaaagcaattcgagtaatggcaaatggcagcagttgaaccgctagaaagcagccgagcgttaccaccttttggagcaagtgagatggttgctgtgctgtgtgggtggaaagagagggccatagagttggcggtacggatcagatgttccattacacgcttcgtgtgtgtgtgtgcgcagcatagtgtggatgaaattttgatgtggtgcaaatgaacttgccgccgtttcggttgcattgcgggcggtcacaggtgcgcgttctctgctgccaagattccttttcctctatccgcttctcaccttttcgccccagtcgtatttgttcttgtttttcttcagctcgtcaatggacagctgttttgagatacactcgaaaaaaagtgtattaatgcaattgtctagtaaatttaaaaatataaaataagtttatgtgggttggtactgttgtgtttttgttaatcattctttttagttattcgcttaatgaataccacacatgtcggtccaaatttatctaagtgcattgcgtgttcctgttttcaactttatttacgcagaatgacgatgcgtttatattatgttttcttattcgggtctagattctgtgtaagttaggcagcaaatgcagttcctgtgttcttcggttttcgtctaccgctccattctatttgattactgattttatttcttcctggccgaaaaagagcgtgataattactccctgtggagagatttgatggtcagaggagtagctatttcatgcgggcttggggtcacttcattgataagaaccacgtagctggaggtccttaccatcgagaataacaaattggaatatatctttaattctttattttctgttttcctttcaggtgagtgaaatatcttgagcatgagcttacccaaatcccaggtaatttgtttaagtcaattagagcagtcattttaactgagaaaaaaattataacatgcttagagtattaaacgtattaaataaatgtttagcgctttaacaaaactctatgatgttttagttgaacagattgttatcaagccaattagtgttcttggtaaaagtacataagtgatgtgatgtttgcgtcaattgtacgaaattgtgttagccattaaatttgccgaatttatttcgtttacctgtgatcattaaaaccatgtgttaatgaatcaacaatggcaatatatttatgagaaatccatttaaatgtttcatacgaacggtacaattatcccttttcgtggaaaattaatttctaattgttatttatagagtttatcctaggtttgttcaatgcgttaaaaaagtagtagattctgctactattctactgccactttgccgtgttctcttgttaccgagctgtgtggcaacgccagcgcagtcagctgctgagcatcaaaacatgagcgctcagctgatgcgagagagcgtagaagagagagggctaaagccaaagcagtcaaacaagtggtcgaaaaccgtatagatgtgcgtgtctcgcttgagtggcgcatttgtatgcaaaacacgtacacgggcagctctctcccgctcagctggtatttgatacctctagctctcttcctcgcgctcgagcggagagcaaatgttgctggtgtgcgagacagcagcaacatcagcagcaacaataacaacaacagcaaccacttcatctttactgtgtgctctgctttcgttgccagttttgtgtttttgcttttgctgccttttttctctccttacttgcgtgagtgttgatgttgccgctgtgtgttgctgttgttgccgctgtgtatgtgtatgtgttgctgttgccagccgaacgagcagcagtcagtcaaagacggacggcttggctcagtgtagaaatttcctttggcacgcttggtcgctcgagcggttgcaggtcgtcgtcaatagtggactgttgatgtcgccgcgtcattatttgacattgtttttcgaggcgccgccgtcggttgcaaccacacatcatcgcgtcgcagttaaaagcaaaacagcaactccagcagcaagcagcgcaacatttgcaacatcaattgccaccgtgaaatgctatgctagattgtgaaataaaatcgcctaccaatacaaactaatatcccgaaaaggggaacaaatgtaagccgaaaaggagtctgttctccaacaaaaaaaaaaagaaagaaagaaaagaagttcttctctgtgtgtgtgctagtgttttcccgtgctggtgtgaaactgtgtcattcgctgcgaaaaactgcattcaagtttttcctcagagccgcgactgctggcgtgttattgttgctgttgcagctagctgccacggtttgttgcttcactgattacgcgcaatgcagcaacagcagcagcagcagaagcaacagcaactaactgcagaggagcaatagcagctgagagttcagttgcgaaaccggcgaagcgcgactgttgccaatgcagcgcttagaattggcacaccagcaacaactgcaacgctgcagcaaagctgctactccagcgtcagcaacaacaacggtacattgggcattcacaatgttgcttggtgtgccactgccactgccactccaccactacttgttcctccactgccatattgttttaaccacttcctttgccgcagcggcaggaacttccttcctcacgagcttcctgtctgttcgtccgcttgtctggttgtctgccctgcaaccctcaaccctcccttattaacgccccctcacactcaactgcattgtcaggtgttttctctgccacacagaaagaaatgggggtattgttagggttcatttgacagttttcacaagaattatttaaagataggtttttatggaatatatccttattcaaactgcctttaaataccttctaaaaataaaaagagtgaaaatcttaaaataatgatatatcttattgggcctagagtatttcctcttttttccgtgcacatcctggttgcgttgtttctactttttgtcaaccccgttgacgcgcctacgtgttcaatacgctgagaaaacaacagttacgagtggctcaaccagcagcttgttatttctcacacctttcgtccagaccccccgcgccttcctaccactgcccctcgccaaccctttgggtcctcaaatgcgctaggccatccatcgattttttgaggtcatgctaaaaattgcaaagccaactggaactagttgcggattcccatagttgaattgccatggacaatttgcggaaggcagaggaaatgaaattgattcaagcctttgtggtgcgatattatctaaccgaattcgattcgttttctgtgtaggcccttctgtgttgcggatgttaaggatttatgtaagctcaggaactaattaggaagaagcactatgatatttatccaaactaacaattttagttcgatatataatggtatagaaaagtatctatgtactatttgcgattgaacgttttgcccccgttatgaaacacttttctcacggtatttccccattaagcaattccagcaaaatcgtatagatactaatttagtaactcagcaatcgcatttaatcgaattcatacatatgcatttcggttctattgggactgttttcattcgacgtgtatctcaatcgatcgtttaacccatatgaaaaggatagtcacagttataaacgctgtcggatgaatctctggtaactgggttagttagcgacccgaaaacttctctgcgcctttccgccgaaccgttatgccatatgtatgtatgtatgatgctctgcctgcccgccggtcagctcttccagaccaaaccaaaccaaaatgaagcgaacagaacagaacaacccaaaccagctcgaagatatatatggatgggttttgtacggcttggcatggggtttggtggtgggggtacggagatacacctatctactatgtatatcatgtcatccattgcatgtgcatcgcacatctcacgtcaccgtaccgctgcacagcttctatctccctttccatatctgctgtcgtcttcctgctcgtcgtttgccagttgtggaactcgttttcatttctttcgttagcagacatagacataattctccagcttttctagcgagcaaagggggtgggggttcattttcggtttcggtttctattttttttttctctctttcgactttgccaatcgctcatttgacctttaacgggttgtgctgcatatacatgaaaagcacactcaaatcggcaacaattaagctcattcaaaacgcgagcaatgggcaatctaagaaaaaaaaaacactcgccgtcgcgttgctagaatcacatcataaatttcggttttgatggggcgccagttgttctgtgtgcggaggtgtgaaaacgatactagaaggggggcgcacaaaagacaaaactcgtttggggggaaaagacaacagagtcagcaaattggcttcaatgcgagttgaaggttaagtgcgacagcgacgcggaaattgaacattttggatattggaatcagtagctggtttcgagctgaataaacaaaacaataggcattaaccccttttctgtcatctttcgatttttcgtactttttttttagcacgcacttcagaccattttattggcttcctagtattgtctgcaagcaattaaaagtttttgctttaagctgcacaaagagtttcatgagaaatttgggatattagtttcgtaaagttaaaatttaaaagcacaaaaaatataaaaaatactaacagaacgaattagttttacattgaagaaagaggatcttcatatcaatagaaaatcaaagatcgaaatgtacagggtacctctttttgcttatataatataccattttcaatgatttcgtatctactcagatatattatgacaatactaagatggctaagatgaattgctgctgcagtgcgtttgcaaaattcgcattcaaacgaatctttaactatgacagggcaaatttctgcccgtttggcttatgtatttctgtgttttggggactgttcgataatttttttttttttgcttttataaataaccttaaacgatttttctgcgccgccaggccacacgaaaagcgaaaagtgtcaatgtcagctgttggttgtgttagccacgaaaacgccaaaccgaagcgaaccaaatcgaaagcgagcaagcgatgtgaaatcggaaaaatcgaagacccgtgctaaatttattattcagctgtcggcattgccatcataggcattttcccaacccgtgtttggttttcctcctcttttcctttttttttttttttttttttgcctttgccccgcttttctagtccttttttttgtgctggctgccactaaaagcttcccaaaataaacgcgaatacatgtgttcatattttatacataacgagtatatatgtacatacattcgcacagtgcagcggctagtgaaaatttgcaaaatgtttccgtcacacaaaaggcactttatgcctccttcgctcacctttccccactgcaaaacacgcgccgctaattgcacgcgtgtgcagccatttctgcgagattatttcgagatacatttatacacttgccaccaggcctcccaaataattgctagccgtcagttttttggtctggctaaaactgtgcaggcaaaaaaactaaaaaacgaaaccaaacatatcgagacaaaagaaaatgtaatttttgggggctaaatcgccaccgagcagctgaaatatccgtgttgcaatcgtgtttttttccatcacgcccccgcccattttttgtttttgtttttgaggatttgtaacagcctcgaaaactcgagatgatgttgtatgtgaagaagactctgctcccacaacattgtcaaaaagccatcgccatcctccccgctaaccaacatatatccattgaccaaaccagaggcaccgtggtctttgtggctataaaaatcaatgaaaaatgaatatgtttattgttcaacttgacttattgcctgccccagcgctgttgttcgtgcatcttgttaacacgcctgactacaacttctgcattttgagcagtggcaatcaaatgttttacagaggaagctaccgttgcattttcatagcctaggtgatcagcaatattatggacattttacctatagacaaagacgtaggcgtattatggatgatttaaggaaacatttgaatacactgtatctgcatacattattttttaaacaaaatattagctgaatgttcttaaagtaacattttttgttagtgtttcaacttaagacagaccttaggctagaaacattataaagattagttatctactctgatttaagtatttatttcattattatacttaaatcaaattgagagcttaactgctgatcaggttttaatttggcatgatttcatctgcaacttttagtttctttgaggcatagaaacaattttcgaagccagttaagacccattagtaattatacccgctgtttgtaaaagtcggtaggttcccagtgcgatccaccatcgtacacttatccatataaagagcatcgagttgcgatgcagcccccttttctgtctttcaattgaccgcccaccgcccgcaatgatgaccgccgctgagatcggcgggctatataattatgcggttgggcccctttgatcaaaaccccccgccattgttggtgccccttttgcgggggtataaggcggcatcttcaaccgtagatgaagatggtgaggaagtgcggtaactggatactggtgaaaattgcgctggttttggttttttccccgatttttcctctttcgctgcctggcggcaaacaattttcggctagttttgcaatcgactcccacagccggccgtttcccgcatttccctggaaatgccgctggatttaactataattttatctcgctgcttgcctgtgtttttctttttcgttcatcaaattgagttagcaaaattactataattttgtgggaaattttatgggtcaaatttcagctgtgttgacaatgcgccgccatctaaaaaaaaaaaaactaacaagaaaattaaaaaacataaaagtgggtaaagcagacgcgccgctgaccgcagcacaattttttttctccatattttcattttgttttttactaatttgcttaattagcgcgacttacgctcataaatataagagtgtgtgtatttatggaaggccccactgcgggtttattttttacacgatttaattgggtctatgtatttatttttattgtttttctcctcggtaatttcaacgggccgcttcttggcgttttattttgttttattcggttttggcctttcttatttctctcacgttttgggcccagtacaagtttatggcgcagcctgagagcgccgtcgtgaatggattgaattggagtttagagcttcagtttggagtacagtgaagcagcagtaacggcggcaacagctacagcaacagcagcagcagcagcagcagttggtatggcaatccggatcgagggaccccattaatgttggaaacgtgatgtttgtgcggctttttgtgtaactcgccgtgagaacttggcggcgttgcaatcgttcaggtttcgcttcgttttagatgacagctgcgaattgaatcgttcaatcggagagatccgatccagcaattgcagcacgtagatcatcgatccacggatacatggttttccgttttcagtttttcttttctctttcgcctgcaatcgcaatcgcaggcccatttgcatactcatgtactcatttgctcactcactcagatactcacatattcagatactcacatattcagatacttacatcgggattggatcggattggatcggcgtcaatcagtcaattgtgtgtggccttcggagtgtgaaaattgctgcaatcgctgaacgcacgaagtacgcatgatccacatggatggagatccatcatctctggggtcaccgagcccttgaaaccgggggcttggccaatctacctatgtgataggggggtcaatggtggaggtactcaaaaccgatttccattgtccaatggagcgcttgagctagagttttatctaaagcacgggctatttgatctactttttaatgtgtataatcaactgccactgaattgtaggaaatctattggtttcgaacaccatcttcagctaatttagaatattcgatgatccacatcaaatcagattatttccaacccacttcatgatatgccataattcagttgcagcgaatttataatattagattgtgtgtcgaaatatcagattcgttacagcagtactgattaaaagtggcattaaattttggaacagaaataagtttaaatcaccaattattgaatctgcttagaaaataaaccattactaatggatttctattccaagcgctggaaatctttaaaatagagcgataaaaatacttatgtatttcataaataataaaatgctaatgtagattttgcaacattttatgactgcagcattaatgtggaaaagctaaatgtggactttacaagcgatgtggaaataggcagtagaatgtagtacgcaatgctctgtgcccatttcaagcggattcccctgttccactaaatgatcgaagtggtagcgccaaatcaatttccatttctagttaatgtgagtgtggccacattatgtagtgagtatgtgtgtgtgtgtgtgtgaccccaaagctggttagtagccgactctctagatagataaataggtagatggatatatcattcgaccgagagtggaaaccgcaaagctaattgcttatgcacagcgcataaccttgccactccatgacacttcttgcttcgctgagtactgagtaccaagtaccaagtttcaagtaccgagtatcgcatactcagcaatcccagcaagtgagtattcgactgaaggcccccttagttgaaaccctttcgagcgagggccaaaaccaaagaatcggcgaggggcatgtggggagaagtggagaaagctttcatcatcataatcatcagcagatttgtgcagcagaggttgtggcaagattgaaaaggaatggcggagaatggaatggttggcagtggcagcttggccaggcttaattgaaaattcacagtaatgccagctagaaaacgacagctgctgtgcggataagcacgatgaaaacagggaaaagcgaggaaaaggcatcactcagagcagagaaaacacattaaaataatataattatattattttttttttcttcgccttttgtttttcctttcttggttagacttttataccaacttatatctccgcatctccgcttcacacttttatttcgctcctaagcgatttatttcttatttctttggcttgagtttgggctttgagatttccgcatgctttgtcaaccgtgaacgggcacgaactttcattttaaaattctcgaagcgtgttgcgcacactcaagtgaactatccgccccattttccaccaaaaaaaaaaataaaaaccaagcagtgtcaattgccggttagaggagtttcgaaaaatcccaagtgtcatcatcatcgtgatcacctccacatcgcgcgaagaagatttgttttacgcttttgcactcggctttctatggaaactttcatggctgccggcttggcttaattctagcaatttatatggccaaggcacgttgccttcaaaatggcaatacaaatggcatcatgacgaggctgaaaagtttccagaattgcatgcatgtaattcgctaataaagagtgtaatagaaagttccccccctcccctttacatggccattgtggactagaagtgtcttacagtcgccgatccataaggcgtactttcgattttcttagcccgatgctgtccggcaccacccatcatcatccatccaggcaatttaatctcggctactcgccagttgtgaaagttcccaagaccctcggcgaggtggggaggtgtcaaaaccgaggccattctatttttcacacctatttcttttacttttccaagctagctcaatggcagatagttttctatatacctaccatatctgtatggatggatgtatatatgtacatttaccatccgtatttaagtcgtcatctcgcttgtctcgtgccaactgaatcactgaattcgctcatcgggcacgttgcctcatgtcagataagctctttcttgtttgtcatgtgccgggaaattctgtggcatattcataaatctgaaatccatgtgtcatactcgttcgtagatgtgtacacttgcgatactgtaatcgccaacttgagcagggcttactatgcttagctgacgaccagcagggcttaatctgttaaatgtggggaaaaagtactgcaattttgggacaaattattatatatatttgcttgtttttgacaaatttatattgctttggatttgtaaacaaaatatttaaaaggaatcgtaatacgaatgtatgataatcataataaaaatatttaagcggaataaaaagtaagcaacttatctcaaagttcaatgctaaaagtataaatctttcgcacttcaatttacatccatcaaactaaattcgtccttgctgcttgatttttgaatggccatccttttgggataatgtactgccatcatcgtatcgtatcgatttgcatttagcaaatagtttcaaatgttccgccattcaatcaagttgcaatctatttggcctttctggctagatgatggcccttctcttttgaacacggctagggtggacccaatccattaaatgtgggtatttgggtgaaggttatcgcttgcccgactcctgttttttcttttttactgcctctctgccagtcagtttacttttttttcgccttcgtctttgaggcatcaggttttccagtttcttaaagacccagcccatttcttggcccgggcttcttctttaatgatgtgttttaattttactttgtcgtttcgcttcatttttttttttttttttgccagcgattgcgtaagctacgaatgacgccgcctcttactttctttttcttttggcctgtgccagagttaaaaacttaaagtatgacttaaaaaaaaacgcataaataagagacaatttgaattgaatgcataaaaaggaactcagaaacgtaaggggcaacgcgggttttgtttgttttatttctccatttatttgtacaattaaatctttaaacttgctgttccctcgagtgtttggaagcatttgcattaattaaagtgcaggaaagagaaaaagtcaaacaaataagctgctaaagttcaagtcaacacaaaaaggaagaaacttataatttatttctttagtaaatctaattaacatataagcggattttagcttagcaactcacacaaatacacacaaacacgcgcgccaactcaaatcactcaccattgcgaatttgtttgcatttgtttttgtttttttgtgtgaactacgcaacgagtcgaaaaactcacgcgatcgcgttttctaacgccaaatatatatgcacacaaatatatatattgaaatatatgtatatgggggatttatgcccgggtagcgcgcacatttatatgtattaaaactaaataataaatacaaaagctaatggcacatggggtatggcattgccatccatcgcactgtggaagattaccgaaaccagaatttattacaaaattacaaaattggtttggcctactcgaatccagtgggattaggtggattaagactttcgtcaaatcgatttcgtatatttagaatgacatctcgcaggcttatttacgtgcaacaattattttggccacagatataaataaatatgatcgaaacaggttcaatgtagctggtgtccactgtgcagttcttgtggaaaaatttaaagccgacgaatgacacatgcatatgtacatactagccaagcacgagaagttaacaatcttttctttttgccatttcgccaaagcaacgcaaaagggaatggccaaagaagttgaaagttcgggccgaaacctaatgccatatttgttttattttcatttagaagaaagtttgtctgaaacaagagtgaaagatggaaaaaaacgaactgaataagattaaaatgtgtgcaaaatcagttaacagtcgcagcagcagcagcagcaacaacaaataagtgaattatagtgacaaatgaataaaagccaaaagtgacagtgaataatgttgagagcgcccactcagcacatcgtgcaaatcggcttcggaacgaagacgaccacaacaacaacaacaacagcagcagcagcagcagcaacatcgacagcagcagcagcaacaccaggcggcaagcagcagcagcagcgcaaaacgctgttgcaacgcttccggcagcagcaacacaagttgccaaaagtcgcagcagcagagcagacgacacatgacacagaatattacttcaagcagcagcagcagcagcaaacttcttcctatcagcaaggcgacaattgtttattgtatcttgccacaacgttgaactcaaactctgagcagttgctgaagaagtcgaagaagaaaaaggagtcgagcagctacaatttcgcagcagcactgaggcgcaacaagaagccaaaacagcagcagcagcaactggcaacttcgaccgacgacgacgacagttgccgcagcatcaacagcatcaacagcaactgcagcaacagcagcaccagtggcagcagccacagtttgtctaatagttgcattaacaatcataacaacactcattatagaaacagtaaaaacaccagacactccagtagcaacaacaacgactacagtggtaattacaattgcaaaacaagtgaacaacaagcgtggaaagccagtgcagcacaacaactgctcattagcgatcggaattatcccagcagcaacaccaacaacaccaacaacaacaccaacaacatcaccaacagcagcaacaacaaccacagtggtggccatatcatcatgtcacccacctcacaggcgcccacccgaacctccctcttcgattcctgtcatcgaaagatccgcctgatcggcggcggtccagttgccttcttgggcggattggttgcgtaagttatttccccttcattccaactgacatttgagttgaatttataatataaatcgtctaacaatagaacaaacccatatgatttgtgattcggctgggattatcatagcgctgtggagggtaacccccccttcacaatccggtcttatagcagtcgtgccaatctttcgcccatttaggtagccaaggtttccagttaataatgcgtcagttgcgtcaatcagattgtttgccgtgttattaattaccccatttgggataatttcgtatagcatgtttcttactgcttattagcatatctcaaaaactggaaacaaaaatacagatttaaaggctattcttgtcatccgcatgtcacttaaaaatatcatgcaggctttaatagtaacaattaaatttacgactctataaattataatcaataataagactggttacttcataggtatttcatcactttatagcatgaactacgttaggtttcccaggcgatctgtatattacttaatagttagttattccatccctagaatgatttatggtctagtttgtgaatgcccactagtatttcaattttttataattaccactaatgtattaccattacgctagttagcatttactccatggcaatcaactttctaaggtcagctcacgcagaattgcacaaacttataatttgtccgcattagggaaatacttatgataccccgtgtcagaggtcgaacaaaggaagccgaaaaaaaaaaataaactaaacaataaagaacgcagaaaccagagcaaagctacagataaatgtggtatttactcatttttatggctttaattgcgagcacttctcaagctgcttttgtagagttttattttatttcgtctttatttttgtttttttttttttttgctttggtgaccactaaaagcactctgcggtgcaaattcaaggttcaagcggcaattaaaagttcacaagagtggaagcagttaaaccgaaacaaaggcagtcaactaaatttatgcatatgctaggcctaaaggcatctaaaatgcgccacgaaggtcaccaaaattaggtggtgacccaaaccagcagagctctgcaaaaggaaattgtaacacaacagctgatgctgtctcatttccttatttaccaccatgcccaaatttaaccgattctcggcagcaatgggctttgtctgcttagtgatctggctttatttgaaaagcaaaagcaaagttaaacgaactctcaaattaccgaggtgagacaaccgcaaagcgttgacactctgccaccgagctcacagagtgcgctgaactgataattagttaggaaaccaaatattgacacacatgagtatgcataagtgtcatggcaatagaataggaatactatattaaacggggaagatggacatgagtcgcgcgggtggagttagattccgagtaacaagttattcacttgtttgaggctcgtctttgtgcatgcaactcacatactaccagaacaataactaacagtatgggcatacaaactgagtaagaaaaggcggtagaatcgcatacataacagcagtcatttgttatgtaagttcgtaggtggagagacgttgccggattagggggcgcattatgaaaatgataatgataaacctgtcaggccgacagacccacagagagtgtcaatggcacactaagctacctaagctaccaggccccataacaaccccatctctcagctcacaatttacataataataatgctcaaaagttttgattgtctcatttgctttggttttcatcaagaagtcccaaaatttgaataaaaaaaacgtatgtaaacaaataaaaatttaacaaatataaaactgacaaaaacttcagtcttcgtaaatgagttatattgttttcggttggacgaagaccttttttatggccaactgtacttcggaggtaattgaatacaaaggaatccaatttacactttcaaaacttcctgtttcgcacaatttgcgatatgctaattaaaaaaaaggagtatgtacataggtataactttaaatttagtaataaacaggtgaatcactcactcagatatttggccacactaaagtacaatgtgcatcatacattttcttggtcacactaaagtttgcctcatttgaccactcattcccaaagctgtctagcaagcttaaatattagtttgctttcttgtaagagtttcaccacctcattaacgacggagatggacaccgcctccaactctggggtattattttccccttgggcaacaaatgcctttcttgacgtccagtaaggtacatacacacacatgttacttgcacttttttcccattttcttaccccatgtctgggcattattaatcttggtggctaccacttttcccctgcccttttagccagctgctcaactttggctcgttgggtttttcgctccacatgtttggccccaagtttgggggggggggctttatcatatggctggagagctccgttggctgttaccgtttctgctccagctggtcgctaacgttttaatttcctgtcccagtttaatatgttttgtatgccagagttttatagcttgcccatttagcttttgcttatttgcgatttacgagcaatcaattttggcagagcgacagagattaagcgcaagatttgcagatataattctagatggagcattagacttgagctttcccatttccattcccatccattagtgctgactgctaatcatctggaccttaacccgcagctgacacacacagcaccttgggcgctggtattcaaacgagaacaggtgctccggcgatcgcaagcttctgtcgccgccgttcattgacactccacgcactggaccacttaatgactgacaaaatgactaaccgacagactggctaaccgacagactggctaactgacagactgactaaccaactaactgacatagggaacagctgtcggggagacaaagacaaagcgcctacggatcaagctcgaattagtgcaaccagcaggcgtatcaaggtatccaactcgagttcattacaattttcccgactggcggccagcaagtcagcgatggagaacgggcaattagctctcagggaccccaagaattagaaccggcaaaggtttcttggtattaggtgctatatggcgttgggaacctttaaattaaacccatggctcacatttaagcacaagtgtatagcaaataaatcgcttggctggatttaattatattttctttgccatattcataaagactgctttcgttaataccagccattagtaatattacgccatcttcttactggtcaagaactccaactgggttcatctcctctaatccggcccaaaacctctgaaaaccaacggaaaaaaaagtagagaacaattaatccattgagcacagaaacaattgccattaaacaaactgggttcttctaatttcgacccccagccgcagttggccgacaacaattgtgcaacggtagccggtggataacgttagttgcccagatgctggccataattatttggccattagccggcgtatggcaaatgttgaagatttggaacacgactttggagtcaaatgtgggggggagcaatgccaaagcagcaaaggtcaacggaaatttccatttcccagaactgatgctaaaaaaaaaagatgacaaagggcgatttgaaaacctcatgaacttggtttcaacataattgcaggtgttgtgcccacagagaatagaacagaaacaatgggtgttacactaagttctagggaaagctacatctaaagttttttttttactacaacaaatagtttaaaagagagcaacttaatcaaacgtattaaaattccattaatatgctagtaatatcttgaggatataggttttcctatagctacaaaaagcagttgagcctcgttaaattcgacctaaaaacgtagagacaaaccccgacccctttaaagttcattaaaataagagcatcatttgtcattgtttttttataatcttcgtttatttttgcctgaagtaattgctaccacatacaggtagctcataaagccaagtctttatggcttttctacggtgtattttgtattgtatggtgttttcaatttcacccgcatgcaaaattgcagaaacggaaaaagtgagtaacgaagcccataaaggtttaccttgacttcaagccaagttccggctgtggctcatttacgtggccagcgctttagctctctcgctctcgctcttttggccactttttaatccatttagccacatgtgattgcccgtcatcagccgccatccatctacctgtccagctgaagcgtcgctcttttaaatactttccattattattattattgttattttgtgtctctcgcttttgtcttcatcagcgaaacattaatgccagttgtcgtcacctccgatggtttgccagggggctccagtggtgaggtggggtcttggccaaatgactcacccagttcacacacacagctgaacgtcggacagctgctgtcgtcagctgtgtgcaagagagtcactcgtctaagccgtcttctctcggccaatagaggctacttaccagttaccagtcagtcaacagtttgcccccaccctaccccactccagttaccagcaaaaaaaaactggtcactctcccagcaggcgattctagttatacccatttattaaaatgtaatggggcatactggacttgtgccattaaaacaaatacataaattgtgggaactcgttctcaatctttaagtataaataagcagcttgtctcagaacagccaaaaatattgccaagatcattatggatacatatattaataagaaagtagtaggaaagaggtctagatctagataacttgattaagctaataagtatatctaggatcttcctacatacaatatatatgccttatatgaaatccaccatatgtacgaagtacttttcgtttgcaactctttaccaaactgtgcgaatgtttttcgtatgctgaatgggtgccgcattgccaaacgggcaaaacggtacttttcgatttattggtggggcttttgtcttgtgccacaaagaaagagatatggtgatgggggcagaggaaacatgattgggattcaggctcatttcggcaaaagctgattcatatcggcgcttttggccgttttcccaaactcaatccactgtcgtcgtattcccgcctcagtcattcgtccatgggtggatggataccgacatccgccattgacaaaaaaaaaataacgttaattaaaatgtatatatttcctaagctctttttgccatgtccgtgttgatgcacagagagaaaatagcaagtagttataagaagtgcaattagaacaaaagtaatcataacttatcttgaaatcatcttaaaatcggatataaaagctagttttttttatacaacattgttaatatagttaagaaccgttttatttgctcagtgcacttatctttgttaataggtacgacggtaaagttttgtctttgtgcttgattaatgcgtaattttgtattgttaattgtggcacacatttagtgggtcgctggggggtaatgattgtggagaagggagggggggtggtggctttggagccgctcccacagcttgtctaccgcgtaaatggagcgtggctctgatagattaatgcgttcgccgtgagctgttctgtgccacagctgctccattgtccgccatcagcacatccatccacatgcaaaatcaataaaaccccaagctccacaattcgcagcacacaaatgcagctaatttgcaatccgttgctattgtgcagaaaacaatataattaaattggaatttacttccctgtgttagagactacagactaaagccatgtggctttaaatagacgcacaatgtattttagtttcaaatgcttttgaatttcttgcacttttgtaatgtaattaatcattttacttgtagaaacaaagaacttttagcacaaaagtactaaaattacttaagcattccttttgtaaaagttataaactttttaaatgtgcatcgccttattctgatatgtttaaaaataaaaaaggctttaattcggttgaatcatcccatatttaccaacacttgaaaatatttgtgtaacattcatgttgttcagtcataattgaataaatttcgagtcatttggccgtttctgattctttttattaatttatggctgcaattttgtgacaccttcatcaagagaagggggagatggggaagatggaatgatcatcagtttgagcaagactaattgaaagccacaacgagcaggctgaaaacaacacggaacaaaatgaatattaattgttttaaataattttgaacttggcaaaggcaaacgaaagcgctgatggggcaaacaggcaatttgacgagcgtttctccctcccgctctcgcatctatgtatctcaacttgatttttatttcgctggcaagcagctgttttattgctcagtacagcccttcaaataaattattttcaaaatatacgaattgagctttttcagatccataacgaattataaaattgtattcctaataaacataaaaatagtgatatatttattaagtttatattatttattttcttacaattttaagttatagatataaagcaataatgcgccctgatgtaggctatgaatatttaactaataagcgtttaatcttggtgatgctgggttgcgttagccaggtaccactataccacatgcttcgcctgtttctgtcgctttttctgcactcatcatcgacatcgcgatgggacattcgtctgcgtcattcggtgctgaaaaaaaaaatagaaagagaaaggggctgcgaaaagaaccgagagacgcgtgtttgtttgcataacaaaatttatggtgagcttcgttatatttttgcgcaatatgcaatgtgcaatatgcgataggaaagctcaaatgcaaactgccgttaccaattttcattcaaagtgcagcgttagaacgagatgtgactacatattagatggcgtgagcgggagagcgttcgaacagctgatttccgtggggttctctgctctccctctcgctctcgttctcgcttctattggcaatggcaatggctcgggccctctctctcccgcgcacacaatcaaagcgcgctgcgccgcgccaaaggtgcgcgtcgcgacagacggacagtcttctgattccgctgccgaacggcgggcgcacgcacgcagttaaaaaaataaataaataaaaagaggaaaacaaccaaaaataaaacaatttaaaatcgccaagtaatacacagaaaaacaatcagagatcactcgttgccttcggttaacggtacgcggcgtcataatcaacaaatgaagcaaactaacgaaaacaactgaaatccccacaactgggtgaacttcaagtcaaagcaaaacaaaataagaaaacacagcgacaaattcttgatcatagtgatcagttttaaaaatgaaccaaaatgaacttattcattttcaatggctcaaatgaacgcttgaaggctaactcatgcagttcattctaagcaattaagttttttaaagaaattgtactgattgtaaaaatccaaagtaaatgtgatataatatagtgtgaaagtaatgatttaaactggtccagcttgatcagatttgttttctgtgcctaaaaacgaaccacaaccggcatctgcgtcagctttaacgcaaatgtgaacgtcaacgccagctacagcgttcgcgtcacccgattgtttcaatggacttgaaaaacgcgttcgacactcgattaaccggcccccgcccgcgattaaccttcaaattagtttgtcatttgtccaagtccgccatcgaatgacgccaaattgtctctttttttgaagtttcttttttctctcttttttgccacttcacttttgtgacaattgcatagtggcacatatatgtatgtacatatgtatatgtcttaaaaagtatatctttaaagctaattggttaatgtgttgcttctgtaaacaatctaaaagctttcatcaaatcaaataatcttatcttgagttgtgttccaaaaagctcttgattcactgattgatagttataattggcaccaaagtaaaatattattgatatgttataatatttgataaatttataaaaaggaatgtactgattggcttggaatttttttcgtgtttgtggtctttggctcatatgactcatctgctgatcttaaatgtcttagtcataatccgtgaaactgtaagttaatacacgaacggaaatgagctcatgctatgctactatgtgataacacacaatgtatccccaaaatgaaaaactgataagcttcacttatgtgcaatcatacatcgattcgattccgatcgttatcgatggttcagttccaacaggttggcttgtcattcacggatttcttaatcggctttactacaatttattccgtgcactttttcccgtttttcaatttggtggtgcctcatgcattcggttgactcacgaattgacatcgatcaaaggagggcaggcacatcgccagtctttgtacttgactatgtgtgtctatatgtacatatgtatgtatgtacatatgtctgcccagcccgcaattgtggttaattaagcgcccgatttgccatgataatttatacgcacttggggaaacctttcgatattctattaattgaccaacttttgcttttacacttcgctgtttgcaaaggtgggcttgtgcctggggctcagtggataatgatcatccgtgccaatccaaataaacagtccagttgcggtgattgcgttgcgggaatgatgtgaatccaactggataaatgcaaccgctcgatcatatgacgtaattcgcgcccggttgagtggcctctagtgccgccttcgctattatgcattctgtatgaatatctggcgggtgaacggttccaaccggtttccagatgcagatacacttacagatgctattgcatctttgagagatggaaatggcaaattggcgctgagattgtcaatctcggatgcagtgaaatctgcctatggcaaatctagctcttgattcagagaataaatcaaaagtatgtgtggctttatccggattagactctttggatcttcgagtatctatctatacaaaagctagatccttcctaagacttagcttagatcagacttggggatcaacaaacaaaaacaatatgctgacttggttaacttatctcaaactccagtgtaatttaacccagctccatttgtgtcttggggtctaaagagttgctggcccacatttggcttgtgcggtggtgtctggcctttatgtatgccatttacttcaatagccacccagagctatcgtgtatcaatgagacgtttatgtgatgccattattctgtcacgtttccatgctcatttcggctgttgattttttctttcggtttctgtatcttgaactgggccctttttgccgcgagtgttgaacacaaagagccagagtcagaccacaataatatacatagatacatatattttgtgggagacagacaccaagacggagctagttagaaaggctgtggttatggccagaccattacatcatccccatcatcatgtcatgattggggtgacagacaacaaagttggtggccaattcgggcagtgaaagcttcttgaggcagcacagagaaacttctagaatttgtaaatatattactttaataagaagcctgtatgttaaaataaaaggtcaaaccactttccttatggggcgacttataattctcaactggttctagcttaatttattctcgcaaatattcatattgacacaagtatagctcttaatattttacacataaaaacattgtagtgtttacgttctatgcaaatcaaaggaaatgtatctttctttgaagaacatattcaaagtggtatagcaaagtgtctagtggggtagttgttcttcctcgtttttcgctgtatcttatcagtcgtttgttgttctgttcttgttgtttttttgtttggctgtgtgcattctggctattaacttatcgtacgactcggctatatctccgccacactgtggttgttgttatggcaatttcaacacctttggacacttacaacgacgttactttcgacatcgtcaacaacaataacccgctctcacacccacatgcaatcgtatatacagatatgtataggcagttatatggctaaatacttacacacagttgatagcagttatggaaaaccactgtgcggtgggtgaaagaggcgggggaaaactagggtcttcgtcttccattgtctattgtcgtggatgtgcctttgtttctggggcgtagtttagtcattgtctgatattaagcaatatttccaactacatctcccgatgagctatagctccattttcaattccatttcgttcgctgttcttctgcaataatcagcccagttagtacaacgagccatttgctcgatttcatcatcattataatcagcataaagagctatgtatttcgttatagaaatgttagaataaacagaatttgttatgcctaccatatgtgtgtcatacggatagaaattttgcaaaaatcctgtcatgctgaaatactttaatgtttacatttaatttactagtttatcaaagggaaatactcatgcatatatgtatttgcttttgaaataatcatttcatcttatttatttaaaatttaaaactgctcctactaaaaatgattgtaaatcaaactcacgcttttgctaagctaactaaaaatgtatgcttagctaagtaaatgcagagataaccaactaaaactcgactgcttttttgtgtacaattttcgagtgactagcgatttttaactatgatatgcattatgcatatgtatgtgtataaaaagcagcacctcacttcacctacctatttacaattagtatctggggtgcgatggggcaacagcaaaaggcttttaattgatagatcaatatcacgatgattggttttgtgcgtagcatatggcgagcgaggcctatcgcaatatttttcggggtaaatggcacacgagagcgatgtcgggaaagcccgtgagcttatctaaaatgatggagttggtgggggctaaatggacatgtgtgttcagggccactctaatgggggaggggttgggaggtggttctcatatggcccaattcctagtcccttcgctttgccacctccctggggtgttgggtgtgttttggggccatatgcttcgaatcgaaacaataagaaatataacattaggtcaggttctcgaccatgtattgaattcccttggctctggtcgccttctcttctcctttggctaattgttttttttggccagttctgaatgtttcaaactatattcgctttatctacgacacaaggtcaaagccacagctaaacccacccacattttgggcactctttcgtgccaatacgaaaatgatgagttggaatttcaattttatttatcaccaattttttatgcacccattttggccataccatccatccatttcgattttttgtggcttttagttttaggttttcgctcgactcgtagcgatggcacacgaaatgcgatataaaatccaaacgtgcgaatatatttgcggcctattctgcgatatagaagcgaggtgtttatgtgataaaagaaaaatagaagatattatacgggaaaccccataaaacacacatttaatacgacttgtatgtgacgtttccgaggaacttcttgtgaaattgcaagaaaccgaaagaagtcgacttatcgcgccacacaacacgtcacttcgattggccccagtgtgtaaattgagtgtgtgggttaatggtttgtttgccagtagttcccattcgatcggaggtgcaataaagttgtcgcacgaatcggtaatcgactaagagcttttccaagtgagaacgtgttttacagttcaccatcttgaaaaaaatgtgtcaaggcgactgacggacgaaggtacctaaactcaggttgagaactggaaagggaaagtttacaaatcgaataaagtaggattaaactggattttataatacacggatgtacaaatgtacaaatcttcacgtttaagttagttcttttatatatatatatatagagtcctagaaattcccactttctttatcaaaatacttctacttcttcttcatttcaacaacttctaaaaatgttataaaatgtaatcaacaaatgtaacaaatttaaagaactattttccaatattatccaaagaaagtccatttagtttgcaaatgagttggcgtgagtcaaggatttgatttgcactcgaaaccagtgctctgtgtccttgattacagggtacgacgcgccttgagttccgcccaatcttagtgtgccatctagtgtgccagactgcatccggccatttaaattggaaccggagcgcacaatccattcacgtcgacctttcgtcgcctctgacctgacacgcaaattttgtgcgacaagagcgaaggtggtgttggtggcggcgtcacacagatcgatgtgcgatgtggaggtccttggcattatttggcacttgatggaataactattagttagagtgccaccgctaatgctaatgctaatgccccaatcccaccgtatgccactccaactgccacttaaatgcgggcgggtggatttgcattatctgaatgaaaaaaaaaaaaaaaataactgaacgggaaagtcgcttgtctggtggttacctgtgcgccacgcctcgccgcctcccagcaaataatggggaacaaaagcgcacatttgtctgatattcaaatgtacacacgatgactatatacttcaatgaatgtgtacatacatattatatatgtacgtacgtacctacatatgtgtttggatttcgagttttatcagcacgcttcgccgatatcgtgcgggcacaacgggcggcgttgggtgggtggcataattataatcagaactaagtttatttgtttaaatgcctaaagagacgcatttgccaccgtctctccggtcgactgataaatgtttattaaactcggttatgcccatgagcacggccacgcacttttttcgagctctttgcataaatataaacaatatggaggcaaatatgaaaagacttgttgattcttagttttgataagcgttatgctttttattcttttcttttgaggggtttttgaaactagccaaaggcacgtgatctcaaaagatacgataaatacgataaatttgttttgtacaccagctagttcttatggttggttgaaagcgtaccttgttttatcattcagaaaaatcaaataaattattaagaatgcattctgagcgtagttgttgcacttgttgttgggacaaaagttgatttcatttgccttcaactatttcaaggcttttgaatatcaaccaattcgtaagtcttgtttagataccaccgaactctcagttttcaaggtgcgcaggtctttccttcttaagatatagtaatgttgtaagggttcctaactctttatctatcaatgaaaaagtttggtagctcataggattgggacttggttctctgggagagtcttcttggtctctctctctccgatttccatcaaaataccacgagttcttttttccgaagcgtactgagcgttatgcttttcaagcgataacatttgaagctagtcacttgggcgatacggagctttccgtttggtttgtttcgaatcggttggattcgtttttcgggctaaataaatggtctaatttccctaacggatcgcagaaggcaagatgaccaaagcaacgtaaataataccaaaaaatgaaagaaactctaagctcaaaggtgccaacaagaataggagtaacgtttgtgtctgaatcggatccaaagaaaaagttcaaaagttcgccatcaacgtcgagctcaacaatatcaacggcgacaataacaagcacaacaacaacaacaacaacaaccgcatcgcccccaccgccccaaacttcgtatgtgattaaatgtctattgaagaccgctcgttttatgtggcaagtgacgacaataccctctaaaatcggtgataccattggtaccctgtaccgttatgctcaggattcagttgatagttttctatgcgtagctgggtgagactcctaaacagatctatttaaccattcacactttgtattttcgattatttgctaaacaactcatcatttaattgtaattcatctttcttctcttgcatatttacagcaaggcccgtcgcaaggaacgcgatggcgatcaaaattcaacagacaccaaattgtatttggaggaaagtgtcctagaacgtaaattacctgaagctgatctcaaagccctagtggatcttccagctggtttggactacaatgaatggctagcgtcacacagtaagtttctaaaacttgaatatatacatacattaccacccacaattggctaattgaacttcacgtgattctctgtgtttttcggattcctttcgaaattgcctttattattatttactcacatctgtcatttgcctccattgttggcagcagctttatcgtgtgatttacaaatgagtttaacgagcgtcgtcagctgctgtttggcaaaagtttgatagcctaatcgccagtggctacgctcgagtaccccgatttacgaaacgctgcccacggtgcactatatgtatgtacattatcgtccagccaatgaacttgaacagaagaattcagactgagcgatagcattatctgtatgcagtttaagaagtgcaagggcaccctgcaaagtttgagatcaggcagttttctttgtatccaaaagtttgcgatactagaaatccaattaaaaggatattttcctttgtattcatagtgaaattattaagtgtatacatactcttttgccttgagtttcttgtttcgtgctgaataaagccactcactgctttaattacatatcaataaaacgtctaatatcatcttcgaaagccaatatacggtgagtcacatcttaattggctggttgccccaccgcctggagggatcttttttggttacatcatgggtggagaacagaatcgattttgagaaattacatcatcttgtaaataatctgtgtgcgctgggtggcagaatgcaaattacacagttctttcttaactcaaatgaggcaaataattggcaatgtatcagcaaattgtagccaccaaaagcagccggagggcatcagaagcaatccctcagacctccatttgcttctcccatgtccaccaacgttttcattatcatcctcctctcgttttggaaaaacaatcaaagccaaactgtttgtcgtgggcgatgatcagggtcatttcacgtcgcccgatggcgtcagctgcaagttcatatgcaaatttaatatttgaaattgctgactcgagaggcacaggccctcgactcctgctctggttatctgggactgggacttgtttgggctataaggaaagctaaaagttaagccatcggtttattttgctccaattctgctggcatttcaaaataatgcagctcttcttccgctgacgtaatgggaacacttgtgcaaatattgggtcggcattgaccttacccgggtggttccgctcaataaatatcgtcgtatgtccactgctgtgccttatcactgcaaaccagacactgaaagaaaccaataaaacccgcagccgtctcatttcgatgataagattgcttctgttttgaaggtaatttgtgcaccagctattattaaccgaagagttggccattatttagcaggttgttgaaccattatttttaagacgaaccaactttcgctattgtcttagaagcacataaagaagtgcctacttcaattctaatcaatattcgcttcttttttttagccctcgctctatttgagcacgtgaatttggtctatggaactattagtgaattttgtacacaatccggttgcgctgacatgaccggacccggcaacaggtgagtcctaatcagattattttcttcaatttaatttacttactaagtgtttcgtttttgcggcagaacgtacttatggttcgacgagaagggcaagaagacgcgcgtcgcagcaccacagtacatcgactatgtgatgacgttcacccagaagacggtcagcgatgagtcgatattcccaaccaaatacgccaacgagttccccggctcgttcgagtcgattgcgcggaagatactacgcttgcaatttcatgtgatagcgcatctgtatgcggcgcatttcagagaaatcgcgctgctcggcttgcacacccatctaaatctgactttcgcgcacctcaccgcactgcaccggcgcttcaatttgatcgacgagaaggagacggacgtgctgcgcgaccttgaggtggccctgcgcctcaccgacgataccggtggatgccaggatgctacctccacgacgtcgtcggtccatgaccactcccactccggcgatctccagcatcagtcgctgcaacagcagcagcaacaccacaacagcagcagcaacagcacctcctcggcggaggcgtttcacgtcaattcacaaagcaacaatggcagcacatccgcctcggcatcggtatccctaatcgatggcgatgcggtggcgccgcccatttgcacgcaaccagaggcgggtgcgggctgcaagccagcgggcagcagcggattgctgggcggtatactgggcgacctgaccagcggcgaatttggtgatacaacgcgctactgcacatcggcagttcctcaggcggcggcagcagcgggtgcgggtgtgggtggtacagcgatcggtgccacggatgctgccgcattgaacaacggcgctggcgcactacatttaaactttagcaacaataataacaataatcataatctgaatcaccatcaccaccatcatcaccaccacggccaccatggccatcatcatgcggcacagcagcagcagcagcacagtggactcatacagtgcaatgcggcgggcggcggagggaatgcaacaggggtagccacgggcggagcaactgcagcagcgtcctcgaccaccacggcatagtggggcaaaagctaagaagagagcagcagcagcagcagcagcaacagcaacaacaaaaaacattagaaatactagatttacgcaaaaatgttatttaatgttacttctatgatcctaaagttgaaaatattgtaaaaataataaaaaaaaagagaaaacattaaaatgcataaacagctaattgcaaacaacaagcaggcattacataaatgacacacagctactaagttattgaaaagctaatcgaagttggcatcgtagttccgtaaagttgatttagatatgtacttattgtatagaacgacagagatgagctgcaagcatagagtttagagttgtcgcgtgcttatgctttacacgtattttaacctttctcttctgcaacaaataaaatgtcctgactgaagccagagtgcaaatgcaaagtcaacgccttcaaggcaatcataataaagagttttgaactgctacaaaagttgagaaaagatcacttgaaaaaaaaattatacagcaacagaatgctttcatttcaacatggttttctttaaatgatttttcaagccaaacttcttacattacttacctcacgaaatatgttgaataaacctaacttatactattgtaattacttctaaacgtagcattttccagcgattagatgtacctaactaccataccctttcagcaaggactttaattttcgtatttagttccaattaggcgttttagtaggcattcagttagttgatcgctgtttaaggaaatgtaactacaatattttgtaatatattttgttgtaattcgaatctaagcagagtcacattttaaaatagagcgtcgagtactggttcaattgttcaggaatatagacacacatattctactaggcggtgaaacgcgttttaaaatagctaactcacccgtattttacatgcagtgtacttggcacagccagcctgaaagtatgcaccgaaaagttaactacacaaactgcagaatggcgcctaccggtatgcaccaaatatgtcacaacttacgtaccacacacttcacacaccaacacaaccacaaatcgcaccgaataatctccgaaaagtatacagcggaaatcacaatccacacgttgttaatgtatggcaattttaaaccaagtttgcaatgattggaaacatttaataataaatacgt

SEQ ID NO: 24416 - DNA, 1945 bp, DROSOPHILA
gaagcgtttagttcccccagttagttctcctccattagccaaactctccgctggccatgaactgggccatttcgaatttaacgggcggcaatcgcgttagccgtgcgatcctcgttcgctactcctcggttcctttggcagacgccaccaacgatggatcctcgacggcaccccaaacgcccaccgcctccacgccacgcccctcgagctcgcactcctcactgtcgtcgaccttcgccgccaccttccttcatgcctcttcgcgtcacattcccggacgcgctgtgccgcgccaaaatgccaatggccagaatggcgggaagggtaatgcctctggagcaggtggtggcgcgggtggcggcggagcgggtggcgctagtgggggaacaggtggcacgggtgctcaggctgcaggacaactgtcactcccgctggacgttgaggagaccgtcacgtgcttctgtcgcaaggcccgtcgcaaggaacgcgatggcgatcaaaattcaacagacaccaaattgtatttggaggaaagtgtcctagaacgtaaattacctgaagctgatctcaaagccctagtggatcttccagctggtttggactacaatgaatggctagcgtcacacaccctcgctctatttgagcacgtgaatttggtctatggaactattagtgaattttgtacacaatccggttgcgctgacatgaccggacccggcaacagaacgtacttatggttcgacgagaagggcaagaagacgcgcgtcgcagcaccacagtacatcgactatgtgatgacgttcacccagaagacggtcagcgatgagtcgatattcccaaccaaatacgccaacgagttccccggctcgttcgagtcgattgcgcggaagatactacgcttgcaatttcatgtgatagcgcatctgtatgcggcgcatttcagagaaatcgcgctgctcggcttgcacacccatctaaatctgactttcgcgcacctcaccgcactgcaccggcgcttcaatttgatcgacgagaaggagacggacgtgctgcgcgaccttgaggtggccctgcgcctcaccgacgataccggtggatgccaggatgctacctccacgacgtcgtcggtccatgaccactcccactccggcgatctccagcatcagtcgctgcaacagcagcagcaacaccacaacagcagcagcaacagcacctcctcggcggaggcgtttcacgtcaattcacaaagcaacaatggcagcacatccgcctcggcatcggtatccctaatcgatggcgatgcggtggcgccgcccatttgcacgcaaccagaggcgggtgcgggctgcaagccagcgggcagcagcggattgctgggcggtatactgggcgacctgaccagcggcgaatttggtgatacaacgcgctactgcacatcggcagttcctcaggcggcggcagcagcgggtgcgggtgtgggtggtacagcgatcggtgccacggatgctgccgcattgaacaacggcgctggcgcactacatttaaactttagcaacaataataacaataatcataatctgaatcaccatcaccaccatcatcaccaccacggccaccatggccatcatcatgcggcacagcagcagcagcagcacagtggactcatacagtgcaatgcggcgggcggcggagggaatgcaacaggggtagccacgggcggagcaactgcagcagcgtcctcgaccaccacggcatagtggggcaaaagctaagaagagagcagcagcagcagcagcagcaacagcaacaacaaaaaacattagaaatactagatttacgcaaaaatgttatttaatgttacttctatgatcctaaagttgaaaatattgtaaaaataataaaaaaaaagagaaaacattaaaatgcataaacagctaattgcaaa

SEQ ID NO: 24417 - protein, 566 aa, DROSOPHILA
MNWAISNLTGGNRVSRAILVRYSSVPLADATNDGSSTAPQTPTASTPRPSSSHSSLSSTFAATFLHASSRHIPGRAVPRQNANGQNGGKGNASGAGGGAGGGGAGGASGGTGGTGAQAAGQLSLPLDVEETVTCFCRKARRKERDGDQNSTDTKLYLEESVLERKLPEADLKALVDLPAGLDYNEWLASHTLALFEHVNLVYGTISEFCTQSGCADMTGPGNRTYLWFDEKGKKTRVAAPQYIDYVMTFTQKTVSDESIFPTKYANEFPGSFESIARKILRLQFHVIAHLYAAHFREIALLGLHTHLNLTFAHLTALHRRFNLIDEKETDVLRDLEVALRLTDDTGGCQDATSTTSSVHDHSHSGDLQHQSLQQQQQHHNSSSNSTSSAEAFHVNSQSNNGSTSASASVSLIDGDAVAPPICTQPEAGAGCKPAGSSGLLGGILGDLTSGEFGDTTRYCTSAVPQAAAAAGAGVGGTAIGATDAAALNNGAGALHLNFSNNNNNNHNLNHHHHHHHHHGHHGHHHAAQQQQQHSGLIQCNAAGGGGNATGVATGGATAAASSTTTA

SEQ ID NO: 24418 - DNA, 3289 bp, DROSOPHILA
aaaatagagcgtcgagtactggttcaattgttcaggaatatagacacacatattctactaggcggtgaaacgcgttttaaaatagctaactcacccgtattttacatgcagtgtacttggcacagccagcctgaaagtatgcaccgaaaagttaactacacaaactgcagaatggcgcctaccggtatgcaccaaatatgtcacaacttacgtaccacacacttcacacaccaacacaaccacaaatcgcaccgaataatctccgaaaagtatacagcggaaatcacaatccacacgttgttaatgtatggcaattttaaaccaagtttgcaatgattggaaacatttaataataaatacgtagggagataaccagatttatgcttcggatttctaaacaattaaacagaagggacttgtatgttgtgctgtaattgtgttgtgtttatatacccatagcaagaaccaatggcaatgaaggaaagaaacttactttagaaacagaagcgttcgacttagaatattagaagccaatttttgtgcattacaatggttcacctgtcccgatgtagataattgcaacttgatccactccagtttcactgaactgctgtccaggcctaagctacaaaaactatactcttaacgacacacactttcaatctgttgaactttgaatgcgatgcaatgaactcgaaacaaaacaaaacaaaacaaacacacatgggaaatgatacatgtatttatatgtaggtatgtgagttattaatagaatacaggtggaaatggaattaaatgcaaagacaaaccttttaagtcagcaaaaaaaaaaacaaataaaagcaaacatggcaaaagcatgagagaagataataaaataaactgttatgttcaattgagatgtgatgttttattattattggtcaagtggcagtattactcgtagtatcaattttcctagagtcttaaatcaaacaacagatattcagttagcactcctatttcgacacttctacagaaagactttcctatcagctaaattttctgttcgaaatcgtcgggaaaaactggatcgccttgcgtaagatgagtatctggtaagaggttaagctcaggaagatatataatactgtattattaaatcgtaggcccattcgaacactaccaaattccaaaatgcgtagttgcatgatggagctcggtcgcaccaatcgccacacggattgcacatttataattgaggatgagagcggtggcagtcaatcgtttccctgccacaaattgctattcagctgcgcctccgatgtgttcgatcgcatgctctatggcgactacattgagtctactagcggagttgtcagactaaatgatgtacaaccggatatatttgagaaattccgagactatgtctacggctatgagtgcgataaactgcagaagtacgactttgatactctgattcgcctctgtgagtttgctaacaaatatctggtgcaatctctcgaagaggactgtgtaaaggatttgctgatacgcaagaacacttttgacatgggagagttacttcgtctattccagtgtgcgcatcgcatgaatcgcaagtcgttaataaatcagatagcctgggagctaaagtgcaccttcaagagcaccttggaccactctggcgtatacgaattcaattgcgaggtatttaaacactatatcgaagtgattgctagcaaaatatcggaggcagatcgtttccgtctgctggaaatgtatctaaaatataatggtatcgaggaattggaaagcgcggggcaagtggatagccaggatgcaactgaagccaacaccaccaccatcaccaccaccaacgaagtggaaaatcaagaatcggaacttccgtccactagctgcgttccgctcaaaactgaatgcagttttgccgttccaaataagaaggcaagttttgtcagcgatctacttgcactgattgattttggcaaactttcgcccaaggaattctacgatggacccggcaaatccaatttccttagcctggctgagaagtacgagcatatgtatcaaatcgccaagaactgcgttacggccaaagatgaactgcagctgaagatggcattgaccacggaacagaagccccccctaccttccgaatcccgacgcatagttcatatgggaggaagcttaatgcgcgacgaaccaacggcttcttcggttacctcgcattacctttcccgacccatccgtcgatatcgcgcctggtcagcacacagtgacgtctaatctcgagatatatatatatatacatttgtaccaactccgagatatactcagtaagattttgaagcttcgctttagctgtggactgttaggacctacaattaactgaattaaaactgtaaattcatttacaaagcacgcaatttttctaaaaatgccatatgtgtggaatacacgatgcaacgagaaattcaagtgctattagcaaaagcagaaattatctgtacatagctttaaaatgaatacccatatctaagcatatcttttgtgaatacaagtctctaattcacaaattatttacctacaaaacgtgttaacatattagtaatgctgataaacaaatcgacagagagcagaaatttagcttcttatcaccaaacttattgttctgttcaaataaataatacaaatgatctcgatttgtttttctgtgtacctccgatgtattcctctgtgaaagtgattgtatctcacactcacaaaggcaaattcacattgttggatgccggcaatctcagagattcgttctccgctcaaaacaattctcagttgagtttcaatcacgaagcgaggcggtcgcatcacagtcagccaaaaatcaaattgccggctaattgaggaaatggcaatctccgcttggatgccgcttctggtggcgctgatcgtcgtgtggatttcggcagcggaggtcgacgcacaggtgccgggaccacggactcgataccaacccaactgggccagtttggaccagagaccattgccccaatggtacgacgatgccaaggtgggcatctttctgcactacggcgtttactcggtgcccagttttggttccgagtggttctggaccaactggaaaagtatgaatgtttgattagcaatccgaaataaaatacgtactccaaatttattgtaatataatttctctttcagatcttcgcaatccagagtacgtccaattcatgcagcgtaattacaagcccgacttcacttatcaggaatt

SEQ ID NO: 24419 - DNA, 1238 bp, DROSOPHILA
atttcgacacttctacagaaagactttcctatcagctaaattttctgttcgaaatcgtcgggaaaaactggatcgccttgcgtaagatgagtatctggcccattcgaacactaccaaattccaaaatgcgtagttgcatgatggagctcggtcgcaccaatcgccacacggattgcacatttataattgaggatgagagcggtggcagtcaatcgtttccctgccacaaattgctattcagctgcgcctccgatgtgttcgatcgcatgctctatggcgactacattgagtctactagcggagttgtcagactaaatgatgtacaaccggatatatttgagaaattccgagactatgtctacggctatgagtgcgataaactgcagaagtacgactttgatactctgattcgcctctgtgagtttgctaacaaatatctggtgcaatctctcgaagaggactgtgtaaaggatttgctgatacgcaagaacacttttgacatgggagagttacttcgtctattccagtgtgcgcatcgcatgaatcgcaagtcgttaataaatcagatagcctgggagctaaagtgcaccttcaagagcaccttggaccactctggcgtatacgaattcaattgcgaggtatttaaacactatatcgaagtgattgctagcaaaatatcggaggcagatcgtttccgtctgctggaaatgtatctaaaatataatggtatcgaggaattggaaagcgcggggcaagtggatagccaggatgcaactgaagccaacaccaccaccatcaccaccaccaacgaagtggaaaatcaagaatcggaacttccgtccactagctgcgttccgctcaaaactgaatgcagttttgccgttccaaataagaaggcaagttttgtcagcgatctacttgcactgattgattttggcaaactttcgcccaaggaattctacgatggacccggcaaatccaatttccttagcctggctgagaagtacgagcatatgtatcaaatcgccaagaactgcgttacggccaaagatgaactgcagctgaagatggcattgaccacggaacagaagccccccctaccttccgaatcccgacgcatagttcatatgggaggaagcttaatgcgcgacgaaccaacggcttcttcggttacctcgcattacctttcccgacccatccgtcgatatcgcgcctggtcagcacacagtgacgtctaa

SEQ ID NO: 24420 - protein, 383 aa, DROSOPHILA
MSIWPIRTLPNSKMRSCMMELGRTNRHTDCTFIIEDESGGSQSFPCHKLLFSCASDVFDRMLYGDYIESTSGVVRLNDVQPDIFEKFRDYVYGYECDKLQKYDFDTLIRLCEFANKYLVQSLEEDCVKDLLIRKNTFDMGELLRLFQCAHRMNRKSLINQIAWELKCTFKSTLDHSGVYEFNCEVFKHYIEVIASKISEADRFRLLEMYLKYNGIEELESAGQVDSQDATEANTTTITTTNEVENQESELPSTSCVPLKTECSFAVPNKKASFVSDLLALIDFGKLSPKEFYDGPGKSNFLSLAEKYEHMYQIAKNCVTAKDELQLKMALTTEQKPPLPSESRRIVHMGGSLMRDEPTASSVTSHYLSRPIRRYRAWSAHSDV

SEQ ID NO: 24421 - DNA, 7781 bp, DROSOPHILA
aggagggatagaaaccagacagcgagattgagcttccatcgatgaaaaaagtgctgcatagttttgggcgagcaggcagaaaagcaaaaaaaaaatatatatatacatatatcaagcgaaatatcaattgtagttaggctgccgatcgtaaaccacatgttacagtggacactggctactgtagcactgccagacttccataagttagtgtccgtacttatagctattatatagtcaaatgtctaggcaataatattgctcatacgtactgaggtcactcttacacacacacacacacacacacacacacagacacacacacatgcaaagcacggcaggtgatttaatatctatagtaatagaaaatctttttttttttgagtaattctaaccgtatgaggtagcttaggttattcgtaatcttaatcgtaactcttgtccataccatgcataaatgtcatcttaaaaataaaccaagaaaaagacttcaacaatctgcaagcgtttttaacccaagagatacatatcgaaatgatttttcactttgatcattcgtttttctgctcaaaagctttggctaatttcgtcactcggttttgaagctcaattctcgtgacgaatggaactttcaccgggatgagcttagagaagacctgagttccgattcacatgatccaattctacagagaaccaccccaattccataccgcagttatttactcgagcactgtgagaaaagttgccaccattcgtgctcagatcatgaaaaattcgaagggtatgccacatggaaatatatgcatatgaattgaacaacaaaaggattctagaatatttttgttaaatatttaagttagtaattgcgcaacttttaacaagccgtcgcatttgcttgcgagctgagtgcacaatttttgttcgcagtgcacatatgctgcacattgttggctataaaagtcgttcgcaccgtcgccgctgtctagtcgctggaaaagaggcgcgaggagtgcgagtgcgggtccaacgtatctaatttatacacatatccagccgattccgagtccgtaactccgccatccgatccggtccgatcctcttcgcatcgctccgttcccatcccattccatcgcatcgcatcccctgtgtgtgggttgatatacgcgatcatttcgcgctggttgcctcggcgaggggctgtcaccgtttagttgtgcgctggccgagcagcgagtaacatccggtccaccgatccgatacgatcctatccgatccgatccgatccgatccgcaaaacccaatccaacccagcccatggatagctgatcgatccgtgtgtactgtgtgggaagtgtgcgtgcgccgatcgattggttttcttttttgttttggtgttttttctgtgacctggtgaacattgttgaccgatcgaaacagagagagagagagagagagtgagagagagggggagagtgtgtgagagagagagcaagagaaagaggatcccgacaagcaatggaggtgctgaagaaggacgccgccctgggctcacccagcagcgtcttctacttcctgctgctgcccacgctggtgctttggtacatctactggcgattatcgcgggctcacctgtacaggttggccggacgactgccgggaccacggggactgcccatcgtgggtcatctgttcgatgtgattggacccgcttcatgtaaatccactagactaagtgccatttttttcgcgggaaagggtgcgacatagccccttagcaggcataagggttaagcagccagtgaaaaaaaaaaaacgaggataaccagttttaaatacggattatcaggcaaactccgaattgaattcaaatcacataaaaatatttaattttcaatacatttcaaaagaaatcctgctgctattgagaaatcaatttggaacaaactttaaacttaaagaaaagcatttttgaaacttaaaatataatactcgtttgaaatctttttaaaacacttctgaaagtacacacatttatttgaagttctacttcaaacgaaactttaattctgatttaaaagtaattatcatgcattttccaaaattttaaacattgattattagtttttagtcacttggaataaagtttccgaataatagtgaaatgaaaattcttctcctttttattttaagaaagaacttatttctgacttttaaaatataacacatactagagcactaattatccttttcaaaaattaatcgtggttttgaattgatcccccaaattaatccgtgtatccccgcagctgttttccgaacagtcatccgcaaaagcgcccctttcgagcacatagccaagatgtggatcgggcccaagctggtggtcttcatctacgatccgcgggacgtggagttgctgctgagcagccatgtctacatcgacaaggcatccgagtacaagttcttcaagccctggctgggcgacggactgctgatcagcacaggtgaggtggggttttgagggggaaagcctcccacatttaaggggtggtgtccacttgccactaatgcaatttgcgaaatcataaattaattaagcgatccgctagcctgacagttggcacaacaatgccgctataaataaaatcaacgtcgcagaaaagtcacggaaaaaaaatgcacagtcgtttgcactgaagatataccaatttcaaatgtaataagttcaaaatgataatatgataaataatattacacatgatgattttcaatttagacagacatgtaagaaaaaagtactattatttattagcttgagtgataatcatgaacaaatttgtaatgtaatgtccaatttttttttggtttttttttttttgtaagaatatcttgtatgtacgatcggttctacattcccgctccatctattgttgcaggtcaaaaatggcgatcgcaccgcaaactgattgcacccacattccatctgaatgtcttgaagagcttcatcgagttgttcaacgagaactcgcgtaatgtggtgaggaaactgcgtgcggaggatggtcgcacttttgattgccatgattacatgagcgaggcaaccgtggagattctattgggtaagtgaacagatatacagatagatggatgtacagatacattcatatacagatatacagatacagataggtgcgatatacggatatggggatagagatagccatactatgattacactaaagtacagtcaacccacacgcactcgcaatcgcaacgatcatccgaaatacccataccattccatgacataccatcataccacgcagtacgatacgatactatagcataccatgagcatacaatccagcatcatcatcatcatttcagttatatgcgtgcgcccaagccacctaatccccgctagaaacgccgtggatatggacacattatattgtatgccacacacaattgagtgcagacccatttccctatatactggcaaatcaaaaatttgccgcttttgttgtggccccacaatgggagcaaatgagcatatacatacatgtgcttttgcatataaagatatatatatatatagatatatatatgtatatatatatttcaaatcccagcccccagatttaaccgaattatgccaaactgatgcaaactggttggatttgtaccccaaacgatcatgttgcttggttatgaaaattccataagtaggggttcttactaagttaaaacaaacaatcgaagatcagttaaaaagataatcgatatcttatatagagtaaatttacagcatattcaaaacataactattgtagctcaaagtaggacaaatttatttgggaatttgaaagttatagcaaaaacatatggcatatacaaatattgtatgtcctccatatttaagctttatagaagcttaacaatagtttcagtttcagtttaatgggaatattacaccgagatatctgaaagatccaagttctatcagcaataaacaacctcatatttctagatgcaggttaaggtaatacctataggttttggcccacccaaatggtcttgtttatcatcataccaatggcacccagatggcaattcgcttaaagccagacacgttttgggcctggagtgaaaagtgaaaccggcaagagcctagacaaaattggctggtggccaatgttaatgacattgtggagctcgtagtgctcggccgatttgggattgatttgtaggccattgcataataatccgagccctgcacaattgaaatgcagccaagattgcagaattcaattgccttggattggattggattggattggatacgatgtaatgtgatgtgatggaaccgaggcgaaccgaaccgaaccaaaccgaaccgaaatgcagcgaatgaaaatgcaacgcaacgaatgcgggattcgcagtcagtagtgcaattaaagccacgtcgcactgccattaagcatttaataaggaaaatttgaatgcaacgactgaggttgttgttcacggcgattattagtctggggtatggggtctgggtctgacgcaaacgggcaattagcaattaagaactcaacgaaacgaacccaaatgccaagcgaaatgcgaatgaaaatccgggcgagtttccacaggaaaaactcaaatgtgtcattgcataagccagattttcgtattccttttccgcacgagcaaaactcaaatttagcagtttaatttttagatatgctatttacacgaacctattcaaatttactgacctatctcatttgcaacttgaatctttcaaatcgttttcagattgcactgtcactttcctttagtttaattccagttatagaccgtgattcactgtgattggcaatcgagaacttatcaaaaaaaaaaaaaaaaaaaaaaatgccaaattccacgctcgcagttttcccacagcacaaaaacacacatgattgtacacacgaagcggatttgtccgtaagctcgtttatgctgtcatctatagatctatttatgcattgtatctacaattagacaggcggtggatggatggtgagctggcggggaatccgggggctacctccgccgcctgttgtctgtttgttaagttcaattggcgcttgggtcaggcgagtgcattccacttccccccatttgtgctgggggtccatcccatctacatccacatgccatcccttgccaactcatctcattctatccgatctcctcgcatccgatctcgatcgcaatctgctcttcaaatccagatacgagtctctgcactgaaaggaaaagtacgattcgaatgtgatgggatattgaggttatacttatacttccttttagttattatttaatataatcacaatctaaacctacttgtataaatacacacctttctgggtgctacattttggcaattccagagactgcgatgggtgtgtcgaagaaaacgcaggacaaatcgggattcgagtatgcgatggccgtgatgcggatgtgcgacatccttcacgcccgccatcggagcatctttctgcgcaacgagttcgtgttcaccctgacgcgctactacaaggagcagggtcgcctgctgaacatcatccacggcctgaccaccaaggtgatccgcagcaagaaggcggcctttgagcagggcacccgtggatcccttgcccagtgcgagctgaaggcagccgccttagagcgggaacgggaacagaatggtggtgttgaccagaccccatcaacagctggcagcgatgagaaggatcgggagaaggataaggagaaggccagtccggtggcgggactgtcctatggacagtcggctggtctcaaggatgacctggatgtggaggacaatgatattggtgagaagaagcggctggccttccttgatttgatgctcgaaagtgcacagaatggagcactcattacggacacggaaattaaggagcaggtggacacgatcatgttcgagggacacgacaccacggcagccggctcctcgttctttctctcgctgatgggcatccaccaggacatccaggatcgcgtactggccgaactcgactccatttttggcgactcccagcgaccggccacatttcaggtgggtaactaatgccgcacacatcaccatagttagttagttatattcttgaatgttgaacgttaaccgcttaaaatgtccgcattccgattgcaggacacactggagatgaagtatctggagcggtgtctgatggagacgctgcgcatgtacccacccgttccattgatcgcccgcgagctgcaggaggatctcaagctgaactcgggcaactacgtgattcccaggggcgccacggtgacggtggccaccgtcctgctccatcgcaatccgaaggtctacgccaatcccaacgtcttcgatccggacaacttcctgccggagcgccaggccaatcgccactactacgcctttgtgccgttctctgcgggaccacgcagctgtgtgggtgagttgcagatataacactgaagcaaattatgtgaatattcggatcgtctatatgaataatgttttgtttcatttattataattatttttttagggcgcaagtatgcgatgctcaagctgaagatcctactgtcgaccattttgcggaactaccgtgtctactcggacctgaccgaatcggacttcaaactgcaggcggacatcatcctaaagcgtgaggagggattccgcgtgcgcctccagccgcggaccagttgaaccccggtggccgcgacgaacatcagctaggcgaaccaggtggaccaggtggagcgggtggggcaggcggaacaggcgggcagcacaccatacaccgtacaccgcaaacaataagctacacagaacggacacttatccatacatataactccacttgttggcaagtgatagtcaccggtttatacagtaatattgataatattaaataataataaacgtgctcccacactcgatttattgaatagtataatgattatttttttgacgcatttaacacaaaaagcaaccacaactatcgtcatcttcctttaattgttctactcctcttttttttttttggttatttaataattataatacctatttgtgtgtaatgattttgacaataaatcttttgtgtaattatacaaatggattttagtgggaaatttaaatgttttcatacagcaaatggagttgacagccatttggttgctgttattactcgtcttctattttatgcgtcttaaaattcaaatatgcgcgccattcgtagcattaaccaacactgtaccagctggcaatgtaaattggtatatttttggtatataactatcgaccctcggccatcactaacatgcagcgttgccccatcccatctaacgcaagtaccaaactaatttggccatctggcagcactggtcaaaagtgacacggcgacaaccagcttaaaagcgaaagttaacaattaacaattgctggcgtccatagccaaacacacgagccagaaactggagccaccccaaagccagaatgtcgcacgccatcgacgaactgcaggcgatcatcgccgatctgaagacggagctggagacggagccgaaatccagtggcggcgtcgctagcaacagccgcctggcacgcgatcgcatcgatcgcatgtccgccgaggtggtggactccaatccgtacagccgcctgatggccctgcagcggatgaacatcgtcaaggactacgagc

SEQ ID NO: 24422 - DNA, 2237 bp, DROSOPHILA
cgaggagtgcgagtgcgggtccaacgtatctaatttatacacatatccagccgattccgagtccgtaactccgccatccgatccggtccgatcctcttcgcatcgctccgttcccatcccattccatcgcatcgcatcccctgtgtgtgggttgatatacgcgatcatttcgcgctggttgcctcggcgaggggctgtcaccgtttagttgtgcgctggccgagcagcgagtaacatccggtccaccgatccgatacgatcctatccgatccgatccgatccgatccgcaaaacccaatccaacccagcccatggatagctgatcgatccgtgtgtactgtgtgggaagtgtgcgtgcgccgatcgattggttttcttttttgttttggtgttttttctgtgacctggtgaacattgttgaccgatcgaaacagagagagagagagagagagtgagagagagggggagagtgtgtgagagagagagcaagagaaagaggatcccgacaagcaatggaggtgctgaagaaggacgccgccctgggctcacccagcagcgtcttctacttcctgctgctgcccacgctggtgctttggtacatctactggcgattatcgcgggctcacctgtacaggttggccggacgactgccgggaccacggggactgcccatcgtgggtcatctgttcgatgtgattggacccgcttcatctgttttccgaacagtcatccgcaaaagcgcccctttcgagcacatagccaagatgtggatcgggcccaagctggtggtcttcatctacgatccgcgggacgtggagttgctgctgagcagccatgtctacatcgacaaggcatccgagtacaagttcttcaagccctggctgggcgacggactgctgatcagcacaggtcaaaaatggcgatcgcaccgcaaactgattgcacccacattccatctgaatgtcttgaagagcttcatcgagttgttcaacgagaactcgcgtaatgtggtgaggaaactgcgtgcggaggatggtcgcacttttgattgccatgattacatgagcgaggcaaccgtggagattctattggagactgcgatgggtgtgtcgaagaaaacgcaggacaaatcgggattcgagtatgcgatggccgtgatgcggatgtgcgacatccttcacgcccgccatcggagcatctttctgcgcaacgagttcgtgttcaccctgacgcgctactacaaggagcagggtcgcctgctgaacatcatccacggcctgaccaccaaggtgatccgcagcaagaaggcggcctttgagcagggcacccgtggatcccttgcccagtgcgagctgaaggcagccgccttagagcgggaacgggaacagaatggtggtgttgaccagaccccatcaacagctggcagcgatgagaaggatcgggagaaggataaggagaaggccagtccggtggcgggactgtcctatggacagtcggctggtctcaaggatgacctggatgtggaggacaatgatattggtgagaagaagcggctggccttccttgatttgatgctcgaaagtgcacagaatggagcactcattacggacacggaaattaaggagcaggtggacacgatcatgttcgagggacacgacaccacggcagccggctcctcgttctttctctcgctgatgggcatccaccaggacatccaggatcgcgtactggccgaactcgactccatttttggcgactcccagcgaccggccacatttcaggacacactggagatgaagtatctggagcggtgtctgatggagacgctgcgcatgtacccacccgttccattgatcgcccgcgagctgcaggaggatctcaagctgaactcgggcaactacgtgattcccaggggcgccacggtgacggtggccaccgtcctgctccatcgcaatccgaaggtctacgccaatcccaacgtcttcgatccggacaacttcctgccggagcgccaggccaatcgccactactacgcctttgtgccgttctctgcgggaccacgcagctgtgtggggcgcaagtatgcgatgctcaagctgaagatcctactgtcgaccattttgcggaactaccgtgtctactcggacctgaccgaatcggacttcaaactgcaggcggacatcatcctaaagcgtgaggagggattccgcgtgcgcctccagccgcggaccagttga

SEQ ID NO: 24423 - protein, 574 aa, DROSOPHILA
MEVLKKDAALGSPSSVFYFLLLPTLVLWYIYWRLSRAHLYRLAGRLPGPRGLPIVGHLFDVIGPASSVFRTVIRKSAPFEHIAKMWIGPKLVVFIYDPRDVELLLSSHVYIDKASEYKFFKPWLGDGLLISTGQKWRSHRKLIAPTFHLNVLKSFIELFNENSRNVVRKLRAEDGRTFDCHDYMSEATVEILLETAMGVSKKTQDKSGFEYAMAVMRMCDILHARHRSIFLRNEFVFTLTRYYKEQGRLLNIIHGLTTKVIRSKKAAFEQGTRGSLAQCELKAAALEREREQNGGVDQTPSTAGSDEKDREKDKEKASPVAGLSYGQSAGLKDDLDVEDNDIGEKKRLAFLDLMLESAQNGALITDTEIKEQVDTIMFEGHDTTAAGSSFFLSLMGIHQDIQDRVLAELDSIFGDSQRPATFQDTLEMKYLERCLMETLRMYPPVPLIARELQEDLKLNSGNYVIPRGATVTVATVLLHRNPKVYANPNVFDPDNFLPERQANRHYYAFVPFSAGPRSCVGRKYAMLKLKILLSTILRNYRVYSDLTESDFKLQADIILKREEGFRVRLQPRTS

SEQ ID NO: 24424 - DNA, 3327 bp, DROSOPHILA
tgcctgcgccatgtgttcccgcagctgcagttgtgaaaatcgccggtaaactggttgcgcgagcgagatggagagagtgcgaaagcgggcgatcgctctctcccgctcaggggcggagatgcctcaaattggcagggggcctaatgaaagatgttaccctggaagacgctgcaagaattaccccaaagacataacacatggtgcgggattatttttttttttgtctcaaatcagcagctccagcattttaatttacaattaaaaaacaatcacagtgatatttgaattttcatttccttcatcgtacgtaggtttcggtctcgcatcttttgtgtcccgtccgtccaactgaactgaactgaaggtgtgtgtgtgccgttgtcttcttcatctgcccactgagtgttctgagtgccgcttgcttgtctgcttctttaaccgcttagctcatcctctccagcgttgcgttccgttttcaaagtcgtcgtgtatgtctaccattgttgatgttctcttcttgttatttgtctgcttctctgttcttgtttgctgccccctttggctccacagctatgagctacatagcatgctaccccgcttgagagatcttgccaggcgtcttggctgatgggtgtgtggtatggtatggatgtggatggagttaatggtataggggtgggatactggttactgtctacagatcctgtcttacagtcttagatcctggataattcccaaggctcgccggcagcagctggatggagtggagttgagtggagtcgagtggtaacgtggcctgatcttctagccgcctgattcttcgctttttcattggtttttataatttttatttacgtttttctttcggttgtttctggctgtggaactcctaataggatcatttgctttaaatagtattctttaaggtatttttctttatataatcttatatagtttcattccattcgttataatgtaattagtaaattcaaacacttgcagcataatcatataatcatataggtataattatagtagagtggtttgcttggtgatttcttttgttgttgctgttgtggtttagtctcatcttacaaattgggtcgtcgtgtcttcttcctcatcttctacctcatcctcttcctcgtcgtcggtgtcatctgctctctcggctgcacagctgccgttggctatcgtcttctggttctgctcctccgacccccgctcgaggagcctttgccctcttcctcctccgtgattccttttctggcggctttccctcggaaagccaatacttcttgtcttctttcagttctcgggacgttggcaccgcgctgcaggctcggcttttggaatcagcgatggttactggatgatgttcaggattatggattcatatgctgcatgtgttaatggagggatgtggatgtggttgtgggttctttattttgaaggggttgatcttgacttgggtgctgctgctatcgcttctagatgttgttgctgttggctggctttgtgaatgttgtagcaaattgatttttcgtttttttttcattttttttcgttctcatcttttcttctggttgttcttcgtgtgttgaattattactcatattcctccttcgatgattacatttatgaggtgccacgggtgggtggtggcgcctagttccgtccgcccttctcgtcgcactcgcgcctcagatgtccgctcttgccgcagccgtagcaagtcttcgaggtctccgggcagttcttggagatgtgtccggtgcggttgcacttgtagcacgacacattggtcggtccacgttcgttgacggcctctgggcagttgcgcacccagtgtccggtcttgttgcaacggtagcaggtcgggttgtccgcctgggtgcagtccttcgagatgtgcccgatgccgttgcagcggtagcagcgctcggcctcctcagggcaggcacgtgcgaagtgcccaaattggttgcatttgtagcacttctcgcggttgcgacgcatgccgccgccatcgttgccgcgcataccgccgccgccgccaccaccgcctcctccaacgccgcccggacctccgccgccgccgagactgcagtcccgggcaaagtggcccggccggttgcacttgtagcacgtggcagacatcgacatctttgcttcggttttggttagactactgatccgcaaatccgactccgcttcttaaactcaacttctcaacttcctcacacactcactggtaaccacgggccctcgagcactacacactgcttgcgctggatgcgaaaaaatcacacagaccaacaggatctccggcttcctcagatttcctcgccgtattttcgacgccaaaagttaaaatggctgccgctgagcgaatgagtaccgatttgctgtggtatcgactactcgccagagttgcttcggctacgcttgaatacaacactgaccctccacgcggtgcacattggttcgaggatatgcgatggtgaggcgaaatgtcagtctggaattgtgtagtgtgctggtgtcgtactacttccactcggcgtgctttgtctcacagaatctacatttccattttgctttctcacttggcgtgtttagcttttgtctcgtgtcctccatatttaggaggcactacataacccaattttgcgaactcgattttgccactttataaccacacgtaaccagtgtgtccgtggtgatggactgcaacttatcggctcagtcgttaggagtacccctggcaaagggctatcgaaatatatatctttaaatttataaggaagtccattcaaataattgttttattttaattgtttggacacaacatacgttcacctttttgaaattggctatttgcagaaattgatatcgattgacacattaggggtgcttagcaaagaatagctaactgaagacttcataagagaaaacgtaatactctaataatagaaaagcactcagattacgtaacaactaataaaatattttatgtgcatatatataaaacgatttatcaaaagaacctggctttgtcaaaaaatcgatatttcatagtggtgtacatttttaaggactttcacaaataatacgctgagtacacttatattattgttatattatcccaaatattgggcagcacgattttttgaaatctgggtgacatcgattactatatgaaaagggtattcctgcttatcagtatttgcagagaaaaggaattatgaataatatttacctcaaaagctataaattagataaagtcataataatttactttactatttattaactatattaatt

SEQ ID NO: 24425 - DNA, 1219 bp, DROSOPHILA
agatcctgttggtctgtgtgattttttcgcatccagcgcaagcagtgtgtagtgctcgagggcccgtggttaccagtgagtgtgtgaggaagttgagaagttgagtttaagaagcggagtcggatttgcggatcagtagtctaaccaaaaccgaagcaaagatgtcgatgtctgccacgtgctacaagtgcaaccggccgggccactttgcccgggactgcagtctctgcgtcgcaaccgcgagaagtgctacaaatgcaaccaatttgggcacttcgcacgtgcctgccctgaggaggccgagcgctgctaccgctgcaacggcatcgggcacatctcgaaggactgcacccaggcggacaacccgacctgctaccgttgcaacaagaccggacactgggtgcgcaactgcccagaggccgtcaacgaacgtggaccgaccaatgtgtcgtgctacaagtgcaaccgcaccggacacatctccaagaactgcccggagacctcgaagacttgctacggctgcggcaagagcggacatctgaggcgcgagtgcgacgagaagggcggacggaactaggcgccaccacccacccgtggcacctcataaatgtaatcatcgaaggaggaatatgagtaataattcaacacacgaagaacaaccagaagaaaagatgagaacgtcaatttgctacaacattcacaaagccagccaacagcaacaacatctagaagcgatagcagcagcacccaagtcaagatcaaccccttcaaaataaagaacccacaaccacatccacatccctccattaacacatgcagcatatgaatccataatcctgaacatcatccagtaaccatcgctgattccaaaagccgagcctgcagcgcggtgccaacgtcccgagaactgaaagaagacaagaagtattggctttccgagggaaagccgccagaaaaggaatcacggaggaggaagagggcaaaggctcctcgagcgggggtcggaggagcagaaccagaagacgatagccaacggcagctgtgcagccgagagagcagatgacaccgacgacgaggaagaggatgaggtagaagatgaggaagaagacacgacgacccaatttgtaagatgagactaaaccacaacagcaacaacaaaagaaatcaccaagcaaaccactctactataattatacctatatgattatatgattatgct

SEQ ID NO: 24426 - protein, 126 aa, DROSOPHILA
MSMSATCYKCNRPGHFARDCSLCVATARSATNATNLGTSHVPALRRPSAATAATASGTSRRTAPRRTTRPATVATRPDTGCATAQRPSTNVDRPMCRATSATAPDTSPRTARRPRRLATAAARADI

SEQ ID NO: 24427 - DNA, 3183 bp, DROSOPHILA
cgagagattccaactggattagtggcgaaatctgtggcaactccgcttacccaaggggcatataagtggatcgatcccccgtgccaggcaaacaagtacaatgcttcgttgtggttgttgtcaaagggtttgcctgaatggggggggtcccaccaattaagaggacctgaagttccttagccgccgacgattgtctgccggcgattagtgcacctggaaactaaatgccttgcccaactccgcgatagacatctacatgagagagcgtttttagtcatttagcatccatatccatattattcaattcaattcgattgcactcactgctcactgccaaggagcccaaaacaaaagagccgattcttgagattgcaccagccattaagccagcaattgacaatttgaaggcaagcagatttatctcgacatcaggtacacacacacacacacgcacacacaagcgcacagatactcggtaaagttatagccattatagtagattcccgctgtttatatggcatcacccaccaattataaatcgcacatagcggacgtttgttttatatcctgtaaatatgttcacgtctttagttgcacttatttgtcacttatgttgggtcgaagaaaacgccgccggttcaacatatgtaggtatttcaattgatatccaacgaaacgcgtccaccagcgacaagcaacggcactcgagtggcgatcggatcgtaaaagccgccgattcgagtcgggcccaaaccgaagttcgaacccgagccaacagtagttagctgagacaagttgaccaagtcataagagctcggatagttaagacttcgcatagaactaggagccaaagccaacgcattggtaaaagtaacagatacattcgaaaaagtcgatcaaatgatggccaaacttaatttagaaccaacattttcgaaaacccaacagataaataataatttgtcataaataatacaagtaaaataataataaatgcttttaaaatttatgcagtctaactaattttattaattcttacacgtaaaatcaattgatgataacaaaaacaaagcgtagtcaaagtcctggccgagctcccccacagaatatatttcgcaggggtgcagtcacatcgatcagtacgggagtggattagacgctccttcgacgcttcacagcaaccattgcggttcaccgcagacgcattgacggatcttgcgctccagattgcggagtacgccgttaagatcctggcacagtgcatccctcttagcacatccattgcatggctctcctccaggaccgcagctcttgcaaccgcacggcttaggtgtggtgggcttagtggtggtgggcttcgtggtggtgggcttcgtggtggtgggcttagtggtggtgggcttcgtggtggtgggcttagtggtggtgggcttcgtggtggtgggcttagtggtggtgggcttcgtggtggtgggcttagtggtggtgggcttcgtggtggtgggcttcgtggtggtgggcttagtggtggtgggcttcgtggtggtgggcttagtggtggtgggcttcgtggtggtgggcttggtggtggtgggcttcgtggtggtgggcttagtggtggtgggcttcgtggtggtgggcttcgtggtggtgggcttagtggtggtgggtgttgtgcacggaagttgcgtggtagtttgcttagtggtggtgggtgttgtgcacggaagttgcgtggtagtttgcttagtggtggtgggcttagtggtggtggccttagtggtggtggctttagtggtggtgggcttcgtggtggtggccttagtggtggtgggtgttgtgcacggaagttgcgtggtagtttgcttaggtgtggtgggcttagatgtcgtgcatggaggttgcgtggtagattgttgtgtgggtggcgcacaagtagttgtggttgttgttgtcgtagttgtgcacggaggttgcgtggtacgtggcgcacaagtagttgtagttgtggggcatccacaatcgcaacagttggcaacattagcggagccaataagcaggatgctcgctgtggagaaggcaaacggatgaatatatcagtggctcaaataccgaaaacaagagcattcggtgaaacctacctagggcggtagcaatggtcagcttcatgttttttacttaattctccacaaactgatacttttcttgcggatacctcacctttttataggtacgctttcactgaaactgcaattctaaaaatggagtcagtatttcgattatgcaaacacaagccttctcccctttgtttgatacttttgggtcgactcgatcgcctggactttattttaaaacaagagagaacgctaacgagactaacagatacccgttacttagctagttcaagtgaaatggaaaatgtataacatttttcacgaatatcggtaaaaattgggggaaagaaattaaatttaatgctctaaggtgtggaagggatagatttagataataaaaatatgaaaaaattataaaacatttttcaaaaatgtgggagtggcaaacagaatcagacggacatggccagatcgactcggctattgaccctaatcaagaatatatatgctttatattctgcctgttacttctcagcgaaacgagtatacccttttactctacgagtaacgggtagaaaaaggtgtagagatgttttgcagacaaactgcgttaaattctataaataataggtctttaatataggctgagtaaatataataatataaataaggacagttaaatttagcttaatttagctttacaaataagccccataaaactattcaattatcttatagtattgcatattcaaaaaatatatatttttaggttcgaattaggatagacattttgggtcttcgtttgcactttgacaggcaatttgacattgattcaacgaatttacatacagccttctttacttgttagccgatacaccaacctctagctaaatgtaattccaaaccactcaaaggcaataacattttcttggttctttattgcttcagtatttcacgataaggttttaattgtttagtacgaaatgtattagacgtactactatatacttataattagatttgcattataaacgaaaaccaaaggtttataatcacaaatcatctagaa

SEQ ID NO: 24428 - DNA, 1110 bp, DROSOPHILA
attaagtaaaaaacatgaagctgaccattgctaccgccctagcgagcatcctgcttattggctccgctaatgttgccaactgttgcgattgtggatgccccacaactacaactacttgtgcgccacgtaccacgcaacctccgtgcacaactacgacaacaacaaccacaactacttgtgcgccacccacacaacaatctaccacgcaacctccatgcacgacatctaagcccaccacacctaagcaaactaccacgcaacttccgtgcacaacacccaccaccactaaggccaccaccacgaagcccaccaccactaaagccaccaccactaaggccaccaccactaagcccaccaccactaagcaaactaccacgcaacttccgtgcacaacacccaccaccactaagcaaactaccacgcaacttccgtgcacaacacccaccaccactaagcccaccaccacgaagcccaccaccacgaagcccaccaccactaagcccaccaccacgaagcccaccaccaccaagcccaccaccacgaagcccaccaccactaagcccaccaccacgaagcccaccaccactaagcccaccaccacgaagcccaccaccacgaagcccaccaccactaagcccaccaccacgaagcccaccaccactaagcccaccaccacgaagcccaccaccactaagcccaccaccacgaagcccaccaccactaagcccaccaccacgaagcccaccaccacgaagcccaccaccactaagcccaccacacctaagccgtgcggttgcaagagctgcggtcctggaggagagccatgcaatggatgtgctaagagggatgcactgtgccaggatcttaacggcgtactccgcaatctggagcgcaagatccgtcaatgcgtctgcggtgaaccgcaatggttgctgtgaagcgtcgaaggagcgtctaatccactcccgtactgatcgatgtgactgcacccctgcgaaatatattctgtgggggagctcggccaggactttgactacgctttgtttttgttatcatcaattgattttacgtgtaagaattaataaaattagttagactgcataaatttta

SEQ ID NO: 24429 - protein, 307 aa, DROSOPHILA
MKLTIATALASILLIGSANVANCCDCGCPTTTTTCAPRTTQPPCTTTTTTTTTTCAPPTQQSTTQPPCTTSKPTTPKQTTTQLPCTTPTTTKATTTKPTTTKATTTKATTTKPTTTKQTTTQLPCTTPTTTKQTTTQLPCTTPTTTKPTTTKPTTTKPTTTKPTTTKPTTTKPTTTKPTTTKPTTTKPTTTKPTTTKPTTTKPTTTKPTTTKPTTTKPTTTKPTTTKPTTTKPTTTKPTTTKPTTTKPTTTKPTTPKPCGCKSCGPGGEPCNGCAKRDALCQDLNGVLRNLERKIRQCVCGEPQWLL

SEQ ID NO: 24430 - DNA, 2303 bp, DROSOPHILA
gtggcttttgttcagcctacaatgggagttggtggctgtttgctttccgcgtccattcttttctttctatttcctttcatgtggagcgctttctgctttaaagccaaataaagtcagccgccattagccaagtcagggtggacacatgcactaagcaaaattaattaacagatcctgtttcttgacccagatctctgttgctcgcttgatttgctttacttaattaatcagcagtcaagtgtggctgccggatgaagtgagtcgggatgcggaatgcgatgattccagaaggatgctgtcaggagcaaccgaatggcctgacaatattttccaattaagcgtgaggcgtatttagccgtctcttcgggtgcatttgggtgtgaaactatcgcgtgaaaataaacaatctgtggcaaacaatgaaattccagagaaaaattgcgacgaactgtcttaagccccttaatgtgtcaataatgctatctgaaactattagtcatccgagttgcacaacaaagaatttcaatgggtacaataaacaccacgttcctagtaggttgggtatatataatcactgattatagttttagtgaatttatgtatttggtaaaaaataggtttcagcgattcctagtaacaactttagggattctgtttgtaaaaaatttgtggaaaaaatgaatttattgaattttttaattaattgttttaaatattaaaaggcattacgcattgagtgattagatattacgaggaacgaaaaggtatctatgtgctctttttgggctatgtaatcggtcatatttttgcgatcgaccttcgattatttcgatcaaaattgcaaggaaccatagctgcatggagttaaagacttcgtcaagcctaccgttatctttgcgtactgattggccttatctcttgtcgtgtacatttatttatactgatattattgttcatatatgcaagtgaactgcgtgaaaacagattagtttgcaatataatgtccggttatcaagtcccactagcccgagtaacttcttcagaacgacggggtttcgaagtatctatagatgatgagccgggaatttcactgttcggattccacggcagactaaacgaaccaattgttgatcttgggaatcagacatgggcggctgatatcattgggaaggataaagatggccgatggacgtacaccaatcgggatgtggagctaaaggacggagacgtactttactactggacaacagtgcggtataatggccgagactatcaccggatgaaccagagtgccggcttctaaaaaagatggattcaaaagaatattgttgtggatatacagtttttagttttttttttttttataataaactaagcggcttgcaaaaacaccggagatactctttttatatactgagattagattttcgcggcagttgcatgatatgtaactgtgcactgctgacagtttctttgcagttgtgagtctgctgtatttacataaaaatcacagaacgcgagcgaaagatttatgtcccatctgaaataaaaaggaagtgaaaaaagagacaaatgaaaattccataaacaaacaaccacttgagaaaaaggacaaaggaaaagaaaaatagctgcaagaaaaagttatatttttacggtaaataactttgcccagagctggaaataaaacattttcgccgcgcgaagagaacaaagaaattgcgcattcgccatgtgggattgcagggtgcacggttcaaaaaatatgggcgtgacaggcggaggcaggtttttccgaatggaaccggatgaaaagagtaaaaagcagttgttcgcacaatattttctagagcaaatgctatgcaaattgatgtaaattaacttaaggtgcttttctccctaattatgtatctgttgacctgatgtcggaattaacgtgcaacgctttgaccgcctttggtaagcccaaggaaataaaattgataaaataaacatgcgtaaataagctgattacacgcatatttgcatttatacagctccatttcggccacgtataatcgcacagaaatgtattcaaattatattttagttcaactttctctccgcactttcgctcttatgattgcttttttatttcccccctacacctctgaaaattatgtttgataccagctcgaaggcgcagcaaaaatgaaattttcgccgcaggtgtaatatttcttcattgtatgatttaaattcgtttcgtggaagttggaagtcggaggcggaaataagttgtgtgggggggggggggggtgatg

SEQ ID NO: 24431 - DNA, 303 bp, DROSOPHILA
atgtccggttatcaagtcccactagcccgagtaacttcttcagaacgacggggtttcgaagtatctatagatgatgagccgggaatttcactgttcggattccacggcagactaaacgaaccaattgttgatcttgggaatcagacatgggcggctgatatcattgggaaggataaagatggccgatggacgtacaccaatcgggatgtggagctaaaggacggagacgtactttactactggacaacagtgcggtataatggccgagactatcaccggatgaaccagagtgccggcttctaa

SEQ ID NO: 24432 - protein, 100 aa, DROSOPHILA
MSGYQVPLARVTSSERRGFEVSIDDEPGISLFGFHGRLNEPIVDLGNQTWAADIIGKDKDGRWTYTNRDVELKDGDVLYYWTTVRYNGRDYHRMNQSAGF

SEQ ID NO: 24433 - DNA, 3582 bp, DROSOPHILA
tacttggcggccaggaaagcagccatgctgctgcatgtgtcgttggaggacacataaagctggatgagctcgaagatgcgatccatcttggtgttcttcgactgaacatggttcacgggactgcaattggtggtgggagcagatgtggaggtgtcataggcatctagtctcgacatgtgaaagggatttaggaccaggatagacatccacaggagcagtatatagcgcgtttcccactgttcgaactccttgggattttgctgacccagcaaatccagaacaaactccagatcgctcagttcgtgtggcataaactttaccaggaccttataggtgcgcactttgcagatgatgtagagatacttgaaggctgcatgaagctctccagtgtctagatctggcttccgaatcttgtggagcagtttgccgagtaactcctccaaatgtggatccaagaggtgtggctgctcctgatatctagacaaaacctgggcgtactgctcgaactccctttcgaaggtgttagcggcaatggatttgatgttgtcgatcatctccagcacctgctgcagttcggtgaagtgctccagcgtgtttgccggcaggtcctcatccttgcactcttccacagaattcgacatggctgcttgacgattttatcgagttttaaacccacagccggcaacaaaatcaattcgtttgtgaatcatttgttttactgccagggttgcaaccccaatgaaagtatgctggtatgacaccacgaactgactcgtctctttcttactgtttttcgaccaaaagggtctttatctaattctttatctttaaactaacatttttttttggaatcaaatgcagttattgtacattgtgctctttaaacgtttgtaataaatcctactaaataagttcatctagtgtcatagtgcctttggtgtggccgttttgcatgcacctggtaataccgttaagcagctgttcgaccagagctgccaggcgcaattaatcatttatttgtagtggcaagcgaaactgcgagatttagcaagagcaagattttgtatattccaccaaaacgcagcaaagcaagcccgaatttgggatattaaaagtgttaccgtcgggtcgaaaccgctcacacattcgtcgagtttgctgtgagcgcggtcattgctgtgaaaattgcgttgaaaattcgggatccgcaagtttcggagcattgcatttgtggacaaaccgcaatttctggtccactgcgccatgaaatcagataactaccgtctcatacaggaggtgtccaagcggcggtgcctgtgggacacaaacatgtccatttcgtaccgcaaccaggacgcagctctccagtgggcgagtgtcgcgcagataatgcagcaggatggtgagtggcggataaacgaggagggttttatatgcctaggaaacctataaataacacctggtcattttgcagtctcgatctgcaagaaacgtttcaagggaatgcgggacagctaccgggcagaggtgcgcaagatacagcagaaacgaatcgagatgtcccactggccatactttcgctcactggagttcatgcgccaaatcttcgatccggagggcctggtgccctttccaccagagcccttcgtgatgaacaccgagcagccggaagtcttcgagcccacccgactggttgacttcgctatcgatttggatttggacaatgatgactctgttgactttgaaatcatcgaggacatatttaagcgggagccgtcagtgccccaggactctggctcggataaaggctcgctgatcaagcctttggattcttcatcctcgggcgcccatcgttccgatcaggatctatcgcccacattgcccatacacttgccgcgccaccaacaattcctgccacgtccacccccgccttcgaagagaggacgtcggaggaaaacttcgccgtctaacgatgtccccttattgaatggatacgccagccaggcgtcaaagtctaccactgaacccgatctaaagaacgattcggacttgagtttcttgatgagcatgatgccgcacgtaaagtctctgtcagccattagcaatcttaagtttcgaatggagatggcgcgcgttctggtggaactcagggaggaggatcagcacatgctcgcggcggcgggacccgaagacgttctagagcgcagcatgcccaaactaacaccagccccgaattccagttttgccactcagctggagaaatcccagtaccatctatccaattccagctaccaaatcagtagccgaaaaacaccaacttcgtttgactatgtcgacagctccatggttgagtgcgatgtcaagatagagaatgagcctctgctatgaagacttcataccaaatttttacgattttacattcaccaataattctctaaggagtattcctttcatattgttacaagtcttagatgaaaccctactcatacatgagtagttgtttggcaaaatgcctatcataagaccattatccacacgctgaattgcttgtaaaatattgatttgtattgtccaataatttaaccattttgactccgggtatgccattcgcgggctgttttaaagcaatttacacgaaatggaatatacaaacaaaataacagctgatgctgattaaattttaaggtttagcttatcattgggatgtcatctggaaggaattttaatggatttgaattgatttaagattctgttttcgaatagacacgtaataaatatgtgcatacgatttaaaaaaggtccaatgattttaaggtgagataatcctaaaatcgattcggtttcatttcccgatgttccactacgaaatgtcaaccataaataaaacaaataaaagaggcaacttggtcgaaaacaatctcagttcaattgtaatgaaaattgacgtccggtgcataatttatatataataatatatatctatatatatataaataataacaattcaagattatttgctagtttatgttccttgtctaacgttccagaaaaaaagtaacttggcatttggcagtcggacgttttcgtttcggcgaatggtatttagttaggcagcagtacggtcacactggcggaactaactaaaaaaaagtgtgaaaatttgtcaaatatttcgacaagtacaacgatctaatcgattcgggagcagaattcagcccccgcagcaaagcgcccgcgtgtaccacctgatccgaggatgcagagatccacagaccggttgcgccggctgaaaaagctgaagagcgttacgggagcgcaggatggcgttggtggcggcgatgcggcggcgacggcggataatcggacctccgcatcgtcggacacgaacggagcagccgccagtagcggagccggcggcaatcagccaggcacactcaatccggaggtcttcaagcacttggacaaatccggacgcagtgaattgtacgtgtgtggtaccacgctccgacaccgatgcaaacgcagccagagatatatgcacacgcgcccaaacactcgcactcgcagtacagtggctgtcgt

SEQ ID NO: 24434 - DNA, 1510 bp, DROSOPHILA
cgcaattaatcatttatttgtagtggcaagcgaaactgcgagatttagcaagagcaagattttgtatattccaccaaaacgcagcaaagcaagcccgaatttgggatattaaaagtgttaccgtcgggtcgaaaccgctcacacattcgtcgagtttgctgtgagcgcggtcattgctgtgaaaattgcgttgaaaattcgggatccgcaagtttcggagcattgcatttgtggacaaaccgcaatttctggtccactgcgccatgaaatcagataactaccgtctcatacaggaggtgtccaagcggcggtgcctgtgggacacaaacatgtccatttcgtaccgcaaccaggacgcagctctccagtgggcgagtgtcgcgcagataatgcagcaggatgtctcgatctgcaagaaacgtttcaagggaatgcgggacagctaccgggcagaggtgcgcaagatacagcagaaacgaatcgagatgtcccactggccatactttcgctcactggagttcatgcgccaaatcttcgatccggagggcctggtgccctttccaccagagcccttcgtgatgaacaccgagcagccggaagtcttcgagcccacccgactggttgacttcgctatcgatttggatttggacaatgatgactctgttgactttgaaatcatcgaggacatatttaagcgggagccgtcagtgccccaggactctggctcggataaaggctcgctgatcaagcctttggattcttcatcctcgggcgcccatcgttccgatcaggatctatcgcccacattgcccatacacttgccgcgccaccaacaattcctgccacgtccacccccgccttcgaagagaggacgtcggaggaaaacttcgccgtctaacgatgtccccttattgaatggatacgccagccaggcgtcaaagtctaccactgaacccgatctaaagaacgattcggacttgagtttcttgatgagcatgatgccgcacgtaaagtctctgtcagccattagcaatcttaagtttcgaatggagatggcgcgcgttctggtggaactcagggaggaggatcagcacatgctcgcggcggcgggacccgaagacgttctagagcgcagcatgcccaaactaacaccagccccgaattccagttttgccactcagctggagaaatcccagtaccatctatccaattccagctaccaaatcagtagccgaaaaacaccaacttcgtttgactatgtcgacagctccatggttgagtgcgatgtcaagatagagaatgagcctctgctatgaagacttcataccaaatttttacgattttacattcaccaataattctctaaggagtattcctttcatattgttacaagtcttagatgaaaccctactcatacatgagtagttgtttggcaaaatgcctatcataagaccattatccacacgctgaattgcttgtaaaatattgatttgtattgtccaataattta

SEQ ID NO: 24435 - protein, 350 aa, DROSOPHILA
MKSDNYRLIQEVSKRRCLWDTNMSISYRNQDAALQWASVAQIMQQDVSICKKRFKGMRDSYRAEVRKIQQKRIEMSHWPYFRSLEFMRQIFDPEGLVPFPPEPFVMNTEQPEVFEPTRLVDFAIDLDLDNDDSVDFEIIEDIFKREPSVPQDSGSDKGSLIKPLDSSSSGAHRSDQDLSPTLPIHLPRHQQFLPRPPPPSKRGRRRKTSPSNDVPLLNGYASQASKSTTEPDLKNDSDLSFLMSMMPHVKSLSAISNLKFRMEMARVLVELREEDQHMLAAAGPEDVLERSMPKLTPAPNSSFATQLEKSQYHLSNSSYQISSRKTPTSFDYVDSSMVECDVKIENEPLL

SEQ ID NO: 24436 - DNA, 4075 bp, DROSOPHILA
atgtttttgaacattggtcactacacaaaattcctaattggactccaacgactttcacttctgattgggaagggtattcggcgaaagatgttgcccagttccggctgggttttctcttccattttggcgtttcttatcacaaatgtggattgtgtctggctgcagcttaccgcaaggttggccttcttcttatcaatgtcttgatcctcaacaaaggcgatttgagcgtgtgccactttcccaataaacgcaataagcgcggcgatcagcaaaagttggggattgatcattgtccgtataatcacttgttcatgtgatactcacggcaattcaaacaagtatgaggctggccaatcttgacttaatcttaatcaatgggaaacgaagatcttcgataacgataacgatcttagttgggtccagttatgttattgttttacgttttctcggaaatattccaatattccaattggaagtttagtgcgaataaccagaaaagcagaacaaagtgaaattaaaacatagtccaataagggccagttccaattgatattgctctcccgattacatccgctcttgctagtgatgctcaatactcaatcaatgctcagctgtttctatcgatgagttgaaaaaaataactttctgatcatataaatttaagccaagagaaaagggaaaaacttaaaaaaaatatctgcacacttacgtttgcttttgaaatattggattaagaactccttgttaagtaatgcttagttatattgtcttcctatgagttgtggactaccaaattactaagtgtatcagaaattaaaattgaaaatcgaataatttgttatatagaacgataagcattacgagtctattttggcgcccaactaccgaacattttcaaaatgttgccattattggttagcactggttagccaatcgctaactatcgaaaagctcccatctcttattttcctttgtcaaaataaaaaccaaataaatatatataaaattcacctgcaaaacgaagcaacaaaagacactgtacggctcaaatggacgaagaggagaactcaggtgggtgtggcagcatcatagcactcgccaaatgttcccaataacatatgttcatcatatgaaactgcgcagaaatcaattctgtgcaagcacgggatgaagatgtgcaattggaggaccaacagtcacaggggctccaggatcggcaggtagacgtgatagaacaggcttggaacaatgcaatgccagacgagccgtcaccgccggcagaagatgccttccaagatccactggccaccgatggtgagggaggggatgcacttgaggccatggtagagaacgttttgcaggacgacacagcaagcgagggcagtcatcccagcagtgacatgtctctggaaagtccaggaagtgaaggttagttggcttacaatcgttgtgctgcacattcctacttaacccgcgttttccatcctttccagatgattccgatctggagagcctgccccattggatgattccgcagaaccgactgcgctccgccgtagacatgatggtctcgcaagcccgcaatcgggatggtggaatcgctgcactgctcagtggggacaacttcctacagcgagtgcgtagcatggtctttagccaggagcgacggcgcagtcgcacaagcgaggaaacgagccaggaggctgccgagcagcccgttgatccaccgccacagcagccacctcgaccaccaatcgacattggctttgacaccaatctgccagcggagcattcatacttcggtaatcatttgagtcgcgtgcccggagtggactacttggaggtgggcagcgtccatcacatgctcatcttcttgcaccagcacatcctctttcccggcgaggtgcttcccttcatgatcgacggccgaatgtttgacgaggatatgcccggtctggacggtctgatcttcggtgtaagcttcccgcgtttgcagccgccggaggacaacccacacaagttgtatggggtcacgtgtcagatctacgaaaggggcgaaagcggccgaggattggtgttctacaaatcacgagcactgcagcgcattgtcatcaactgcgatgatataaaagggtgagtcttgactatacggatcaccttaaattctccatgattaatcccatatcttttcaggtcaccgcagtacattgctcgcaatccaactagcaaatgcttcagcaaagtcaaaatattgcccgagtatttcctgcccgaaccgctccaaactgttgacatgggctcgatggccagatttcgggatataccctcgatgcgcgacaagtatcgcaggttccagctaagcactaccacctggccatctgatgcctgccaagagtattcgttttcttcaattgtggagcgagcacgccagaggctggagtcccaaaagatagacacaatgccaaaatgccccattcagttgtccttctggttggtgcgtaaccttcacctgaccgagaagatgatgcggcttaccttcctcaccgactcggttaacactcgcctccaattgatcaaaagcacgttcaaggacgagacactcttcttttgccgatattgcaatagcagcttggccctctgctcggatctctttgccatgtccaaacacggtgtgcagacacagtattgcaatccaggtaagcataaggagaagtccaatgtccgtcttctataagcaatgaattcactgaaactaactactttacagagggctacatccacgagacaaacaccgtgtaccgggtgatatcccatgccatcggctacagcggcgagccgtccacaaagtttagctggttccccggctatcagtggcacattattctgtgcaagttctgcgcccagcacgtcgggtgggagttcaaggccgtgcatcccaacctaacacccaaggtgtttttcggtttggccggctccagcgtgcggattggaaaagccagcgagtactcgcccttcaatggaaccacctatgtggtgcggaatatgatgcggatgatctcaagcgatatggaatgaggctggcgcgttgtgaagcgatttttcagatgtcaactctgctgctggcgtcgtcaggagaatgatgcggtccatcaggtgggacctgtttaattcgtttcacaactacttttagcaaaaacacacggcgtttgatggcgtggatgtaaacctaattgatatttacgattatttgaataataagttactcttaaatatttgcttttaatattatggttacaaatttcaatcatttaaaagtgccgcaaatgaggtggacagcttctgaaaaagataaagcagttgtacattggcaatagatgaaatgataggcaatattaccgccttgcagaagggacactggccgaaggagacctccagaaaggtcttgccatccatcagagtcttaaaccactcctccaaacagacggcatggcactttagcacacatttggcattgtcgcaggagacgaggggcacctcgccaccatccaggcgataggcaaagcaaatgttacagcgcagctcttcgttgtcctcttcatccagcttgggtccatccgaccagtctggcatgggaaagtagcacaagtcgaacattcggagtaggttcttgtgaatgttcatttcggagtcccagttacttagaccatcgctgagaacgtggcgcaggcgggccacctcttccgtgggcccaatgatctttagcgacatggatgcaatgcaggcaaagggatccgcgatggtcagcttcaagtagacgcgatccttgagagggaacagtcgtgttttgtgtttgctgctgatgggcgatggttgcagcacatgacaaagctcgtcgatatccatgaagttgtcgtagaagggacgcagatcctcgagaagcttgcgaaagaggtttagggcctcctctaggtttccagcactcttggtcagcatttcacccagcgatacgcagtcgggcaaactgtgatcaagcaagagaagagacgggatcttaagctccagataatgctgctcg

SEQ ID NO: 24437 - DNA, 1879 bp, DROSOPHILA
ataaaattcacctgcaaaacgaagcaacaaaagacactgtacggctcaaatggacgaagaggagaactcaggtgggtgtggcagcatcatagcactcgccaaatgttcccaataacatatgttcatcatatgaaactgcgcagaaatcaattctgtgcaagcacgggatgaagatgtgcaattggaggaccaacagtcacaggggctccaggatcggcaggtagacgtgatagaacaggcttggaacaatgcaatgccagacgagccgtcaccgccggcagaagatgccttccaagatccactggccaccgatggtgagggaggggatgcacttgaggccatggtagagaacgttttgcaggacgacacagcaagcgagggcagtcatcccagcagtgacatgtctctggaaagtccaggaagtgaagatgattccgatctggagagcctgccccattggatgattccgcagaaccgactgcgctccgccgtagacatgatggtctcgcaagcccgcaatcgggatggtggaatcgctgcactgctcagtggggacaacttcctacagcgagtgcgtagcatggtctttagccaggagcgacggcgcagtcgcacaagcgaggaaacgagccaggaggctgccgagcagcccgttgatccaccgccacagcagccacctcgaccaccaatcgacattggctttgacaccaatctgccagcggagcattcatacttcggtaatcatttgagtcgcgtgcccggagtggactacttggaggtgggcagcgtccatcacatgctcatcttcttgcaccagcacatcctctttcccggcgaggtgcttcccttcatgatcgacggccgaatgtttgacgaggatatgcccggtctggacggtctgatcttcggtgtaagcttcccgcgtttgcagccgccggaggacaacccacacaagttgtatggggtcacgtgtcagatctacgaaaggggcgaaagcggccgaggattggtgttctacaaatcacgagcactgcagcgcattgtcatcaactgcgatgatataaaagggtcaccgcagtacattgctcgcaatccaactagcaaatgcttcagcaaagtcaaaatattgcccgagtatttcctgcccgaaccgctccaaactgttgacatgggctcgatggccagatttcgggatataccctcgatgcgcgacaagtatcgcaggttccagctaagcactaccacctggccatctgatgcctgccaagagtattcgttttcttcaattgtggagcgagcacgccagaggctggagtcccaaaagatagacacaatgccaaaatgccccattcagttgtccttctggttggtgcgtaaccttcacctgaccgagaagatgatgcggcttaccttcctcaccgactcggttaacactcgcctccaattgatcaaaagcacgttcaaggacgagacactcttcttttgccgatattgcaatagcagcttggccctctgctcggatctctttgccatgtccaaacacggtgtgcagacacagtattgcaatccagagggctacatccacgagacaaacaccgtgtaccgggtgatatcccatgccatcggctacagcggcgagccgtccacaaagtttagctggttccccggctatcagtggcacattattctgtgcaagttctgcgcccagcacgtcgggtgggagttcaaggccgtgcatcccaacctaacacccaaggtgtttttcggtttggccggctccagcgtgcggattggaaaagccagcgagtactcgcccttcaatggaaccacctatgtggtgcggaatatgatgcggatgatctcaagcgatatggaatga

SEQ ID NO: 24438 - protein, 541 aa, DROSOPHILA
MPDEPSPPAEDAFQDPLATDGEGGDALEAMVENVLQDDTASEGSHPSSDMSLESPGSEDDSDLESLPHWMIPQNRLRSAVDMMVSQARNRDGGIAALLSGDNFLQRVRSMVFSQERRRSRTSEETSQEAAEQPVDPPPQQPPRPPIDIGFDTNLPAEHSYFGNHLSRVPGVDYLEVGSVHHMLIFLHQHILFPGEVLPFMIDGRMFDEDMPGLDGLIFGVSFPRLQPPEDNPHKLYGVTCQIYERGESGRGLVFYKSRALQRIVINCDDIKGSPQYIARNPTSKCFSKVKILPEYFLPEPLQTVDMGSMARFRDIPSMRDKYRRFQLSTTTWPSDACQEYSFSSIVERARQRLESQKIDTMPKCPIQLSFWLVRNLHLTEKMMRLTFLTDSVNTRLQLIKSTFKDETLFFCRYCNSSLALCSDLFAMSKHGVQTQYCNPEGYIHETNTVYRVISHAIGYSGEPSTKFSWFPGYQWHIILCKFCAQHVGWEFKAVHPNLTPKVFFGLAGSSVRIGKASEYSPFNGTTYVVRNMMRMISSDME

SEQ ID NO: 24439 - DNA, 7829 bp, DROSOPHILA
tttccttggaatcgtttaatgtggaatgtcgtattaatgaaaccagtaactgcggcaataatattcgattatcggaacgttgataaaagcttctacttccaccgaaaataaaaatccgcatccgcagttttttactgcagtaaaaaccaaactgattgattaaaaacccgcctaagaatgtggaagctatcaaaattgagtcttaataattatctatcttatactgcgtcttttattgttttttctatcattcctctccaaattgataattgttgcgttttttctaacaagtttgaacttcctttggatttattatgttttttttttgtcgcgagagccagaaaagtcggaaataagaatatgggtttctcatcattgaatatattgtagtttccattttacaagcatttctaagttctgccttaattttaattacttattttctaattcagttaattacctaatttgttaagcatttttcgctgctcttttttttattgagagcgaaaaataagaaagttaaacttgatctagttgcgtggtaaagttgaacatacccgccgcaaagaaattgccgcctaggcaatcaacagaaagccctgacagctttttccattgttcagttgcaggtccaaacccctcacccccctctggtccgccactcccccctcccccccgtaacccctttataagcacgggttttgtagggcgcacgaataataaacaaaacaagagggaaacaaaaacacagaggctggcaaacagagtggaatactttgcactcgcgcttctatttgtttaatatatatgtatatatatattcatatatatatgtacatatatagtattttgtagtatttccattatgtggcacatgccagttctcgagaggagttcatttcgctggcttctcgaattccggtaacttcagtttcgccagccagccactatctcaattgactaattaactaacaacacaatttttctactcttctcttacagtatgcgaaactaggagcaccatgtggcggttttagagaagcagcaaagtattattaaccacgattcgggattaggatcaggatcaggatcaggagcactacagattgaagcaatcgaattcgaggaaaacggtagtccagggacgcaagattcggaaagaggggagtatagactgagatcaaagatcggagaacgtcgttctgtgtcagaagatgaccctgaccacaacgaccactgcctcatcagccgagagccaagcgaaaatggacgtaaagggcggcgcacttcccggcgaagagaacctgcccacatccgaaatggatctgctggccaaactggaggcggccaataagctcatcgagagcgatgccaagtccctcaactctctgcattccacgcacagtcgcaagaactcggatacgagtcaaatcagtcttacgtcgagtaagtatgagttagtggatcttcaagtgaaattgccaaggcttaaatactctcacttcgattctgtataccgtatctagttttttttttttttttgtttcgggtcaaaggttatcatattattttaacgacaaaaagcgctgcgttgtcatggtctagcaaaatccacttttaaagatatcgataagggatccgccgacatgtgatagatatttcaatagtgaatagatggctaggtgactagctgacaagctgactaatattaaatccgattctgtcgaatagcgatgactaaacacattaacaaaattacaagctaaacagagatatgttctaccggggtaatatacatatatcaatattaagcagtagcaagtgattaaccaagcagaacccgatggctaattagtgtgttcgcttcaggtggaaattcggtggccgaagaggacatctggacgacgtgggccaccatcctcaatgactgggagggagcactgaaacgaaagaatccctgcgtcagtgagctggtgcgccgtggaattccacaccacttccgagcgatcgtatggcagcagctaagtggagcgtccgacggcgacaaaaaacagtatgcggagtacatcaaggcgaccagtgcctgcgagaaggtcatacggcgtgacattgcccgcacctatcccgaggtggagttcttcaaggagaaggatggacccggacaggaggccctgttcaatgtgatcaaggcatattctctgcacgatcgcgaggtcggctactgccagggctcgggattcattgtgggcctgctgctgatgcaaatgcccgaggaggaggcattcgctgtgctcgtgcagatcatgcagcagcatcggatgcggcacatgtttaagccctccatgtcggagttgggcttgtgcatgtaccagctggagaatctggtgcaggagcaaatacccgacatgcacattcacttccagcagcagggcttccagacgaccatgtacgcctccagttggttcctcaccctatacacgaccactctgaatgtcaatctaagttgtcgcatcatggacgtcttcctcagcgagggcatggagttcatctttaaggtggccttggccctgctgctcaccggcaaggatacgttgctctgcctggacatggaggccatgcttaagttcttccaaaaggagctgcccggtcgcgtggaggcggatgtcgagggcttcttcaatctagcctactccataaagctgaatactaagcgtatgaagaagatggaaaaggagtaccaggacctcaagaagaaggagcaggaggagatggccgagctgcggcgactgagacgcgagaactgcctgctgaagcagcgcaacgagctgctggaggccgagagtgccgaactggccgatcgcctggtccgtggtcaggtctcccgagctgaggaggaggaaactaggtaagcgattggaatatggagtatcaatgcatatataaactggtggttttcctctttctcatacagctatgccattcagacggagctaatgcagctgcgccgatcatacttggaggtctcgcatcagctggaaaacgccaacgaggaggtgcgcggcctgagtctacggctgcaggagaatgtgagtattgagtactgggtgaccagcccaattagcttcggcgatatgcgaccccatgtctcggtcatttgtcctgtaactaaaacggaatctgttgctaatcttctgtattcttttctattttatttgatttcttatggttgtggtgcttcaaaatatacacacacacaaattgttcgctttaatacgaaaacaaataaattcaaaataaattctaaaatcacatacagaacgtatccatcgacagcgtaagtatctcgtgagttgttcacgtaacctttgctatgtagtttgaatgtacaatacaataactctgccgttctgttgttttgcatgtttattgttttgccctaaatacataaatagaatatcgtatttgtaacaaccagtacgcccagcgagtattcaataacatttaattcggaaatcgtacttctctttaaatttatttgaattatattagttgcctaattaaaaaattataatctaggataagtacataataggattttgcacccctgtagacttttttgtatcatagctaacaacttacattctgcatgcccaaaatcactttgttttaacataaaacagctcaactaatcccattttcgattgacatttagaataactcccggcaatcgtccattgacgagctctgcatgaaggaggaggcgctgaagcagcgcgacgagatggtctcctgtttgctggaggaactggtgaaggtgcgtcagggactggccgaaagcgaggatcagatcaggaacctcaaggccaaggtcgaggagctggaggaggataagaagacgctgcgggaaacgacgccagacaattcggtggctcatctgcaggatgaactgattgctagtaaacttcgcgaggctgaggcctcactttcgctaaaggatctcaagcagagggtgcaggagctgagcagccagtggcagcgtcaattggccgagaatcagcgcagcgaaagcgaacgcaccaccaacgctgtggactctacgcccaaaaagctgttgaccaacttctttgacagctccaagagtagcgagcacacgcagaagctcgaggaggagctgatgaccacgcgcatacgcgagatggagacgcttaccgagctcaaggagctgcgacttaaggtcatggagctggagacgcaggtccaggtgtccaccaatcagctgaggcggcaggacgaggagcacaagaagctcaaggaggagctcgaaatggccgtgacccgggagaaggacatgtccaacaaggcgcgtgaacagcaacacaggttagttgcattattttcacgaagccatgtcacgttatatttatattcgatttcatctctagatactcggatctggaatctcgcatgaaggatgagctgatgaatgtgaaaatcaaattcaccgagcaaagccaaacggtggctgaactgaaacaggaaatttcccgtcttgagaccaaggtatttagccactgcatttgattacttgtttgcatttatctaaaatatttcttttactaaattatagaactcggaaatgctcgccgagggcgaactgcgcgcgaatctggatgattcggacaaggtgcgcgacctgcaggacaggctggccgacatgaaggcggaggtgagcgtgagatgatctgcaatgttcacagcatttgtcgctaatcccccactgcttttggttttggtttcggtttcggttttaagttcattcaaatgccagcagcagcagacattcaataataacacgtccacccactcattttatgtccacccatccaactgactaaaccagaggccagatcagagacacgtttccaatctggaggagcacgctgtggcctcctgtagcggattttcactataaatatgctttgtttgctagctgagcgcaagtcaaatctgtttgctatgctcacattgcaaaatatatcgatttgacttgaagttactaattgaaaaaagaaaccaaagaatttttgagtttgctgtgctttactgtacacccatttttaaattgctattcaggcattttattgtacgttttgtttttaattttcgttggctaattttaaaaacacattccgtaacccatttgctgtaagccaagataataatcttgtatttctcattgaatttctctttcacacgcaaaaaaaaaacaatgcgttgttggtcttgctccatagtatcccacgccaataaccagccccgacactgagccgtggaaatggataagctaaactaattttaacaccgcccccgaatacgaaaacacacgaaattgattgataacgaaacaaaacgatcaaaattatgaaaattacagaaagaaaaaaaagatttaaaagcaaattaccgaaacccaattagaaaatcaagaagccacaattatcctctaatcttaattgccacaaacacacacacacacacacactcaactcccgaaaacgttaaagaaattcaaatgtcaagcagcaggccaagctaccaactctacccaggtctctatgaaactgctcaaaaacaactcagtacttttaaccaattgcgtatttgtagcatttgctgttgaccctaccatcccaacgtccatagtttgttcgcacgatttgtagtcccatttccatagtttgaaaatgcatgaatgacccccccccagttaaccatttttgtattgctagttttcgtagttcattgcaagtcgatttcagtaagccatattcattcacgcataataacgtttagagctcaaaactatactttataaaataatatattattattgtaccttaatcgtgctgcatagtgtacatctctccgaattttgaaaaagaagctttctgcgagctttgagcttgtacgcgaacctttatatggaatacgttctagttccgatcgattcgatgtatatgacttatttcgacgtgggtcaatgactcctactcctaatagcattcgttttaagattgacttgacaatggtgccatgtggaagatttcggatttgattttaatcgaaagccgctgttgtttgttttgcatacttgtaatgacgtattgtaatcgttggtcttgacatgggaatgatgctgttttgacacgagttcatttcgaccttgctatggattatttttattcgattttcaattgaactgtagctagaaaattgagggagtgttctagacctatgatttatagaaatgcatattgtaatattattaattttctgcacgctcgcatgccttcttatctaacacacacactcacagcacactactaatcaataaggtatttaagacacgttccactacatggacattaaataagatttatctgtagtcggatctatgttacttgttttctaattactaggttaaagcacttaaggcggcttttcttttcagtttagtgacacgtggtattatatataaaaaaagaagtaaatatatctatgtttcaatcgccgcatgatcaaaattagcaactgctttagccttgtaatcgtattttacacgtatttatttataatttattttctttttttaacgaactaccaactaatgaatcttttcgatttactgcagctgacggcattgaaaagtcgtggcaaatttccgggcgccaaactgcgcagctcctcgatccaatcgatcgaatcgaccgagatcgacttcaatgatctgaatatggtgaggcgcggaagtacggagctctccacataacctacagatggatcagatctagcatatccaaaccaaccaacagccacaaccagtagaaaagcagcgagtgagaggaaagtacaggatacacccaaatctaaatgggtgggcaagctggaggcgatttatatatattaatatatatatacatagatggatatacatatatatgaggggcctgtgattatgaaacggaaagggaaggtggagcatcgagtggagggagaagtagaaggaagagggcagaatagttgcaatcccattacaatattagttatgtataatattcgttaaaattttactactactattacgatatatggatattttagtacgataattataaactatatttttttttttgcaataattttattactgttatgttttgcaatcgaaacacactcatatttatttattttaaatcctaattgaaacgatattgtgagagtattttacacccctgtacattaatcaatacggcaactaatccgattcgatgcgatgcgatggattggagttaggagattggcattttgatataccctagatgtatggcacatatgcaatgcaatgaattttatgtaaacccctgaggaaaaaacaaaaccatttcccaacccaggcatcctgtgaaccacttttaatgtaagttttaagcgaatccgaaattgttcttggctacaaacaaaacaaaaaaaaaaaaaaaaacgattttaatcagcacgcacacctttttaaagtgtgcggataatgcttggtttatccacttgatttgtattatgatttcatccctgtagaatgatattaacactcacaaacacacagttgtctggaatgaattttgtaactctcgtatagtaagctaaaccaatctaaatctaaaacgataactaaaataaaaccaagtgcgaaagacaaagtaacatgcgtggccaaatgcaagatgagaaactgagaaaccaatatataactattaaaaatagtttaaaacgatatg

SEQ ID NO: 24440 - DNA, 2626 bp, DROSOPHILA
agtatgcgaaactaggagcaccatgtggcggttttagagaagcagcaaagtattattaaccacgattcgggattaggatcaggatcaggatcaggagcactacagattgaagcaatcgaattcgaggaaaacggtagtccagggacgcaagattcggaaagaggggagtatagactgagatcaaagatcggagaacgtcgttctgtgtcagaagatgaccctgaccacaacgaccactgcctcatcagccgagagccaagcgaaaatggacgtaaagggcggcgcacttcccggcgaagagaacctgcccacatccgaaatggatctgctggccaaactggaggcggccaataagctcatcgagagcgatgccaagtccctcaactctctgcattccacgcacagtcgcaagaactcggatacgagtcaaatcagtcttacgtcgagtggaaattcggtggccgaagaggacatctggacgacgtgggccaccatcctcaatgactgggagggagcactgaaacgaaagaatccctgcgtcagtgagctggtgcgccgtggaattccacaccacttccgagcgatcgtatggcagcagctaagtggagcgtccgacggcgacaaaaaacagtatgcggagtacatcaaggcgaccagtgcctgcgagaaggtcatacggcgtgacattgcccgcacctatcccgaggtggagttcttcaaggagaaggatggacccggacaggaggccctgttcaatgtgatcaaggcatattctctgcacgatcgcgaggtcggctactgccagggctcgggattcattgtgggcctgctgctgatgcaaatgcccgaggaggaggcattcgctgtgctcgtgcagatcatgcagcagcatcggatgcggcacatgtttaagccctccatgtcggagttgggcttgtgcatgtaccagctggagaatctggtgcaggagcaaatacccgacatgcacattcacttccagcagcagggcttccagacgaccatgtacgcctccagttggttcctcaccctatacacgaccactctgaatgtcaatctaagttgtcgcatcatggacgtcttcctcagcgagggcatggagttcatctttaaggtggccttggccctgctgctcaccggcaaggatacgttgctctgcctggacatggaggccatgcttaagttcttccaaaaggagctgcccggtcgcgtggaggcggatgtcgagggcttcttcaatctagcctactccataaagctgaatactaagcgtatgaagaagatggaaaaggagtaccaggacctcaagaagaaggagcaggaggagatggccgagctgcggcgactgagacgcgagaactgcctgctgaagcagcgcaacgagctgctggaggccgagagtgccgaactggccgatcgcctggtccgtggtcaggtctcccgagctgaggaggaggaaactagctatgccattcagacggagctaatgcagctgcgccgatcatacttggaggtctcgcatcagctggaaaacgccaacgaggaggtgcgcggcctgagtctacggctgcaggagaataataactcccggcaatcgtccattgacgagctctgcatgaaggaggaggcgctgaagcagcgcgacgagatggtctcctgtttgctggaggaactggtgaaggtgcgtcagggactggccgaaagcgaggatcagatcaggaacctcaaggccaaggtcgaggagctggaggaggataagaagacgctgcgggaaacgacgccagacaattcggtggctcatctgcaggatgaactgattgctagtaaacttcgcgaggctgaggcctcactttcgctaaaggatctcaagcagagggtgcaggagctgagcagccagtggcagcgtcaattggccgagaatcagcgcagcgaaagcgaacgcaccaccaacgctgtggactctacgcccaaaaagctgttgaccaacttctttgacagctccaagagtagcgagcacacgcagaagctcgaggaggagctgatgaccacgcgcatacgcgagatggagacgcttaccgagctcaaggagctgcgacttaaggtcatggagctggagacgcaggtccaggtgtccaccaatcagctgaggcggcaggacgaggagcacaagaagctcaaggaggagctcgaaatggccgtgacccgggagaaggacatgtccaacaaggcgcgtgaacagcaacacagatactcggatctggaatctcgcatgaaggatgagctgatgaatgtgaaaatcaaattcaccgagcaaagccaaacggtggctgaactgaaacaggaaatttcccgtcttgagaccaagaactcggaaatgctcgccgagggcgaactgcgcgcgaatctggatgattcggacaaggtgcgcgacctgcaggacaggctggccgacatgaaggcggaggtgagcctgacggcattgaaaagtcgtggcaaatttccgggcgccaaactgcgcagctcctcgatccaatcgatcgaatcgaccgagatcgacttcaatgatctgaatatggtgaggcgcggaagtacggagctctccacataa

SEQ ID NO: 24441 - protein, 803 aa, DROSOPHILA
MTLTTTTTASSAESQAKMDVKGGALPGEENLPTSEMDLLAKLEAANKLIESDAKSLNSLHSTHSRKNSDTSQISLTSSGNSVAEEDIWTTWATILNDWEGALKRKNPCVSELVRRGIPHHFRAIVWQQLSGASDGDKKQYAEYIKATSACEKVIRRDIARTYPEVEFFKEKDGPGQEALFNVIKAYSLHDREVGYCQGSGFIVGLLLMQMPEEEAFAVLVQIMQQHRMRHMFKPSMSELGLCMYQLENLVQEQIPDMHIHFQQQGFQTTMYASSWFLTLYTTTLNVNLSCRIMDVFLSEGMEFIFKVALALLLTGKDTLLCLDMEAMLKFFQKELPGRVEADVEGFFNLAYSIKLNTKRMKKMEKEYQDLKKKEQEEMAELRRLRRENCLLKQRNELLEAESAELADRLVRGQVSRAEEEETSYAIQTELMQLRRSYLEVSHQLENANEEVRGLSLRLQENNNSRQSSIDELCMKEEALKQRDEMVSCLLEELVKVRQGLAESEDQIRNLKAKVEELEEDKKTLRETTPDNSVAHLQDELIASKLREAEASLSLKDLKQRVQELSSQWQRQLAENQRSESERTTNAVDSTPKKLLTNFFDSSKSSEHTQKLEEELMTTRIREMETLTELKELRLKVMELETQVQVSTNQLRRQDEEHKKLKEELEMAVTREKDMSNKAREQQHRYSDLESRMKDELMNVKIKFTEQSQTVAELKQEISRLETKNSEMLAEGELRANLDDSDKVRDLQDRLADMKAEVSLTALKSRGKFPGAKLRSSSIQSIESTEIDFNDLNMVRRGSTELST

SEQ ID NO: 24442 - DNA, 4258 bp, DROSOPHILA
ttagggctctgtccgtcgaccagcgtattgtcgaactggttggggtcagcgctttgctgtccagtatacagggggttgtatcgcggagagtaatccttgttgtagctaggctgatagttctgaggctgctgtcccgactgcggatccggatccggcaggttttcggaaaattggggcgtgatctggccaactaagttgagcacaagaatactcgccagaaggccgatttttgctagcatagttggtccttagctttaatagcgtgggttctggtttagatgtctcgcagcagactaaaggcacattttgctctggaattcgatagtttctgaaagcagaacgaaagaatgttcttgtttattttgcccctcttatggcataaacaaattgaatgtaaacagatttgtcgatcgcaggtcattcaaatttgtgatacgatgtgtcagcacgcgtatatacaaatgtacatatgtgtatgtgtgtgtgtatatgtgattaggcgtggtcgtaagccgcgattgatcttcgatcaactgactttttagattattcaagcacactttagttgtgtttcctattgaacaaggacagttttaactgactaaagaagggggctcaatccaagtagcccgtgctggcaaaactaattggtcgcataggcaaacacttaaccacaccttaattacgactccaggacgcagcacacgaacggttgaaaacgctaccactgcgaggtgttcctgctgacaaaaaaaaaaaccacgagttgtgcggatccggacaaaataagtatcagaggcaatttacagctttttaaattatagtttaattaaataaaaacaaaacagtccagaagctgagtcgaccagcaattagatatgcgcaagccacgactgtgggctacgctgccatcgatggtgcgatagaggcatcgatatgcatagtcgatatcccgctgtaatcgccattcgaataaatagtgtgcgcgggccatttgaaactgagttcagataacagttaacagatatatttttgtttcatacattttcacttttacacaatcactataatatacactgtaaatttgattcactgacgtgtcgcttgctgtgaacggtaagcatatgcggtcaggctaatatcaggagtatttcgaacagaagtcaacaggcaaaatgccaataaatgcaagaagggaaataaatagttgctcaatcgagcagtattgtctccgttaagctcgtaaatggcatagggcctcacagtcccttgttgaaccagacagtttccaattccggacgcttcttcctaatgctgtcgcggacctccgactccaggctatccactttgatgtccgctcgctgcttgaagaaggcgcagccaaggggcgtggcgaaaatcagcacgaagccgcagaagagcgtttggatgggagcgttggatcgcgggtatttagccaggaatcccctcttttcgaggacattcatcaacaccggtgtcagtgctgaaattgagaatagcgtaagtatcgtaagttgttacacttttgtgcgcaaggatgtccaggagacgtactcattcccggtatggccatggcgattcgacttaggattacggttgagatcccaacaacggccgccttctttgagatgcccatttcgttgctgtgttcatcgaaaagcgtcactccgttgcgcagctctctgtaaaagaggaatattatatacataattaattcactgttttacgaacggccgaagtagcgtaaattcggtaaacagctttaataaaatatgaataaattaataaaatgctggtaaaattatctctctaaaattgtagcagagctgctctaatcgaatcaggcctatttcataattttactaaaaacaaaatgtatagaggaaagagcttctttaatacaaatttaacttactgcattcgcatgcaggggatgttgatgcagttggcagctccaactgccactagggggacaaggcgacccaagagcggattcatgttcttcactgcgtggttcagggaaagggccgtgaccagggctccgctagtggccaaacagtacgaggtaactagttgcctgaacaggggacgaaatcggtgaagttagtgtcggggactgcggctggaaggaggtacctactgctggctgatgggcgaggttcccgaacggttcgtgtagttaacaatggcgttgaatgtctgattgaaccactgccagaagacgacggcgggagtgcttttgtagaaggccatcatgcctggaatgtgatttagctattattgtagtcgattaatcagcagtgcggaagcacatagtttatttgacgtcaattgagcaccgaaaaagtcgctaatacgcaccgccggtgatgattgtgttcatgggcatctgcgcagccatgcgcccgatgactatctgcttctccccggtctctggatggaacgccgaatcgtacaggtacttagcgcgccacacgtcgtcgatggtcttgcactcgggaacatccttgccttgaagtgcgaataagattagtgatctaatttggttacctactcttctttcttaccagcccggtactttatcacaatctggcgggcctcctccaacttcgaggcggaggccagcacattaagcgggttggtcagcaggaagaagtgcttggctctgcccaagtaggagttctgatcatatttcggctcgtcgatgttgactcgtgggagagggctcatgattgcctgcaaggaacgtacgtaatcagtaaaatatgtatctgcgaaaagaaatcgttctcaaagcggaattaaacgtttcgtaaactatgttttccgtcccgcccatgaaagcagctcttatcagtccgatgctttgaacctaactgagtccccttatcgctggtaaacaagtttctcccgacaacgcttcttgcgcatatatgtaggcacaagaaaactctcggtttaaatgtatgtacacacacgcccgatactaagtatatagagaggatttttaattggcagtggtcgatagccgttcccgttccattatgtattcaagagttccgaaagttatataattcgtcaatgattatgataaggggctaacaaatctgtaggtcttatcgaagactgcgtaagaagcgcacacacaaaagaacaggtagcagacaccgacgcaccgtttggttttgaagggattttccagcgggagcactttcacccacacgttgctaccaatttggaagtcaaccgacgactgagcggaagacaccgacacaggttggagctctagaaagctttccccctcttcagccggttgttggggcgggaaaagctggaatgcgagggctggaaagggcgagagagtgggagagagctttggtgcgtgcgcggtattcaacagctgggctttagtgatggttcagcatttgaagattcgggtatagacttggaaactaccctttaaaatattaaataacttttgtcggctcctttttgctttcgcctttttatcccatatgtaactgcaaatttggattcagaaatattttttttttacttttttgccacctttaaggaaacacggcctactaatggtgatttatatcaaccaattttttaaaattaatttttatactcgttactcgtagagtaaaagtgtgtactagattttttttaaactatgtggcaggtcgaagaaagcgtttccgaccatataaggtatacatattgttgaccaggatcaatactcaagtcgatctgaccctgtctgtctgcccgtccgtatgaacgtctagatcgcaggaactataaaatttagaaagatgagattaagcatgcagattctagcgacatagacgcaagatccatgtcaccacgcccacaagtcgcccaaaactgcctcgctcacacttttgcaaaaggttttgatattttttcatatttttgtgaatttttattgatttgccaaaaactttttgccatgcccactctaacgttctaaagccgccaaacctgtcaggcccacacttttgaataattttaaaatttgttcttattttatttcccaatatctattgatattccggaagaatgatgaaattttgagtttgcaaaaaaatagagtcatattcttaataagtcaaatttattcataattaataacttaaaagtcctattcgaacgcagttatttaggctgtcccagatgtttaaacttaaaaacttgatggagcttgatt

SEQ ID NO: 24443 - DNA, 1286 bp, DROSOPHILA
aaattggtagcaacgtgtgggtgaaagtgctcccgctggaaaatcccttcaaaaccaaacgatgagccctctcccacgagtcaacatcgacgagccgaaatatgatcagaactcctacttgggcagagccaagcacttcttcctgctgaccaacccgcttaatgtgctggcctccgcctcgaagttggaggaggcccgccagattgtgataaagtaccgggctggcaaggatgttcccgagtgcaagaccatcgacgacgtgtggcgcgctaagtacctgtacgattcggcgttccatccagagaccggggagaagcagatagtcatcgggcgcatggctgcgcagatgcccatgaacacaatcatcaccggcggcatgatggccttctacaaaagcactcccgccgtcgtcttctggcagtggttcaatcagacattcaacgccattgttaactacacgaaccgttcgggaacctcgcccatcagccagcagcaactagttacctcgtactgtttggccactagcggagccctggtcacggccctttccctgaaccacgcagtgaagaacatgaatccgctcttgggtcgccttgtccccctagtggcagttggagctgccaactgcatcaacatcccctgcatgcgaatgcaagagctgcgcaacggagtgacgcttttcgatgaacacagcaacgaaatgggcatctcaaagaaggcggccgttgttgggatctcaaccgtaatcctaagtcgaatcgccatggccataccgggaatgacactgacaccggtgttgatgaatgtcctcgaaaagaggggattcctggctaaatacccgcgatccaacgctcccatccaaacgctcttctgcggcttcgtgctgattttcgccacgccccttggctgcgccttcttcaagcagcgagcggacatcaaagtggatagcctggagtcggaggtccgcgacagcattaggaagaagcgtccggaattggaaactgtctggttcaacaagggactgtgaggccctatgccatttacgagcttaacggagacaatactgctcgattgagcaactatttatttcccttcttgcatttattggcattttgcctgttgacttctgttcgaaatactcctgatattagcctgaccgcatatgcttaccgttcacagcaagcgacacgtcagtgaatcaaatttacagtgtatattatagtgattgtgtaaaagtgaaaatgtatgaaacaaaaatatatctgttaactgttatctgaactcag

SEQ ID NO: 24444 - protein, 321 aa, DROSOPHILA
MSPLPRVNIDEPKYDQNSYLGRAKHFFLLTNPLNVLASASKLEEARQIVIKYRAGKDVPECKTIDDVWRAKYLYDSAFHPETGEKQIVIGRMAAQMPMNTIITGGMMAFYKSTPAVVFWQWFNQTFNAIVNYTNRSGTSPISQQQLVTSYCLATSGALVTALSLNHAVKNMNPLLGRLVPLVAVGAANCINIPCMRMQELRNGVTLFDEHSNEMGISKKAAVVGISTVILSRIAMAIPGMTLTPVLMNVLEKRGFLAKYPRSNAPIQTLFCGFVLIFATPLGCAFFKQRADIKVDSLESEVRDSIRKKRPELETVWFNKGL

SEQ ID NO: 24445 - DNA, 18675 bp, DROSOPHILA
aacgcctcgggacagccggaggaactgggccgggaacaggccgacgaccagccgcaggcggaggagcaggcggagtacagcgcgttcagcgatggcttcacttccggcctgtcctttaccagcgatgaaaagtagttggctaggtctgggcgtaggcttcaagagatctgctaaatttttagtctaaaataaatacgaagaacttctttatctcagcattatgctttaacaatccattacttggcgcccccgggtggatccatttctttcagtcgttgcaagatactaaattaaacggggggcaattgctttataaagtattttatttagcttccgtttagttcagatagagttttctttgcggcatctaacttttaaatagatcatcattataaacgtttttagcccctttgtgttctcggggttatcaatatcaattacgtagcttattaactgttttgggcggggttcggactcgagatggatgggaatggattggattggattcaattgggttgcgtctaacgtttaagccttgtgtttaattatgagtggacttcaactaacatttatatttaaatttatatgtatatataatataatatggaaataactttaacgttttgctttttggtttcattatgcgatcgaccgattctttcgctctctcgccgtctctctctctctctcgctctctcattctctctctcctcattctccctcgcttgccgtctctctctctctctcgctcgattcgtcgtcttgctccgattcaagtgctaatttaaaatatatgtttatacgtgtatatatgtgtacgtgtcgcgtgagtgggtttaacttgaaggctgcgtgtgtcctagtgggtgtggaccgtaaactgctgggagattcgccaggctgccaaggtctccgatggatccttgatcgatttgttcggtaatgcggtaagtcgttaatttaattgttcatttcgggcaggatggacagtgggttcggttcaaccctcgtggctagccaccgactctaggtcgctgttgtcctcgctgccggtggcctcggtgggttcgcccatggccacgcgtgcgtactcgtccgtatcaatgctcttacagaagtgtatggcgtacttgagcttctcaagaagtacggcctgcaaacaaatggttcgcgattaattagaatcagtgttggacgcaatcggtcgccattgtctttaccttgcacgagtagcggggcatcttgagcagaaagaagcaagtgtagctctcgggcaggaagtggtcaggcggattcttctcgagcacttgcagcacaaagtcccggccacggaagtcggcaatggtgcgcggcaatcgggtgcgaccccagacgaaccgcaggaatagagagcgctcctgaaaatgtttagtttcaattaagattgctgctgatgagaaagtatggcaccgccatatgggacgcacctgattcgtgaactcctccatcacctcccagaaccaggtgaccagcgccgagctcggatcgaagcccttataggtggccaccgacttcagcaggcccagcggaatgtccggcgagccgcagaccatcgcctgcagctccgcggcggagaagagcgagagcaaaggcactggaatcaccttggacatgccgtcccgaaccgccttcacctgctcatcgaattcgtgcagacggaatccgagcgccaggcggacatactccgcccggttcctgggcgagatgtgcgtgtagcgcgtggacagcggcacctcgtgcccacgggccgaggatgtcgagaagggcagctccagcgcggtgaacagcttcgggtcgtcatccatgttgcggatgcagagcagtccggccacgtagtcgcggtccacttcggtaagatccgtgggccgtagaacctcgcccgtcaattgacgccacacaggctccgccaaactgaaatattagaacaagggaattagtgatcggttattactatcggttatccctcaactcgacacttacttgatgctcagcggggatcctgtacgcacggcgatgcccatgaggacgccaaggaagcggaacatgttcatctggagtaccgaggacagggtggggtccagcaggaagcagtcgcgattggctcccgcctcgccgcgtccgttgggcgtgttgatcagaagcggcacgctgccgttctgaagctcgtcgcacatctcagcgatggattcgctgtatccaccgccgcagtcgtccacactctcgcccacgaacttcaccttccagacgcggtgcggcagagccagcgcctcctgggtgagcaagggcagcttctgcaccatctggccaaatacgctcttcatcccatcgatgccggccaatccgttgcaccgattgcgtgagcgctttacctggatgcgatttagctcgatgacgggtccgtgctgcttgtcccgcaccatcgtcgtttggatgaccttccggaaggcagcctccttgatgttgtacacgagcacatccttcagggcgcccagactcaagtcgccggagatgggcagcatggccaggcagggacacaccaactccgagaagtggtgcagcaggataaggcgggcgtgcagggcctcaggcgccagatcgcgcaccaggtcgtactccagcggtggattgggcagcggacgcaggcgttcgctcagctgcgatgttgatagggccagcgtgtgggcggatccgcaggtgaccttcacaatgtgcttgccctggagagcggctaccaggcgcggccgctgaatggctgtaaccgtgccgtcgcccagttgtccttcgtcgttgtcgccccaggtgtacacctcgccggagtcgctgcaagcgacgcagtgcagcgagccggtggcaattgatataatcttttttccctgcagagcggccaccttcttgggccggcggacatggtcaacggatccgtggcccaggcgatggaagtctcctttgccccaggtgtacaccgctccggatttggtgagtgccaccgagaactgcgatccgcactccaccttgaccactcccagtccggccagactctcgatcttgtacggcagcttgcagccgtcgctgccgccgcgtcccagtttgccgtagtcgccatcgccccagctccacacattgtcgtcgtcggtgatgcacagcgtctgggcatctccggagccgcaggcaatgtcgatggcccgatagccgagcagcgcctccaccaacttgggtcgcagttggtcttcggagtcgccgtgccccagtcgcccatagcgtcctttgccccaagtgagcacatggccactggccgtgatcgccgctgagtgagcactgccgcaggcaatgtccgccacgctcataccgttgaggtgctccaccagcttgggacggtcgtagctcatgcggttcccgtggcccagctttccgtcctcgccctcgccccaggcgtacacctcgccttcagtggtcagtgccaagcagtgttttccgccggagttcacagcaaccttcttgacgaacacgtgctgcagggatcccagcaaagtgggaatggcccagctgtcgctgccaccgacgcccagtcgtcctccggatccgtatcccgtggcgaatagtttgccatcgggcgtcaccgcaaacagggattgctctccgccggccaactgaactggtcgaagaaggctgagcgcctcgcacggcgttggcgtcttgatacggctgccttccagtccgccaagctgcccgcggtggttgtggccccatccgtatatggtgctggctccaccccagctgagtgcccagtcgtctggtctccggttgagccactgcagcagttgggcgtcgtgcggagcttgaaacagagtgtgatcctcgtggagcagcgtgctcgtggactccaactgatgggcatggcagtgtagatccggctgctcgcctgtaattcccggcggtggagacacattgctgaccgtgctggacgacagtgaagttgtggagttcagcatggacgctccgggcgattggcagccaggattggcattggagttcgagctcgaactgggcagcatttcggcaaacttcttgcgcacctccaggcaaaatgcccgcggcagctccgtgcgccgtattagggattgggccactcttacggcgatgcagtatcgcttgaaccaggcccacttgtgcacgtccccagtcgaggagatggcacccggtgctgctgacgacgatgatgatgatgaagtggcaggcagtgcagcatccagctgcatgtcgcacgccagcgcagccagggtcttaaagtagtccgagtgcatgagatgtatgcctccgcgcacctgtggctcctcgtactcgtactggcgcaacagctccggtatcaagggctggagcagcgtggacagcgatggatcctgtggtcgaggcgcttgctccagcaacagtacggcgtgcagtttgcgcagcgaccatatcctctgggcggtggtaagggcacccagttgtgagcaagctgccagggcggaggccaatcggagcagcacactcggttgtcgaggggcaagtcgggagtccagcagcgacatgaccagtgccatcgaaggttgcgacaacacggctcggtccgatccactctcgcccagcgtggccgccggcatgatggcgtgcacccagaagcgccagccccatccgtttaccgaactgtccgaggagaatttccagcgcaactcgtcgcccagcacacggatctccggagcccagtgggcaaactcgcggcccgaacgcatggccagcacccgaccagtgccgtccatgatcaccaggggatcgttacgcttctcggtgctgcactggctatcgaactccaggcgcaacatctccgcaccggggatgcgaaccactccggtcacgttcacgttgtccacgtaagggtggctgctctcctgcatcaccggtttgggcaacttaccaaggcagtggcgcgaggtgcacaggtcctccagttccgtgatgcacgtctcaaggagcatcgcagccaccgccggtgtcccagctcccaaagagattagggtgtcggctatggtctgggatgtgctcggtggtccacatcgtccgcaaactgccagtttaagcagctctaccagactctttgcctccggctcacccagcaagccgccgaagtcgtctaggccgtggcagtggctaatgtgggaaagcatctcctcctgctgcgtcatggtggcagccattacggacatggcgctggccgacatccgagagtgcttgtgctggggcaaggcactgctggagagcgatcccgacatagacagggatccagttaggctctgaaaggcgctcagtgggccggcgctaagcggtggcagagtgttagctccgccggacattcctccggtcagcgcatcaacagcagcctcgggactatgctcctgcagaccggcatccgtggcatcggcgggcgcctctcctccaccctgcgcaatcgtttccgccagttgcagcggtgctcccattatgggcccccctattagatgatcctcctcgcctccgacggcaccccgctccttaaagttcaccttgctgtggctggtaagtgcggcgacgatgagctggcgggcctgcaggatgctcatggcgcgcagtacgtgacccagagccgcctgccgggcggctggtgtctctagggccaggctttcgctcagactactctggttcaagggtttggcctcctgtttcagggtttgcattgtctccgcttcgtatatgcccaggctactgccgcccagggggtctcgagtgctgctgaagggcacgggtcctcgcttctcctcatccgaggatgcgttgggcagtccccaagcgatggagtgcgaactgccgcacgcaacgcgattcacaaacaccgcatccaatccgatgaccagagccggcttcttgttcacaaacgtgttgccactgccctgttgcccgtggtcgttgtcgccccaggcgtacacctggccggcatccgtgacggccaggcagtgcagggcaccgacggccacgtggatgacccgtcggccacgaagtcctccaatgggctgcggcttgcgcacgtgctgatctccaccgtggcccagacggtagtagtcgcctttgccccaagtccacacttctccggctcgcgtgagtgccaagctgaactgggcgccacattcgatctgcaccacacctatgcccgagagccgttcgatctcgtgaggggtgtcggatccctcgctgccaccgcgtccaagcttgccgaaatcaccgtcgccccacgagaacacggctccgtcctccgtgagggcaagggtttgtgcatcccgacttccgcaggccacttgaacgacccttctgcccgccaacgccgtcaccaacttgggcttcagctgtgtggtgttgtcgccgtggcccaagcggccgtactcacccagtccccaggtgtagagctcaccctggctactgatagccgccgagtgggacgagccacaggccacatcgcggatcttcttcgctcgcagcgcctccaccaatcgtggtttgtccagcgttgtccggttgccgtgaccgagcttaccatcttcgccctcgccccaggagaacacctttccatccagcgtcagggcgagcgcgtgcttgccgccggagtgcacggccaccttcttgaccacatactgacgcagcacgggcagctggtgtggtagtggcacattgtgagtcaccccgaggcccaggcgaccgtttgttccctcgccgcatgcgtaaacctttccgtcctggctaacgatgaacaggctcttggatccgcctgctatgtggatgggacgcaaacgactaatggtctgcgagaaggtgggcaccttcaccttcgagcctttcagcccgccaagctgttctttgtcgttgaggccccacaccattacggtgcatggtagatcctgctcgggcgccgctgcggcttcttcgtgggatgtgcttaccgctccggctcctgctgtcgatccaggtcccactccggcgctgtactcgctggccaggaactgtgcgttagccaagatgtgctggagatccggttgctggcggcgacctacgaacttaatgccgtgaatcttgcactggatgccgttgttctggcactgcttcaccaccacctccacccaggggtaatacgtgggcacctgctgcatgagcagcacccggctagcacccgctggcactgggatccatgtgtactcctttaggctgtcgacgcagtcgcccacgcggatctccagcagcgatggcatgtgcgagtgatcttcgggactgaccttcagggtcagactatggacaaggatgcggtcgtgcagctctaggcggatccaatgacggcaaggtccgctggaacagctctgccacggctggttactgccgttaagcagatgtttggctgccgcctcattggagcttacggtcaacgagcgaatgcatctggaccaatcctcgatgagatcgctgggcggcatctggctgcaggagtctcctaaagaaggaagtgtggcggaggtgggctgcgaggccaccagttctacttcgttgatgtgaccctgccaggcgggctggtccggaaagtccacagtgagttgtttgctgcgcactgagctcaccactccaatggccgacgatccctggcttctgcccaggcgcagcgggcacagcattccgtagcgcagcgacgacgtgcgcagccttacccgtgcacccactgcgatgggcggagggcgtggctggtgatgggtctgagcagcctccaccagctcgatatgcacaaagcacacccagtaggtgctgccgtgattacgccagtcgacttgaacgttgagatcatgaaggccttcggtgtcaacgatgagcacggtacccatatcgccttgtttgatctcttcaaagtcccgacaacagcgcaccgtcattcccgggcgaactagtccccgtacgtacaaggcgtagagatcagcagtctggaaatccttgcgagattcaaacttcaccggtggtgcgggtccactgacggccatcggttggccctctacagtgtccgatgaagtagaggacgaggttgtcgaattcgaactgggacactcattgtccgaatctgcctctggatcgtgagacgatgctgaagacgccagtggcagcgtatcctcttcgatggtgttagcacacacatctggatgttccaggatccactgcactatctgctcgggggtgggcattatctcagcttgcagcgacagttgcttgagggctagttccaccgtgcgacgagtgaatcccatttccattatctgcccaattagctgggcatcggtggccgccgcaggccacttggatttctgttccacttgctccgacggcttctgctccttccttgccacattgtagacaggcactccgtgcaccattgtcggctgaggtggcgaagaaagggcgcgaccattgggagggacaccaccaccctcgcttagctcctggtgggcctgggtagccagagattgaatgcagttgagggcggctgtggccagatccatgtaactatagcaggcctttactggggacgcctgcgtggctcgcaaaaggatgcactgtatcaacagctgaggctcctggccacttcctgaggacaactgctggtcttgctccccaggctgttgcgactccgcatcgcttcggtccggctcatctggactggcgtatatgctccctggtgctcgttgcttgaggatgcgacgcaaagcgacttggtggcgatacaacacgccgtttgtgtgcagcaccgccatctgaagttgctgggcgcggagcagagctaagtccagtcgaccatcggcgctactgggcagttcccggagttccggtgctggtccatacagtagaactgtccaagcgttaagcaacatctcgttcataggcagacggctcaagctgaatacggtgtgatccaagtgcggcatcaccgccggcagttgcaccttaacgaatcccacgccagatcccacacctccgggcgcaaggagacagcggcccttgggcgtgaagcttgcgatcaccatgtggctgccttcgtggaaacagtgtagaccgacgcgtggacgcagatcgtgtccacccatggctccgagaacacctagcacaaagacctgttcactgtccagagccgtggagtgcgattgctcggctagcagctcggcggctacgcaaagcttttgcgccaggaaggaattgatgaccgggttccaggagggcagcgtgtgcagacgccgaagtagagcgacgagctcctcggccacgctgcccgaatgcgatgcggtgagcaaaacgcgtgccttgccctcggccgtgggtagcagactggcatcgccggggcaatgtagcgcgatgcgtcccagggtggcaaacaactggtggaccaaagcgggcatccgcggttcctcctcagcgccccactgcgccagaatgagctgcagcaggcgcaggcagtggagctgtctgtacacacccgcctcgttacccgccggctgctccagcagcgatagatagtgacttaaccatcccggtgtgcttagctccaggcaaagccgtgggcaatcccctgaaaaaagcacattattgttagccacttaaactcaaatggttgttttactaccacaaaggacacataccagatatggctcgaatgaagcccaggttgagccatcccaatgcataggagatgtttgacatcgatggtttggggtatatgatggtccgaaacatgctggtcatgccacgcaaggcgtccttatccagctgagccccgtgcagtccagttcccaccgccagaatctgaaggagcttggcggcgcagtggcgtagcaatttcgatggatgcgagtcgctagtgggcgaagcttcgctcccggacacatcctctcgctcaggctccgtgggtgaggcgacgttgagagcactgtcggccagctggagatcgtactgaccctccttgcccatgcgatacgagttggtggctccggtgtaccattccacacgcacccacctggaaaagaagatcagttagttgtgatatctggaaatagaatcagcgccagaacttacccgtcctcgcccacctcactaatgatgcgaccctcgccgggtggattgccatcctggtcaccccatttccagtccgctccccgcacaattctggtgccgatcttcataagctttgccagatcggggccgctgagctgcgccttgctcgacttttgttttagcacgctgtcttcgtacaggatactcagttctccgtgcacctggccaccggtcgcgccctctccgcccgtctgcgccagcagtccaagcacggtgcccaggaggccggaattaatgaggaagcctagctcgttggggcccagctccttggccagcagcccgaacacgctcaggaggaagcgggcgcgcggcaggcgctttaggagcacataggttcctagattggtgctgtccttgccgcgggcgtggccctgctgttcttggttaaccagacgacggagctctcgcaccgcccagtcaaggacacgagattgtgccaggagtagcctggctttctggtaggcacttatcatgttcagctgaccgagtacgtgcaaggagcttccggatcctgtagatcctcctccggatgatgtggatttcaagtgcaatccaagaaatccgttcagcagactgtactgtgccgcatccagcaagccgtgcagttcaagcagttgctggacaatctgcagaccggctagcctcagttggtatcgctgcatctggcaatacatggcccgtcgtgccgtctccacgtcgcagctgtcctgcagggcaaagtccacaatgtcctgcatgagtgccgggtccagctctccctcgccatggatctggcgttcatttagtcgccttaacagagtttcctcttcttcctgctcctctagctcctgtttgggcatggactgcggttttttctcctgctcctgctgaatggaggcattaagcagatcctccggcttggccggctgtcgtgaggagcgcagctcttgaagcagccggcgcacaagcatcttaaagcgcggcgggcgctgcaagatgggcagtcggcgtaatccacgctgctggggactaatcgctggtcgcacctcgtagagcaagaagcgcaggcgctctagaattggggcacacacctccttgtaactgcggttcagttgctgccgtgtccgaaccactgaccacttggcctgatgcacaagcctaatgatttccccgagctgtcttggcggcggcacctctgtctccaatgcgtttagaaccagaccaccgaggtactggtgccggatgagcacggcgctcaagaggcgctctagctcctggacgggatgttccgtggcaaactcctgatgccacatcaagttgtgtgccttacagtatcgctcggtgagcgccagccaagcagccactgggggttccgaaacgcgggcctctgctaggccgctgatgaaagcatctgcacgcagctgcaactgggatttgcctcgacccggagccagctgctgttgcattggcaatggaggcggtagttccgtgggcgtgttacccgctgtgctgtgacaactgtggctgctgcgcgcctcgcccttttcctcgtcgaagggattgctcggctggaggagctgtagcccaccgcttagcaggcttgacttgtccagctgacgacactgcaattccgctggctgcagtgccggtccgctgcacatcagattggccaccaagccgagcaactgcgccaaggcgcattccgagctaaagtgagtcagacgactgggtccaggcgccgatgactgaataggattgaaacattcgattggtcagggaatataaaacatagattcaaatctcaccttctcttcggtgctagcctgaaccatgtacttgcccagcttgtggtgctcaaggatgtgctccatagcggttctgtgcacctgactgctcatctcggccgtaagatccttgcccaatcccgagtccaaaacgcttcgtagtgtttccgactcacagctattatacaaatgataaacgacaagtgagtctgcaattatgacgaagatagctctgcaagtttacttacttgtatccgcttaaatcgcaaacgtaaccggccagaatgatgcaacgacttccatcgagcaatagattttccatgtccgcacggcgcacatagtgcgtttcgggatcagccggcggaggaccgcctttgggtccccctcgacaaatgatgcctggccagcccatgtcgtcgccgtctcgcaattctccttccccaagcgctcgattgagtctgtcgaggacgcgaagcagtggcagaaagaggcgggcccaacgcaggccacccagacactgaggtcgatcgcgcttgaggagcaataagcccaccagcaactcgttcagcaaagcgtccgaaatatccgcctggaggacgcggccgagatggccaaccatctgaccaaaggaattttcacccggctcccgacattgcaacgccaattcgtgggccttttgtaatgtggcaacgcaggcggggattagcgcgtgcatgtattgcaacaacagcgcctcggcgccagttgtttcctcctcgggctgcgcctggtggatgtgggacagcagcaagcgctggaagcgatggagcagactcaagctaggactggtgctcggctcctggtgctgctgctcgcgctcctcctcctccttttcctgctgcttgcccagcgtgggagacagtcgggtttgggacagtgcggcattgttgctcagcagtcgcgtgatcagctgcagcaatggcaagtggactccgtcgccgcagtccgcggagcaggagctgctctccagacggatagcgtgctgcagcgccgactctaggccgccttcggccatcagggagctgactagaaggtccgtcatgaagcgatgaccagcggacgacgcctgtccgggttctgaaggcagcagcgaagtgagtgtctgggcacgctccgctgctgtgggcagcaggacactccatccgtcctaaggtaaaagatcaatgaaaagtattagtacgaagcacatgagatgtgctcaacttatgtatgtacctgcagtgcctgttgtgcggccacttgtattgtgcgtagcacttgactgccgccggccaacccgaggattcgagtcttaaggctgcagagaaggcgactgccactggctaggcccacctggcgcggttctaccccgttggcaatgagggcgagcagctgcaggcggaacagatttaggcaggccacggcgatgcactcgctctcctggttcggcgtttgtcggttgtcctggctgctgcacatgcccagcagctggtctagcagacggaatgtgggctcgcccaagtcaacgacgaagggggcgcgccgcggtacgccctggtgggagctctgcgtccacacaagactctgggcactggtacaggcgattccgctggccggaaacgtgggtaatgacacaagaatgggcgttcgcagtaaaggctcgctggacacggaggctggacagatttgctggctatcgttgcgaccccatccgaatacctccccgctgctagagagcgccaggcaatgtgccacgctcacggccacgtccacaatgcgtttgtgctgcaggaaaaaccaaaagttatgacaggatgtgaggataacggggtagctggcggtagcttacctgcaagctgctaaccagacgcggaacactgcatccttggacactgcgctccaccaactggtggcccaaacaggtggccttgccccacgtatacagctgaccctcgctgctcagggccaccgagaactgggagcccgcaaagacgcgctgcacccggggtagcgattccacaaggatcggctgcaggctgccgttgcagttgccattgcccagcttgccgtagtcaccgtcgccccaggcgaacaccagtccctcggatgtgagggccagcgagtgggcgtcgccgctgcccagggccacgtcaaccaccatgtggtcggatagggccaccaccagggtgggcaggctgcgatcgtcgctgttcccgtggcccagccgagcataggtgccgcgtccccaggtcagcaggttgccgccgcaggtgatggctgcgctgtacgagcagccgcagtagaccgactgtacacagtgctgctccagggcagcgatcttggtgggaacggctcgggcgtgggtgtcgccatgacccaggcggtgatcttcgccggtgccccaggagtaggcgttgtctgcaacgaattggaaaaaagggcatcaggtttataactcctattattctaaagttaagttaacacacacagccttcaccaaccaaaatgcttgatctgcagcagcgaggcggatagaaaccactcgacgggtaccttcgcgtgcccgacatacagaacgagcctaaaataagctataatgcacgcccatactaacgtaatccagctcagatcatactcctaggtcagactgaggctaagcgcaatatagacatcgtgctcttaagcgaaccttggagacggcagagaagaacagccgggccagcatgggacaccaggaagaggcagtacccaccaggtcgagctcacggcatagcggctgccaaggcgcggtcgctgcaggatagcgtagacagtgattcctggtgcctcgcctataagcagatgtaaccccatctgaaactggggtcctggctaatattgcagaccacaccaatgcagaccacactatgacgaccaacagaagtagcccctgcctcagatttcccgtgcgtcacagatttcgaagtcgtcgaggcaatgccttttggacggaatcttttcaacgaggcggaaaagccagaacctagtcctgttgccgaaatggaccagcacatgctgcaaacagctaccgccctctttacctactggatatagttggaaaactgtccgaacatatccttaatactcgtatagaggcaatcaccgagagcattaacgggcagttctactaagcaggaagtaggaaaaaggtggagaatatgctagtctctgtcccaagagtccctaaagtacttgggtgttatgatagaccccagactatcgttcaaggaccacgcaagttacgccagcaagatggcagcaataacagcttcttcattggctagactcatgcccaacgtcggtggatatatccggccacgaatctgctggtggcggtagcaaaggctttgctgtgacctggcttcacatcctgctcatcgaagtcataccttgactgacagtcccggtgagcgtgcaaggactgaagagcacacggaggtttttgttttagcagataggaataattatactagggattatgaatcgtgcatgccacctacggacggtaggtggtatctttagaagattttaattttcctaccgtaagttcaataataaaaaaaaatacgctgaaaagcgtgctacactttttattaaatctctggaagtcccaacattttaatataatatgtacgataaccaatataatggctgtaaaacgaactagcagtgaagacgaacagcaatgataatttttttcaatttagaaattcacttacggttgctgtcaatggccagaaagtgacgaccttcacagtggccagcgatgctgatgaacacatcgtgggcgacctcctccatgggtagcggttccgcttccggtttggccaggcgccaggtgtacagcttaccctcctggctaaggataagcatctgcgtctcgcagcaggccacctgcttaatctgaaagcggcagctaagcgtgggcacgcccgcagactctccactccagctgagcgtcggctcagcgctgaatccctgctgatccttggagagcgatggccagcccaaggcgtagatccgctgctgaggagctgaactggatgatgcggcggttgcttgtccaccgcggagcaggcagcgcggcatcagcggctgcaccatgcggtccaggtgagaaatgatcacgactgcggcgcgacgaaggtccacaatggccgcactgctcttgggtagcgagagaaagcgaaggaaggtctccgtggcactggccactggagcaggttctccgccggcgattccacctcccttggccgtggctccaatcttctggtagcgcagcaggatgcgctgcagcggggcgcccgtcttgcgtggcatgtcccgattgtcgttgcccgcacggtccttctcccatagcaacaacagcagaacgacacactcgagcgtggcggccagggtgcccttctgcacgcccagctccagcagaaggcacagcgctgtgtggcggtcgtttagtggtgcggtgcagcgattgcccatcggatcaccgagcgccaccagacgcaggaacttgatggagcgctccataacctccagccagagcgaggagacgacggctgcctcgaacagcgtggcctcaggcagttcctgcagagaagccagcgcctcgcttagcagctcgctgcacatttccgtgtcctcaccggagcgccaggcgcgtcgcaggaaggcgaagctgaagttcagtgcggcgtgggtggctacgcgtgccaagccgagagctccatgctccgcctgctgttccgccggctgtgactccactgcagcattggcggttgtggcggcaatggtggtgttggcggtggtgacactggccaccgcctgtgcgcttgtcgtggacttgcgttcccgttccctctcccttttcagggccacgaagtagcgctcgtagatgaagagttgctggcgaagatgctgggcagagagacagttgccggctgcgcgtagagctagctcctgcagctccgagatcatagaacgctggcaatccaaacgcgcctgctgcgaaggtggctggctccagagccagccgctcagaaccatgtcggtggcctggctaagatgggctgcttgctgggcggcagcttgggtggtaagctttttgatggccgtgtccgagtccagaggccgacagccgtcgcaattgcaggcggagagaggaccgcagtactccggctggcagcaggagcacttgagctgctgagcgccgcagtagtgcttgccatcgtcgcccaggtaggatagttgtccgcgggcatttaggagcggcgcggtaggcgacgagaccagctcgcagtcctggatcagatggttccacagtacggcgccgtcggcggcgttgcgcagggaggcgatgagatcggcgcgcagccacttggcgtccagaaagggcagcgggcgcaggtagagatcgggcgaatggctgggcggtgctgctgatccggaacctgatcccgatccagatcctgctgcggagcctgctcctgccgctgctccactggcacctccaccccctcctactccaactccagcggagactggtgctgcagaagcggtctggctggacccagcaccctggccactggatccggctcctccgctcgcctggcggttgaacatgtttgtgttttcgtgttgccttccctagtgctccaccgccgaagtcaggctagaaacgagctcgaccacaaccacaacaacgacaatggcatggcacagttaccccttcaaggggggtgtggtggtgggttggagcgcgggtgggggcgggggcgaaggcgggtcaatgtcgtcactggcacacacactaagcacacgcacacgcgcgcaagcacacacacaactgcaatcgggcgtccaggatcaggataattcgttgttatccttgtccgcactgctcatttcgttgttccgctcggagttagttatgacatcctgacttttccacccgcacttgaactctccgttttccgcgcttgctgctttcgggtcacaattggaagtgccagttaccagtacaatgcaatttgaaatcaaggaattattttaaaatgaaataaaattgtttgatggcaatcgatatcagggggaggtgcaaactgactgagctatcaagtaatcgatatcagggggtcgagccatcgatatgttttgcctttcgatagctcttcagtgttcttaagtcacaggcttgtgtcacggattaaaacccagtacagtggaagctggctattagaaaacgttaagccaaactcataatgagttccctaaaattctgtaaatttgtaatttttaaacattagcctaaaatgtacttgattctaaaatcatttacaatatcattcggttatattactctttcgtaacgcaaaaaaagagaacgcacataacaaattattgaatacttttattgtactattacggtcgttttattgctaaaagtattgcatttcaatttacgtgacggtgtgtacagaattaactttataaattgttgaaactcaacaaagcaatactatattctgtaatttccgaatatttctattggagctatccaatccgtatattgaaaaaatcactttcgcaaataggatgtttaggagtatacatataaagtaca

SEQ ID NO: 24446 - DNA, 14700 bp, DROSOPHILA
atgttcaaccgccaggcgagcggaggagccggatccagtggccagggtgctgggtccagccagaccgcttctgcagcaccagtctccgctggagttggagtaggagggggtggaggtgccagtggagcagcggcaggagcaggctccgcagcaggatctggatcgggatcaggttccggatcagcagcaccgcccagccattcgcccgatctctacctgcgcccgctgccctttctggacgccaagtggctgcgcgccgatctcatcgcctccctgcgcaacgccgccgacggcgccgtactgtggaaccatctgatccaggactgcgagctggtctcgtcgcctaccgcgccgctcctaaatgcccgcggacaactatcctacctgggcgacgatggcaagcactactgcggcgctcagcagctcaagtgctcctgctgccagccggagtactgcggtcctctctccgcctgcaattgcgacggctgtcggcctctggactcggacacggccatcaaaaagcttaccacccaagctgccgcccagcaagcagcccatcttagccaggccaccgacatggttctgagcggctggctctggagccagccaccttcgcagcaggcgcgtttggattgccagcgttctatgatctcggagctgcaggagctagctctacgcgcagccggcaactgtctctctgcccagcatcttcgccagcaactcttcatctacgagcgctacttcgtggccctgaaaagggagagggaacgggaacgcaagtccacgacaagcgcacaggcggtggccagtgtcaccaccgccaacaccaccattgccgccacaaccgccaatgctgcagtggagtcacagccggcggaacagcaggcggagcatggagctctcggcttggcacgcgtagccacccacgccgcactgaacttcagcttcgccttcctgcgacgcgcctggcgctccggtgaggacacggaaatgtgcagcgagctgctaagcgaggcgctggcttctctgcaggaactgcctgaggccacgctgttcgaggcagccgtcgtctcctcgctctggctggaggttatggagcgctccatcaagttcctgcgtctggtggcgctcggtgatccgatgggcaatcgctgcaccgcaccactaaacgaccgccacacagcgctgtgccttctgctggagctgggcgtgcagaagggcaccctggccgccacgctcgagtgtgtcgttctgctgttgttgctatgggagaaggaccgtgcgggcaacgacaatcgggacatgccacgcaagacgggcgccccgctgcagcgcatcctgctgcgctaccagaagattggagccacggccaagggaggtggaatcgccggcggagaacctgctccagtggccagtgccacggagaccttccttcgctttctctcgctacccaagagcagtgcggccattgtggaccttcgtcgcgccgcagtcgtgatcatttctcacctggaccgcatggtgcagccgctgatgccgcgctgcctgctccgcggtggacaagcaaccgccgcatcatccagttcagctcctcagcagcggatctacgccttgggctggccatcgctctccaaggatcagcagggattcagcgctgagccgacgctcagctggagtggagagtctgcgggcgtgcccacgcttagctgccgctttcagattaagcaggtggcctgctgcgagacgcagatgcttatccttagccaggagggtaagctgtacacctggcgcctggccaaaccggaagcggaaccgctacccatggaggaggtcgcccacgatgtgttcatcagcatcgctggccactgtgaaggtcgtcactttctggccattgacagcaaccacaacgcctactcctggggcaccggcgaagatcaccgcctgggtcatggcgacacccacgcccgagccgttcccaccaagatcgctgccctggagcagcactgtgtacagtcggtctactgcggctgctcgtacagcgcagccatcacctgcggcggcaacctgctgacctggggacgcggcacctatgctcggctgggccacgggaacagcgacgatcgcagcctgcccaccctggtggtggccctatccgaccacatggtggttgacgtggccctgggcagcggcgacgcccactcgctggccctcacatccgagggactggtgttcgcctggggcgacggtgactacggcaagctgggcaatggcaactgcaacggcagcctgcagccgatccttgtggaatcgctaccccgggtgcagcgcgtctttgcgggctcccagttctcggtggccctgagcagcgagggtcagctgtatacgtggggcaaggccacctgtttgggccaccagttggtggagcgcagtgtccaaggatgcagtgttccgcgtctggttagcagcttgcagcacaaacgcattgtggacgtggccgtgagcgtggcacattgcctggcgctctctagcagcggggaggtattcggatggggtcgcaacgatagccagcaaatctgtccagcctccgtgtccagcgagcctttactgcgaacgcccattcttgtgtcattacccacgtttccggccagcggaatcgcctgtaccagtgcccagagtcttgtgtggacgcagagctcccaccagggcgtaccgcggcgcgcccccttcgtcgttgacttgggcgagcccacattccgtctgctagaccagctgctgggcatgtgcagcagccaggacaaccgacaaacgccgaaccaggagagcgagtgcatcgccgtggcctgcctaaatctgttccgcctgcagctgctcgccctcattgccaacggggtagaaccgcgccaggtgggcctagccagtggcagtcgccttctctgcagccttaagactcgaatcctcgggttggccggcggcagtcaagtgctacgcacaatacaagtggccgcacaacaggcactgcaggacggatggagtgtcctgctgcccacagcagcggagcgtgcccagacactcacttcgctgctgccttcagaacccggacaggcgtcgtccgctggtcatcgcttcatgacggaccttctagtcagctccctgatggccgaaggcggcctagagtcggcgctgcagcacgctatccgtctggagagcagctcctgctccgcggactgcggcgacggagtccacttgccattgctgcagctgatcacgcgactgctgagcaacaatgccgcactgtcccaaacccgactgtctcccacgctgggcaagcagcaggaaaaggaggaggaggagcgcgagcagcagcaccaggagccgagcaccagtcctagcttgagtctgctccatcgcttccagcgcttgctgctgtcccacatccaccaggcgcagcccgaggaggaaacaactggcgccgaggcgctgttgttgcaatacatgcacgcgctaatccccgcctgcgttgccacattacaaaaggcccacgaattggcgttgcaatgtcgggagccgggtgaaaattcctttggtcagatggttggccatctcggccgcgtcctccaggcggatatttcggacgctttgctgaacgagttgctggtgggcttattgctcctcaagcgcgatcgacctcagtgtctgggtggcctgcgttgggcccgcctctttctgccactgcttcgcgtcctcgacagactcaatcgagcgcttggggaaggagaattgcgagacggcgacgacatgggctggccaggcatcatttgtcgagggggacccaaaggcggtcctccgccggctgatcccgaaacgcactatgtgcgccgtgcggacatggaaaatctattgctcgatggaagtcgttgcatcattctggccggttacgtttgcgatttaagcggatacaactgtgagtcggaaacactacgaagcgttttggactcgggattgggcaaggatcttacggccgagatgagcagtcaggtgcacagaaccgctatggagcacatccttgagcaccacaagctgggcaagtacatggttcaggctagcaccgaagagaagtcatcggcgcctggacccagtcgtctgactcactttagctcggaatgcgccttggcgcagttgctcggcttggtggccaatctgatgtgcagcggaccggcactgcagccagcggaattgcagtgtcgtcagctggacaagtcaagcctgctaagcggtgggctacagctcctccagccgagcaatcccttcgacgaggaaaagggcgaggcgcgcagcagccacagttgtcacagcacagcgggtaacacgcccacggaactaccgcctccattgccaatgcaacagcagctggctccgggtcgaggcaaatcccagttgcagctgcgtgcagatgctttcatcagcggcctagcagaggcccgcgtttcggaacccccagtggctgcttggctggcgctcaccgagcgatactgtaaggcacacaacttgatgtggcatcaggagtttgccacggaacatcccgtccaggagctagagcgcctcttgagcgccgtgctcatccggcaccagtacctcggtggtctggttctaaacgcattggagacagaggtgccgccgccaagacagctcggggaaatcattaggcttgtgcatcaggccaagtggtcagtggttcggacacggcagcaactgaaccgcagttacaaggaggtgtgtgccccaattctagagcgcctgcgcttcttgctctacgaggtgcgaccagcgattagtccccagcagcgtggattacgccgactgcccatcttgcagcgcccgccgcgctttaagatgcttgtgcgccggctgcttcaagagctgcgctcctcacgacagccggccaagccggaggatctgcttaatgcctccattcagcaggagcaggagaaaaaaccgcagtccatgcccaaacaggagctagaggagcaggaagaagaggaaactctgttaaggcgactaaatgaacgccagatccatggcgagggagagctggacccggcactcatgcaggacattgtggactttgccctgcaggacagctgcgacgtggagacggcacgacgggccatgtattgccagatgcagcgataccaactgaggctagccggtctgcagattgtccagcaactgcttgaactgcacggcttgctggatgcggcacagtacagtctgctgaacggatttcttggattgcacttgaaatccacatcatccggaggaggatctacaggatccggaagctccttgcacgtactcggtcagctgaacatgataagtgcctaccagaaagccaggctactcctggcacaatctcgtgtccttgactgggcggtgcgagagctccgtcgtctggttaaccaagaacagcagggccacgcccgcggcaaggacagcaccaatctaggaacctatgtgctcctaaagcgcctgccgcgcgcccgcttcctcctgagcgtgttcgggctgctggccaaggagctgggccccaacgagctaggcttcctcattaattccggcctcctgggcaccgtgcttggactgctggcgcagacgggcggagagggcgcgaccggtggccaggtgcacggagaactgagtatcctgtacgaagacagcgtgctaaaacaaaagtcgagcaaggcgcagctcagcggccccgatctggcaaagcttatgaagatcggcaccagaattgtgcggggagcggactggaaatggggtgaccaggatggcaatccacccggcgagggtcgcatcattagtgaggtgggcgaggacgggtgggtgcgtgtggaatggtacaccggagccaccaactcgtatcgcatgggcaaggagggtcagtacgatctccagctggccgacagtgctctcaacgtcgcctcacccacggagcctgagcgagaggatgtgtccgggagcgaagcttcgcccactagcgactcgcatccatcgaaattgctacgccactgcgccgccaagctccttcagattctggcggtgggaactggactgcacggggctcagctggataaggacgccttgcgtggcatgaccagcatgtttcggaccatcatataccccaaaccatcgatgtcaaacatctcctatgcattgggatggctcaacctgggcttcattcgagccatatctggggattgcccacggctttgcctggagctaagcacaccgggatggttaagtcactatctatcgctgctggagcagccggcgggtaacgaggcgggtgtgtacagacagctccactgcctgcgcctgctgcagctcattctggcgcagtggggcgctgaggaggaaccgcggatgcccgctttggtccaccagttgtttgccaccctgggacgcatcgcgctacattgccccggcgatgccagtctgctacccacggccgagggcaaggcacgcgttttgctcaccgcatcgcattcgggcagcgtggccgaggagctcgtcgctctacttcggcgtctgcacacgctgccctcctggaacccggtcatcaattccttcctggcgcaaaagctttgcgtagccgccgagctgctagccgagcaatcgcactccacggctctggacagtgaacaggtctttgtgctaggtgttctcggagccatgggtggacacgatctgcgtccacgcgtcggtctacactgtttccacgaaggcagccacatggtgatcgcaagcttcacgcccaagggccgctgtctccttgcgcccggaggtgtgggatctggcgtgggattcgttaaggtgcaactgccggcggtgatgccgcacttggatcacaccgtattcagcttgagccgtctgcctatgaacgagatgttgcttaacgcttggacagttctactgtatggaccagcaccggaactccgggaactgcccagtagcgccgatggtcgactggacttagctctgctccgcgcccagcaacttcagatggcggtgctgcacacaaacggcgtgttgtatcgccaccaagtcgctttgcgtcgcatcctcaagcaacgagcaccagggagcatatacgccagtccagatgagccggaccgaagcgatgcggagtcgcaacagcctggggagcaagaccagcagttgtcctcaggaagtggccaggagcctcagctgttgatacagtgcatccttttgcgagccacgcaggcgtccccagtaaaggcctgctatagttacatggatctggccacagccgccctcaactgcattcaatctctggctacccaggcccaccaggagctaagcgagggtggtggtgtccctcccaatggtcgcgccctttcttcgccacctcagccgacaatggtgcacggagtgcctgtctacaatgtggcaaggaaggagcagaagccgtcggagcaagtggaacagaaatccaagtggcctgcggcggccaccgatgcccagctaattgggcagataatggaaatgggattcactcgtcgcacggtggaactagccctcaagcaactgtcgctgcaagctgagataatgcccacccccgagcagatagtgcagtggatcctggaacatccagatgtgtgtgctaacaccatcgaagaggatacgctgccactggcgtcttcagcatcgtctcacgatccagaggcagattcggacaatgagtgtcccagttcgaattcgacaacctcgtcctctacttcatcggacactgtagagggccaaccgatggccgtcagtggacccgcaccaccggtgaagtttgaatctcgcaaggatttccagactgctgatctctacgccttgtacgtacggggactagttcgcccgggaatgacggtgcgctgttgtcgggactttgaagagatcaaacaaggcgatatgggtaccgtgctcatcgttgacaccgaaggccttcatgatctcaacgttcaagtcgactggcgtaatcacggcagcacctactgggtgtgctttgtgcatatcgagctggtggaggctgctcagacccatcaccagccacgccctccgcccatcgcagtgggtgcacgggtaaggctgcgcacgtcgtcgctgcgctacggaatgctgtgcccgctgcgcctgggcagaagccagggatcgtcggccattggagtggtgagctcagtgcgcagcaaacaactcactgtggactttccggaccagcccgcctggcagggtcacatcaacgaagtagaactggtggcctcgcagcccacctccgccacacttccttctttaggagactcctgcagccagatgccgcccagcgatctcatcgaggattggtccagatgcattcgctcgttgaccgtaagctccaatgaggcggcagccaaacatctgcttaacggcagtaaccagccgtggcagagctgttccagcggaccttgccgtcattggatccgcctagagctgcacgaccgcatccttgtccatagtctgaccctgaaggtcagtcccgaagatcactcgcacatgccatcgctgctggagatccgcgtgggcgactgcgtcgacagcctaaaggagtacacatggatcccagtgccagcgggtgctagccgggtgctgctcatgcagcaggtgcccacgtattacccctgggtggaggtggtggtgaagcagtgccagaacaacggcatccagtgcaagattcacggcattaagttcgtaggtcgccgccagcaaccggatctccagcacatcttggctaacgcacagttcctggccagcgagtacagcgccggagtgggacctggatcgacagcaggagccggagcggtaagcacatcccacgaagaagccgcagcggcgcccgagcaggatctaccatgcaccgtaatggtgtggggcctcaacgacaaagaacagcttggcgggctgaaaggctcgaaggtgaaggtgcccaccttctcgcagaccattagtcgtttgcgtcccatccacatagcaggcggatccaagagcctgttcatcgttagccaggacggaaaggtttacgcatgcggcgagggaacaaacggtcgcctgggcctcggggtgactcacaatgtgccactaccacaccagctgcccgtgctgcgtcagtatgtggtcaagaaggtggccgtgcactccggcggcaagcacgcgctcgccctgacgctggatggaaaggtgttctcctggggcgagggcgaagatggtaagctcggtcacggcaaccggacaacgctggacaaaccacgattggtggaggcgctgcgagcgaagaagatccgcgatgtggcctgtggctcgtcccactcggcggctatcagtagccagggtgagctctacacctggggactgggtgagtacggccgcttgggccacggcgacaacaccacacagctgaagcccaagttggtgacggcgttggcgggcagaagggtcgttcaagtggcctgcggaagtcgggatgcacaaacccttgccctcacggaggacggagccgtgttctcgtggggcgacggtgatttcggcaagcttggacgcggtggcagcgagggatccgacacccctcacgagatcgaacggctctcgggcataggtgtggtgcagatcgaatgtggcgcccagttcagcttggcactcacgcgagccggagaagtgtggacttggggcaaaggcgactactaccgtctgggccacggtggagatcagcacgtgcgcaagccgcagcccattggaggacttcgtggccgacgggtcatccacgtggccgtcggtgccctgcactgcctggccgtcacggatgccggccaggtgtacgcctggggcgacaacgaccacgggcaacagggcagtggcaacacgtttgtgaacaagaagccggctctggtcatcggattggatgcggtgtttgtgaatcgcgttgcgtgcggcagttcgcactccatcgcttggggactgcccaacgcatcctcggatgaggagaagcgaggacccgtgcccttcagcagcactcgagaccccctgggcggcagtagcctgggcatatacgaagcggagacaatgcaaaccctgaaacaggaggccaaacccttgaaccagagtagtctgagcgaaagcctggccctagagacaccagccgcccggcaggcggctctgggtcacgtactgcgcgccatgagcatcctgcaggcccgccagctcatcgtcgccgcacttaccagccacagcaaggtgaactttaaggagcggggtgccgtcggaggcgaggaggatcatctaataggggggcccataatgggagcaccgctgcaactggcggaaacgattgcgcagggtggaggagaggcgcccgccgatgccacggatgccggtctgcaggagcatagtcccgaggctgctgttgatgcgctgaccggaggaatgtccggcggagctaacactctgccaccgcttagcgccggcccactgagcgcctttcagagcctaactggatccctgtctatgtcgggatcgctctccagcagtgccttgccccagcacaagcactctcggatgtcggccagcgccatgtccgtaatggctgccaccatgacgcagcaggaggagatgctttcccacattagccactgccacggcctagacgacttcggcggcttgctgggtgagccggaggcaaagagtctggtagagctgcttaaactggcagtttgcggacgatgtggaccaccgagcacatcccagaccatagccgacaccctaatctctttgggagctgggacaccggcggtggctgcgatgctccttgagacgtgcatcacggaactggaggacctgtgcacctcgcgccactgccttggtaagttgcccaaaccggtgatgcaggagagcagccacccttacgtggacaacgtgaacgtgaccggagtggttcgcatccccggtgcggagatgttgcgcctggagttcgatagccagtgcagcaccgagaagcgtaacgatcccctggtgatcatggacggcactggtcgggtgctggccatgcgttcgggccgcgagtttgcccactgggctccggagatccgtgtgctgggcgacgagttgcgctggaaattctcctcggacagttcggtaaacggatggggctggcgcttctgggtgcacgccatcatgccggcggccacgctgggcgagagtggatcggaccgagccgtgttgtcgcaaccttcgatggcactggtcatgtcgctgctggactcccgacttgcccctcgacaaccgagtgtgctgctccgattggcctccgccctggcagcttgctcacaactgggtgcccttaccaccgcccagaggatatggtcgctgcgcaaactgcacgccgtactgttgctggagcaagcgcctcgaccacaggatccatcgctgtccacgctgctccagcccttgataccggagctgttgcgccagtacgagtacgaggagccacaggtgcgcggaggcatacatctcatgcactcggactactttaagaccctggctgcgctggcgtgcgacatgcagctggatgctgcactgcctgccacttcatcatcatcatcgtcgtcagcagcaccgggtgccatctcctcgactggggacgtgcacaagtgggcctggttcaagcgatactgcatcgccgtaagagtggcccaatccctaatacggcgcacggagctgccgcgggcattttgcctggaggtgcgcaagaagtttgccgaaatgctgcccagttcgagctcgaactccaatgccaatcctggctgccaatcgcccggagcgtccatgctgaactccacaacttcactgtcgtccagcacggtcagcaatgtgtctccaccgccgggaattacaggcgagcagccggatctacactgccatgcccatcagttggagtccacgagcacgctgctccacgaggatcacactctgtttcaagctccgcacgacgcccaactgctgcagtggctcaaccggagaccagacgactgggcactcagctggggtggagccagcaccatatacggatggggccacaaccaccgcgggcagcttggcggactggaaggcagccgtatcaagacgccaacgccgtgcgaggcgctcagccttcttcgaccagttcagttggccggcggagagcaatccctgtttgcggtgacgcccgatggcaaactattcgccacgggatacggatccggaggacgactgggcgtcggtggcagcgacagctgggccattcccactttgctgggatccctgcagcacgtgttcgtcaagaaggttgctgtgaactccggcggaaaacactgcttggcactgaccactgaaggcgaggtgtacgcctggggcgagggcgaggacggaaagctgggccacgggaaccgcatgagctacgaccgtcccaagctggtggagcacctcaacggtatgagcgtggcggacattgcctgcggcagtgctcactcagcggcgatcacggccagtggccatgtgctcacttggggcaaaggacgctatgggcgactggggcacggcgactccgaagaccaactgcgacccaagttggtggaggcgctgctcggctatcgggccatcgacattgcctgcggctccggagatgcccagacgctgtgcatcaccgacgacgacaatgtgtggagctggggcgatggcgactacggcaaactgggacgcggcggcagcgacggctgcaagctgccgtacaagatcgagagtctggccggactgggagtggtcaaggtggagtgcggatcgcagttctcggtggcactcaccaaatccggagcggtgtacacctggggcaaaggagacttccatcgcctgggccacggatccgttgaccatgtccgccggcccaagaaggtggccgctctgcagggaaaaaagattatatcaattgccaccggctcgctgcactgcgtcgcttgcagcgactccggcgaggtgtacacctggggcgacaacgacgaaggacaactgggcgacggcacggttacagccattcagcggccgcgcctggtagccgctctccagggcaagcacattgtgaaggtcacctgcggatccgcccacacgctggccctatcaacatcgcagctgagcgaacgcctgcgtccgctgcccaatccaccgctggagtacgacctggtgcgcgatctggcgcctgaggccctgcacgcccgccttatcctgctgcaccacttctcggagttggtgtgtccctgcctggccatgctgcccatctccggcgacttgagtctgggcgccctgaaggatgtgctcgtgtacaacatcaaggaggctgccttccggaaggtcatccaaacgacgatggtgcgggacaagcagcacggacccgtcatcgagctaaatcgcatccaggtaaagcgctcacgcaatcggtgcaacggattggccggcatcgatgggatgaagagcgtatttggccagatggtgcagaagctgcccttgctcacccaggaggcgctggctctgccgcaccgcgtctggaaggtgaagttcgtgggcgagagtgtggacgactgcggcggtggatacagcgaatccatcgctgagatgtgcgacgagcttcagaacggcagcgtgccgcttctgatcaacacgcccaacggacgcggcgaggcgggagccaatcgcgactgcttcctgctggaccccaccctgtcctcggtactccagatgaacatgttccgcttccttggcgtcctcatgggcatcgcccctgtgtggcgtcaattgacgggcgaggttctacggcccacggatcttaccgaagtggaccgcgactacgtggccggactgctctgcatccgcaacatggatgacgacccgaagctgttcaccgcgctggagctgcccttctcgacatcctcggcccgtgggcacgaggtgccgctgtccacgcgctacacgcacatctcgcccaggaaccgggcggagtatgtccgcctggcgctcggattccgtctgcacgaattcgatgagcaggtgaaggcggttcgggacggcatgtccaaggtgattccagtgcctttgctctcgctcttctccgccgcggagctgcaggcgatggtctgcggctcgccggacattccgctgggcctgctgaagtcggtggccacctataagggcttcgatccgagctcggcgctggtcacctggttctgggaggtgatggaggagttcacgaatcaggagcgctctctattcctgcggttcgtctggggtcgcacccgattgccgcgcaccattgccgacttccgtggccgggactttgtgctgcaagtgctcgagaagaatccgcctgaccacttcctgcccgagagctacacttgcttctttctgctcaagatgccccgctactcgtgcaaggccgtacttcttgagaagctcaagtacgccatacacttctgtaagagcattgatacggacgagtacgcacgcgtggccatgggcgaacccaccgaggccaccggcagcgaggacaacagcgacctagagtcggtggctagccacgagggttga

SEQ ID NO: 24447 - protein, 4899 aa, DROSOPHILA
MFNRQASGGAGSSGQGAGSSQTASAAPVSAGVGVGGGGGASGAAAGAGSAAGSGSGSGSGSAAPPSHSPDLYLRPLPFLDAKWLRADLIASLRNAADGAVLWNHLIQDCELVSSPTAPLLNARGQLSYLGDDGKHYCGAQQLKCSCCQPEYCGPLSACNCDGCRPLDSDTAIKKLTTQAAAQQAAHLSQATDMVLSGWLWSQPPSQQARLDCQRSMISELQELALRAAGNCLSAQHLRQQLFIYERYFVALKRERERERKSTTSAQAVASVTTANTTIAATTANAAVESQPAEQQAEHGALGLARVATHAALNFSFAFLRRAWRSGEDTEMCSELLSEALASLQELPEATLFEAAVVSSLWLEVMERSIKFLRLVALGDPMGNRCTAPLNDRHTALCLLLELGVQKGTLAATLECVVLLLLLWEKDRAGNDNRDMPRKTGAPLQRILLRYQKIGATAKGGGIAGGEPAPVASATETFLRFLSLPKSSAAIVDLRRAAVVIISHLDRMVQPLMPRCLLRGGQATAASSSSAPQQRIYALGWPSLSKDQQGFSAEPTLSWSGESAGVPTLSCRFQIKQVACCETQMLILSQEGKLYTWRLAKPEAEPLPMEEVAHDVFISIAGHCEGRHFLAIDSNHNAYSWGTGEDHRLGHGDTHARAVPTKIAALEQHCVQSVYCGCSYSAAITCGGNLLTWGRGTYARLGHGNSDDRSLPTLVVALSDHMVVDVALGSGDAHSLALTSEGLVFAWGDGDYGKLGNGNCNGSLQPILVESLPRVQRVFAGSQFSVALSSEGQLYTWGKATCLGHQLVERSVQGCSVPRLVSSLQHKRIVDVAVSVAHCLALSSSGEVFGWGRNDSQQICPASVSSEPLLRTPILVSLPTFPASGIACTSAQSLVWTQSSHQGVPRRAPFVVDLGEPTFRLLDQLLGMCSSQDNRQTPNQESECIAVACLNLFRLQLLALIANGVEPRQVGLASGSRLLCSLKTRILGLAGGSQVLRTIQVAAQQALQDGWSVLLPTAAERAQTLTSLLPSEPGQASSAGHRFMTDLLVSSLMAEGGLESALQHAIRLESSSCSADCGDGVHLPLLQLITRLLSNNAALSQTRLSPTLGKQQEKEEEEREQQHQEPSTSPSLSLLHRFQRLLLSHIHQAQPEEETTGAEALLLQYMHALIPACVATLQKAHELALQCREPGENSFGQMVGHLGRVLQADISDALLNELLVGLLLLKRDRPQCLGGLRWARLFLPLLRVLDRLNRALGEGELRDGDDMGWPGIICRGGPKGGPPPADPETHYVRRADMENLLLDGSRCIILAGYVCDLSGYNCESETLRSVLDSGLGKDLTAEMSSQVHRTAMEHILEHHKLGKYMVQASTEEKSSAPGPSRLTHFSSECALAQLLGLVANLMCSGPALQPAELQCRQLDKSSLLSGGLQLLQPSNPFDEEKGEARSSHSCHSTAGNTPTELPPPLPMQQQLAPGRGKSQLQLRADAFISGLAEARVSEPPVAAWLALTERYCKAHNLMWHQEFATEHPVQELERLLSAVLIRHQYLGGLVLNALETEVPPPRQLGEIIRLVHQAKWSVVRTRQQLNRSYKEVCAPILERLRFLLYEVRPAISPQQRGLRRLPILQRPPRFKMLVRRLLQELRSSRQPAKPEDLLNASIQQEQEKKPQSMPKQELEEQEEEETLLRRLNERQIHGEGELDPALMQDIVDFALQDSCDVETARRAMYCQMQRYQLRLAGLQIVQQLLELHGLLDAAQYSLLNGFLGLHLKSTSSGGGSTGSGSSLHVLGQLNMISAYQKARLLLAQSRVLDWAVRELRRLVNQEQQGHARGKDSTNLGTYVLLKRLPRARFLLSVFGLLAKELGPNELGFLINSGLLGTVLGLLAQTGGEGATGGQVHGELSILYEDSVLKQKSSKAQLSGPDLAKLMKIGTRIVRGADWKWGDQDGNPPGEGRIISEVGEDGWVRVEWYTGATNSYRMGKEGQYDLQLADSALNVASPTEPEREDVSGSEASPTSDSHPSKLLRHCAAKLLQILAVGTGLHGAQLDKDALRGMTSMFRTIIYPKPSMSNISYALGWLNLGFIRAISGDCPRLCLELSTPGWLSHYLSLLEQPAGNEAGVYRQLHCLRLLQLILAQWGAEEEPRMPALVHQLFATLGRIALHCPGDASLLPTAEGKARVLLTASHSGSVAEELVALLRRLHTLPSWNPVINSFLAQKLCVAAELLAEQSHSTALDSEQVFVLGVLGAMGGHDLRPRVGLHCFHEGSHMVIASFTPKGRCLLAPGGVGSGVGFVKVQLPAVMPHLDHTVFSLSRLPMNEMLLNAWTVLLYGPAPELRELPSSADGRLDLALLRAQQLQMAVLHTNGVLYRHQVALRRILKQRAPGSIYASPDEPDRSDAESQQPGEQDQQLSSGSGQEPQLLIQCILLRATQASPVKACYSYMDLATAALNCIQSLATQAHQELSEGGGVPPNGRALSSPPQPTMVHGVPVYNVARKEQKPSEQVEQKSKWPAAATDAQLIGQIMEMGFTRRTVELALKQLSLQAEIMPTPEQIVQWILEHPDVCANTIEEDTLPLASSASSHDPEADSDNECPSSNSTTSSSTSSDTVEGQPMAVSGPAPPVKFESRKDFQTADLYALYVRGLVRPGMTVRCCRDFEEIKQGDMGTVLIVDTEGLHDLNVQVDWRNHGSTYWVCFVHIELVEAAQTHHQPRPPPIAVGARVRLRTSSLRYGMLCPLRLGRSQGSSAIGVVSSVRSKQLTVDFPDQPAWQGHINEVELVASQPTSATLPSLGDSCSQMPPSDLIEDWSRCIRSLTVSSNEAAAKHLLNGSNQPWQSCSSGPCRHWIRLELHDRILVHSLTLKVSPEDHSHMPSLLEIRVGDCVDSLKEYTWIPVPAGASRVLLMQQVPTYYPWVEVVVKQCQNNGIQCKIHGIKFVGRRQQPDLQHILANAQFLASEYSAGVGPGSTAGAGAVSTSHEEAAAAPEQDLPCTVMVWGLNDKEQLGGLKGSKVKVPTFSQTISRLRPIHIAGGSKSLFIVSQDGKVYACGEGTNGRLGLGVTHNVPLPHQLPVLRQYVVKKVAVHSGGKHALALTLDGKVFSWGEGEDGKLGHGNRTTLDKPRLVEALRAKKIRDVACGSSHSAAISSQGELYTWGLGEYGRLGHGDNTTQLKPKLVTALAGRRVVQVACGSRDAQTLALTEDGAVFSWGDGDFGKLGRGGSEGSDTPHEIERLSGIGVVQIECGAQFSLALTRAGEVWTWGKGDYYRLGHGGDQHVRKPQPIGGLRGRRVIHVAVGALHCLAVTDAGQVYAWGDNDHGQQGSGNTFVNKKPALVIGLDAVFVNRVACGSSHSIAWGLPNASSDEEKRGPVPFSSTRDPLGGSSLGIYEAETMQTLKQEAKPLNQSSLSESLALETPAARQAALGHVLRAMSILQARQLIVAALTSHSKVNFKERGAVGGEEDHLIGGPIMGAPLQLAETIAQGGGEAPADATDAGLQEHSPEAAVDALTGGMSGGANTLPPLSAGPLSAFQSLTGSLSMSGSLSSSALPQHKHSRMSASAMSVMAATMTQQEEMLSHISHCHGLDDFGGLLGEPEAKSLVELLKLAVCGRCGPPSTSQTIADTLISLGAGTPAVAAMLLETCITELEDLCTSRHCLGKLPKPVMQESSHPYVDNVNVTGVVRIPGAEMLRLEFDSQCSTEKRNDPLVIMDGTGRVLAMRSGREFAHWAPEIRVLGDELRWKFSSDSSVNGWGWRFWVHAIMPAATLGESGSDRAVLSQPSMALVMSLLDSRLAPRQPSVLLRLASALAACSQLGALTTAQRIWSLRKLHAVLLLEQAPRPQDPSLSTLLQPLIPELLRQYEYEEPQVRGGIHLMHSDYFKTLAALACDMQLDAALPATSSSSSSSAAPGAISSTGDVHKWAWFKRYCIAVRVAQSLIRRTELPRAFCLEVRKKFAEMLPSSSSNSNANPGCQSPGASMLNSTTSLSSSTVSNVSPPPGITGEQPDLHCHAHQLESTSTLLHEDHTLFQAPHDAQLLQWLNRRPDDWALSWGGASTIYGWGHNHRGQLGGLEGSRIKTPTPCEALSLLRPVQLAGGEQSLFAVTPDGKLFATGYGSGGRLGVGGSDSWAIPTLLGSLQHVFVKKVAVNSGGKHCLALTTEGEVYAWGEGEDGKLGHGNRMSYDRPKLVEHLNGMSVADIACGSAHSAAITASGHVLTWGKGRYGRLGHGDSEDQLRPKLVEALLGYRAIDIACGSGDAQTLCITDDDNVWSWGDGDYGKLGRGGSDGCKLPYKIESLAGLGVVKVECGSQFSVALTKSGAVYTWGKGDFHRLGHGSVDHVRRPKKVAALQGKKIISIATGSLHCVACSDSGEVYTWGDNDEGQLGDGTVTAIQRPRLVAALQGKHIVKVTCGSAHTLALSTSQLSERLRPLPNPPLEYDLVRDLAPEALHARLILLHHFSELVCPCLAMLPISGDLSLGALKDVLVYNIKEAAFRKVIQTTMVRDKQHGPVIELNRIQVKRSRNRCNGLAGIDGMKSVFGQMVQKLPLLTQEALALPHRVWKVKFVGESVDDCGGGYSESIAEMCDELQNGSVPLLINTPNGRGEAGANRDCFLLDPTLSSVLQMNMFRFLGVLMGIAPVWRQLTGEVLRPTDLTEVDRDYVAGLLCIRNMDDDPKLFTALELPFSTSSARGHEVPLSTRYTHISPRNRAEYVRLALGFRLHEFDEQVKAVRDGMSKVIPVPLLSLFSAAELQAMVCGSPDIPLGLLKSVATYKGFDPSSALVTWFWEVMEEFTNQERSLFLRFVWGRTRLPRTIADFRGRDFVLQVLEKNPPDHFLPESYTCFFLLKMPRYSCKAVLLEKLKYAIHFCKSIDTDEYARVAMGEPTEATGSEDNSDLESVASHEG

SEQ ID NO: 24448 - DNA, 7720 bp, DROSOPHILA
gagctgatttcctccgctggttgcgcaatagaaaccaaaagttgacccacaaatggcgttagctggtttcgatgtagagtcagaaccattcaataccctgaaaagggaactcagaaaatgtggtttccagaggcgctttcaatgtatacatatataccccattgtgggttagacaaaaccacttggcgtcatgtccatcgcttcaaatgtcattttatgcccatattgggatgaccaactgccagccgcacgaccatttcgacctgctatcgagtgattcaagtggtcagccgtttttatgttcccagcctccttgagtttggctaacctggctgcgcgatctcgtgcccgtagtaatcataattttcagcttccttattggccaagacaaacgcggagacatcggaaaagtgacactcctcctttcgctttcagagatcgagcttcgctataaacgtttaatggcctcaattagcgactccatcgccgtgtattggctgccaaacgatgtgcgagctggtcattgatagctcctcatgtccatctggacacagagaaaaatgtttatgatgttggtcagtaaggcatctgtaggatagctctaacgcaacgattaacgagtgttcttcctcaagagttccattaaaaactgcggcaattcgcattgaatttccttaatattccttcggttaaatagttgaaaaactctaggccagtagtattttttgctagtgcatgcctggccctcttgaagagccccattcagcctctacttcttcacagctggtcagcgaagattaccgcatggctcttatgcaacagacgagtatgaaatttgtctgggcaggctcacaaagatgttggggctgggtctatgcacatatgggtgtatatatctacctgatgcatactggcattccagctcgtcagctgggctgtcatgcacaatttgctgagggagtttgggtacacaagatgcaggtgtactcgatgccattcaatgcagaaccagttcgataccagggggagtggatttaattatgtatgtgacgggatctgggcaaatagatggccctggacgactcgacgactgtcacatgtaatcaccggcccactgaacacgctctgatttcctaatttcaggctccatccgcacatcgctgctctccggcacgcagttcaacgtcacctggcatttggcctatgcgcacaaggtaagatggatctgctgcaatgggagcagacacgcccccttggggttcctattccatctgcgagggctaattagccgagaattcattctcgaacgattgcctcacatgcacgcagtcaaagtcaagccccgagtctcgagattcccatgtttgcggcctggctgcacgacaccgcatcacaagttctcagtcattgttttggcgcaaccatattaataattatcatccacttttccagggcggttttcgtttgcaacttttggatgccctcgatcgacctgtactggacctaacgccacatgtaaataactcggagtttgtgagcactgatgtcacgtaagtattatccgtaggatttgtaatggcatattagatgaccttcctctttatagagcccagtcttatcaagtgaagattccgaacgactttgaatgctataactgcactctgcgtctgcttcgccaggcagatgaatggaccaccagctatcgcttctggtcctgcgccgatgtagacatcaagctccgaaaggacttcaaggagacctgttcaggcaatggcaaatacttcccctcgcggtgcaagtgcgacaagaacttctatggcccgcagtgccagtacaaggatgagtgctctgccgactccgattgcggcgtccagggcaagtgcgtggaactgggtggaacctcgctgcctaagaaacaatgctactgcaactttggatggttcggtattggatgcaacaaacggtcgccctacaagagcacaagcctcgacctctcctcttattccaaaaaggagctctcacctgactaccacgtctactggaggctgcttgaagaacagaaggagattgagatggtacttaaggtcaatggtacatcttgggtcggcctgggctggagaccacgtggcatgacaccggagtgcaagaacttcccgctgatacgggacatcggagatctgaccacaacactggaagcctctgttccggaacccaagagtgaaccggagcccaagagcgaaccggaacccaagagcgaaccggaacccaagagtgaacccgaacccaagagtgaacccgaaccaaaaagcgaacctgaacctaagagcgaaccggaacctaagagcgaacctgaaccgaagagtgaaccggagcctaagagtgaacccgaacccaagagtgaaccggagcccaagagtgaaccggagcccaagagtgaaccggagcctaagagtgaacccgaacccaagagtgaaccggaacccaagagtgaaccggagcctaagagcgaaccacaaccaaagcaattagccgagcttagggccgcaccagagccacaaagtgagcctgagcccaagagcgaaccggagcccaagagcgaacctgagcccaagagcgaaccggaacccaagagcgaacctgagcccaagagtgaaccggaacccaaaagtgaaccagagcccaagagtgaaccggaacccaagagcgaaccagagccgacaagcgagcctgaaccaaagagtgcaccagaaccgaagagcgaacctgagccaacaagtgaaccggaacccacaagcaaaccggaaccaacaagcgagccggaacccaagagcgaaccggaaccgaagtctgagccggaggcccagagttcaaaatccaagagagttgctggagattttgccaaaaagggtgtctcttccgtttctacaagtgtttcatatcgcgttagcaccaagtcagatcgccaacgtcgtgaagctggtaaggatagaacatctcaatgatctccggatatccctattaatctattatctttcatttatttacagactcacccaaataccgtctaaacccctacacaccacgacatgacttcaatggaatggactgcacggacatcgtgatcggagcagcccgaggaatggccagcagagtgggtgactactacagccgtgatcgatcgactccccacaccgacgagttcttcggcggcaagtcaaacctggccttgggaacgggctttgaggagaatggcgtgaccacgataatcttccgcaaaaaactggttgcgaatgagcccaccgatcacactctagacgatgccctcacccatgtgatttgggccaagggtcaggagccggaagcatatgttcatgttccagcctctggcctggaaacgcagatagcaactgtcaaaaacttctatcagcaggatgaacttaaataccacggacaccaaatgcagcgaggcgtcacccagatcaatttcttcggtaagtaatctacaaatttcggttttaaaaagatttaaaaatggaaatattaatttcaaatttaaacatagtaaattttatcgtataagatatatttgccacttttctaacttacccatatttgaacagaaaaagaaaagtcagccacgagcacagaccgtaacgacctgggcaccaatgtgctggataacgattgttatggtcattggaagtatccgtccaactgctcgccccaggagcacacctgcgagtactacgccagttgggagacggtcggaaagggtgacgagatgcgttggcacattgaaacgtcaaacacgcagacctggacgggaataggtttcagcgatgatcagcgtatgtcgcagacggatgcgatcattggctgggtggacggacgcagtggaagacccttcctaatggacacctgggtgctgggctacgctccgccgaagctcgatgatcgccaggacatctacaacgcatcaggacgcattgagaagggtgtgaccattctggagttcaatcgcaagcgggtcagcaatgacgaacaggacttgtccttcaccgacgaccactgcctctatctattcttcccggttctgggcggtgcctttaatgtggtgaacaagaagatccgcaaacacgagcaagttcctccaatctcttctcagcgcgtctgcattaagtcctgcggcaagggtaagggatccattgagttacaaagaggactttactaattctgacctttcatagaactggagtccgtctttgtgggcaccagcactccggctccaagccgtcttgtttacgccgttgccgttaagctgatgaacctgggcgaatcctatgaggcgccgaagccgggaaccgtagagttcaacaatctggcggcaactatatcggattcattcaatggtattctaagtccgttgactggttactacaaaacagagattctcggctttgagaagtatgttttatcaatatgatacatcaagtagaagttgattaattggtctacatttctttcagggagggcagcactatggtggccaaggtccaggccatgttcgacaaggcggatgtggagaagaagcacgccttagagaccaacgaggtggataaaaccagcgaggcagcagcccagaaaaacgccgatgtgattcgttcggctttgaaggatcaggttgccaccggtcgagtgggctctctaacggtggatccacagttcttggactttgaggcattggaatgtaagatctgaagcgtgtaatacagtgcttccataacctatttttttttttttctcttgtagacaagagctcttccgagcccaatgccaaggagacactgctctccttcttcgatctttccgagacacgtttgtacatcgtcctgggactaattgcggccctggtgctcatcgctttgatccaggccttctgcaccatttggaagacatcgcgaaagagcaagaacacgaaggtaagtgatatggagataacccgatcgtaagagatcagcataagcctcttcgacacagagaaacccgatagttatggacagtaagttaaagattttccttctcggtgtcgaattggcgtctttcattcctttcttattaatctttccccattgaaaccgtgtcgttcaaagctggtttacgtaattcccgaagagtggcgcatgtaccaacagcgacagcaccagcgctactatcagccctctagcgatctataaaagactcactctacaaattaaattcagatcagatcagatcagataatatgtacgccctagacatactgccctactgcccgatccacctgtaaagcgagcatcagctacaactaccttaagcgcatttacgtgttaatccgaaccgaacccatcttgtagttagtttaagtaccggaaaccttttgatcatgtactgtatctgcgtctgcgtaggtgccgcgtttatcaaaattcaataactaaatcggtaatttgaaactctatttattttctgtggtatctgttgttgtattaacgttgtcatttaacccaccatcccgcctcactggacggtaatctcagaactgcttctctttctgcgactgttacttaacccatttctgtgtttccagttctatctaattaacatctatttgcatttctcttcatttgtgtgcgggttctcttgaccagtcagcatttgatatgtgctacgaaagatcccaacaattttggacacttggaatctttgaaaccctattctgctctctaaatcctctgctagatccctagaacacttcaccgtctattaaccatatactctgttttgaaagaatcctcctgcatcttggttttagaattttattttctgattaaacgacggcacctttgcagaacagttaaaaacccctattaattctttttcctacagtatttcattataaaatattgttgtctgcgttgtacatggtccacccaacgattcccaaattcccacaccaattgctgactggctgagtaacttgatggaaacccaccgaaatttcaactaaatcacgctaaaatctcattgtacttgcaggagaaacttattcaaaactcaccctggaaggagttcgcctccaacaccaactatgcctttgacccttatggcgaaacggaggagaagaacattacgaacagcagttcgggcaaggagaaggctcgcaaccgccatcagtcgacaacgagcagccagcagacgacacttcccatgtcccattcgcccaccagcaagtcccagatgtactacgagagtccaaacggccagggcaaaagctccaatggcaatggcagtcggggcaacggacgtgccacccaggagagcagcgtcggaggagcaccctattcccggagctcctatgcggagcgagcttattccctgccgcggcaggcgcatcagtaccagcagagcccggccagcatgcagccctcgggttactacacccacgacaggcgggccgcgcgccaaggaagccgggacagagagcgcgagcgagaaagggaggaggagcggcgccagcgccaggaccgcgatcgggactctggctacgaccggtcgcgtgacgatccgcgacaaaacggtgggtccgatacgccggacttctacttcatgccctcgcagcgcaagtattccggggaggtggtacgcgtctatgtggactacaacaaggatccgaagcactaaagctcaaaacacatccgattatttaatgttcgttttaagttctactctcactctgtttcgtccctcacaaaacaaaatattaagtatgtaagtattgaatcgttggtccattaaagatagattgcgtaaactttcaatagattttaaaataatcacaaaaattgtttgggttttccatacaacgttaggcttaaatgaattatttcaagctgacccttgtttaaaaaaacagacaattgacctcgattcgactcttatctgtgcactcttgtttccattgtgagccctctttagtttcgattttgccataacgcagttgcgctgcagcggcgtttccaggtgcggaagctttaccacaaaacgcacaacgcatgattccacacaacttagtgaattgtaaatattttgaataggcgttaatgctcttgcaacgaaaacaagaaacaaatccaagccacacaaatcacacaaaaataaaaactataaagcaagctttgcagttaggtacgtgcatacataatgttttcgcattgtcttatcgtaaatgtgcaaagaaacatagtcactgtatttaatcaaattaaatatacgcattaagtacatataaataaagttaagtacatccaaaataaactgtcgctttaaaataatggtatcagtaaccgccttggcggtgcccaaaatatgggtaagtcttttttacaaagcaaatttacattcacaaatactttgtgacattgaaagtgttcagatagatgggggaaaggcatataaagcatttattatttatcaaatggattatatgttcggctagcgcatatcgagttgatctctaaagttagttaatccttatcgtatttgcaatccattccgataacttcataacgtttgtgaaaacgtacacaccatttgaagaatcactgacgataccaaatagaactaaccaagtctttcccgagttcgttaccttcctccccagtatgtagctcccaatgaagcc

SEQ ID NO: 24449 - DNA, 3840 bp, DROSOPHILA
atgcagaaccagttcgataccagggggagctccatccgcacatcgctgctctccggcacgcagttcaacgtcacctggcatttggcctatgcgcacaagggcggttttcgtttgcaacttttggatgccctcgatcgacctgtactggacctaacgccacatgtaaataactcggagtttgtgagcactgatgtcacagcccagtcttatcaagtgaagattccgaacgactttgaatgctataactgcactctgcgtctgcttcgccaggcagatgaatggaccaccagctatcgcttctggtcctgcgccgatgtagacatcaagctccgaaaggacttcaaggagacctgttcaggcaatggcaaatacttcccctcgcggtgcaagtgcgacaagaacttctatggcccgcagtgccagtacaaggatgagtgctctgccgactccgattgcggcgtccagggcaagtgcgtggaactgggtggaacctcgctgcctaagaaacaatgctactgcaactttggatggttcggtattggatgcaacaaacggtcgccctacaagagcacaagcctcgacctctcctcttattccaaaaaggagctctcacctgactaccacgtctactggaggctgcttgaagaacagaaggagattgagatggtacttaaggtcaatggtacatcttgggtcggcctgggctggagaccacgtggcatgacaccggagtgcaagaacttcccgctgatacgggacatcggagatctgaccacaacactggaagcctctgttccggaacccaagagtgaaccggagcccaagagcgaaccggaacccaagagcgaaccggaacccaagagtgaacccgaacccaagagtgaacccgaaccaaaaagcgaacctgaacctaagagcgaaccggaacctaagagcgaacctgaaccgaagagtgaaccggagcctaagagtgaacccgaacccaagagtgaaccggagcccaagagtgaaccggagcccaagagtgaaccggagcctaagagtgaacccgaacccaagagtgaaccggaacccaagagtgaaccggagcctaagagcgaaccacaaccaaagcaattagccgagcttagggccgcaccagagccacaaagtgagcctgagcccaagagcgaaccggagcccaagagcgaacctgagcccaagagcgaaccggaacccaagagcgaacctgagcccaagagtgaaccggaacccaaaagtgaaccagagcccaagagtgaaccggaacccaagagcgaaccagagccgacaagcgagcctgaaccaaagagtgcaccagaaccgaagagcgaacctgagccaacaagtgaaccggaacccacaagcaaaccggaaccaacaagcgagccggaacccaagagcgaaccggaaccgaagtctgagccggaggcccagagttcaaaatccaagagagttgctggagattttgccaaaaagggtgtctcttccgtttctacaagtgtttcatatcgcgttagcaccaagtcagatcgccaacgtcgtgaagctgactcacccaaataccgtctaaacccctacacaccacgacatgacttcaatggaatggactgcacggacatcgtgatcggagcagcccgaggaatggccagcagagtgggtgactactacagccgtgatcgatcgactccccacaccgacgagttcttcggcggcaagtcaaacctggccttgggaacgggctttgaggagaatggcgtgaccacgataatcttccgcaaaaaactggttgcgaatgagcccaccgatcacactctagacgatgccctcacccatgtgatttgggccaagggtcaggagccggaagcatatgttcatgttccagcctctggcctggaaacgcagatagcaactgtcaaaaacttctatcagcaggatgaacttaaataccacggacaccaaatgcagcgaggcgtcacccagatcaatttcttcgaaaaagaaaagtcagccacgagcacagaccgtaacgacctgggcaccaatgtgctggataacgattgttatggtcattggaagtatccgtccaactgctcgccccaggagcacacctgcgagtactacgccagttgggagacggtcggaaagggtgacgagatgcgttggcacattgaaacgtcaaacacgcagacctggacgggaataggtttcagcgatgatcagcgtatgtcgcagacggatgcgatcattggctgggtggacggacgcagtggaagacccttcctaatggacacctgggtgctgggctacgctccgccgaagctcgatgatcgccaggacatctacaacgcatcaggacgcattgagaagggtgtgaccattctggagttcaatcgcaagcgggtcagcaatgacgaacaggacttgtccttcaccgacgaccactgcctctatctattcttcccggttctgggcggtgcctttaatgtggtgaacaagaagatccgcaaacacgagcaagttcctccaatctcttctcagcgcgtctgcattaagtcctgcggcaaggaactggagtccgtctttgtgggcaccagcactccggctccaagccgtcttgtttacgccgttgccgttaagctgatgaacctgggcgaatcctatgaggcgccgaagccgggaaccgtagagttcaacaatctggcggcaactatatcggattcattcaatggtattctaagtccgttgactggttactacaaaacagagattctcggctttgagaaggagggcagcactatggtggccaaggtccaggccatgttcgacaaggcggatgtggagaagaagcacgccttagagaccaacgaggtggataaaaccagcgaggcagcagcccagaaaaacgccgatgtgattcgttcggctttgaaggatcaggttgccaccggtcgagtgggctctctaacggtggatccacagttcttggactttgaggcattggaatacaagagctcttccgagcccaatgccaaggagacactgctctccttcttcgatctttccgagacacgtttgtacatcgtcctgggactaattgcggccctggtgctcatcgctttgatccaggccttctgcaccatttggaagacatcgcgaaagagcaagaacacgaaggagaaacttattcaaaactcaccctggaaggagttcgcctccaacaccaactatgcctttgacccttatggcgaaacggaggagaagaacattacgaacagcagttcgggcaaggagaaggctcgcaaccgccatcagtcgacaacgagcagccagcagacgacacttcccatgtcccattcgcccaccagcaagtcccagatgtactacgagagtccaaacggccagggcaaaagctccaatggcaatggcagtcggggcaacggacgtgccacccaggagagcagcgtcggaggagcaccctattcccggagctcctatgcggagcgagcttattccctgccgcggcaggcgcatcagtaccagcagagcccggccagcatgcagccctcgggttactacacccacgacaggcgggccgcgcgccaaggaagccgggacagagagcgcgagcgagaaagggaggaggagcggcgccagcgccaggaccgcgatcgggactctggctacgaccggtcgcgtgacgatccgcgacaaaacggtgggtccgatacgccggacttctacttcatgccctcgcagcgcaagtattccggggaggtggtacgcgtctatgtggactacaacaaggatccgaagcactaa

SEQ ID NO: 24450 - protein, 1279 aa, DROSOPHILA
MQNQFDTRGSSIRTSLLSGTQFNVTWHLAYAHKGGFRLQLLDALDRPVLDLTPHVNNSEFVSTDVTAQSYQVKIPNDFECYNCTLRLLRQADEWTTSYRFWSCADVDIKLRKDFKETCSGNGKYFPSRCKCDKNFYGPQCQYKDECSADSDCGVQGKCVELGGTSLPKKQCYCNFGWFGIGCNKRSPYKSTSLDLSSYSKKELSPDYHVYWRLLEEQKEIEMVLKVNGTSWVGLGWRPRGMTPECKNFPLIRDIGDLTTTLEASVPEPKSEPEPKSEPEPKSEPEPKSEPEPKSEPEPKSEPEPKSEPEPKSEPEPKSEPEPKSEPEPKSEPEPKSEPEPKSEPEPKSEPEPKSEPEPKSEPEPKSEPQPKQLAELRAAPEPQSEPEPKSEPEPKSEPEPKSEPEPKSEPEPKSEPEPKSEPEPKSEPEPKSEPEPTSEPEPKSAPEPKSEPEPTSEPEPTSKPEPTSEPEPKSEPEPKSEPEAQSSKSKRVAGDFAKKGVSSVSTSVSYRVSTKSDRQRREADSPKYRLNPYTPRHDFNGMDCTDIVIGAARGMASRVGDYYSRDRSTPHTDEFFGGKSNLALGTGFEENGVTTIIFRKKLVANEPTDHTLDDALTHVIWAKGQEPEAYVHVPASGLETQIATVKNFYQQDELKYHGHQMQRGVTQINFFEKEKSATSTDRNDLGTNVLDNDCYGHWKYPSNCSPQEHTCEYYASWETVGKGDEMRWHIETSNTQTWTGIGFSDDQRMSQTDAIIGWVDGRSGRPFLMDTWVLGYAPPKLDDRQDIYNASGRIEKGVTILEFNRKRVSNDEQDLSFTDDHCLYLFFPVLGGAFNVVNKKIRKHEQVPPISSQRVCIKSCGKELESVFVGTSTPAPSRLVYAVAVKLMNLGESYEAPKPGTVEFNNLAATISDSFNGILSPLTGYYKTEILGFEKEGSTMVAKVQAMFDKADVEKKHALETNEVDKTSEAAAQKNADVIRSALKDQVATGRVGSLTVDPQFLDFEALEYKSSSEPNAKETLLSFFDLSETRLYIVLGLIAALVLIALIQAFCTIWKTSRKSKNTKEKLIQNSPWKEFASNTNYAFDPYGETEEKNITNSSSGKEKARNRHQSTTSSQQTTLPMSHSPTSKSQMYYESPNGQGKSSNGNGSRGNGRATQESSVGGAPYSRSSYAERAYSLPRQAHQYQQSPASMQPSGYYTHDRRAARQGSRDREREREREEERRQRQDRDRDSGYDRSRDDPRQNGGSDTPDFYFMPSQRKYSGEVVRVYVDYNKDPKH

SEQ ID NO: 24451 - DNA, 2807 bp, DROSOPHILA
gcacgcacgccacctcctgcgacccgccttcgatgatcagcgggacgacgagtgcgacatcgaggtgctcagccaaatcgtctccaagctgatcacctccacgcaccggcacatccagtgcgtgcgcagcagcatcggcgtgggcagcaagatggagcagtgcctgacggtcaacgcggtacactgcgccctgctccagctgcaggagctgacggtgaagttccgtgccagccagaatgcctacctgcttcagctgaactcccgcgaggagcgctcgcagaagtacttcgacgacggcggcggcgctggcgctggagacgtcttcacaaacgtggagctgggcgagcagagcgccgagaacttcgtcgactccttcgacaactttctgcagccgccggcggagggcaagtccggcaacggctatctgttcgaggacgacgagcaggccatcgacgatcacttccaaaggccgccggccagccggatgacccaacagcagctgctgctcttcgaggaggagaacacgcgggtggcgcagcaccgcgagcaggaggtgaccaagatagtcaagtccatctacgacctgaacgacatcttcaaggacctgggccacatggtccaggagcagggcactgtgctcgaccgcatcgactacaacgtggagcagacgcagacgcgcgtctcggagggattgcgccagctgcacaaggcggaaatgtatcagcgcaagaaccgcaagatgtgcgtcattctcgtcctggcggcggtcacattcttcatgctgctgctgctcatcctgaccaagctctagttgcccacgcgcctccagtgggccgacctcattcccgtcattcgctgtgtgtgtttgtgtatattgtaaatgtttgaatacatgttattatatttattatttattgctaatgctaaaaaaaaaaccgcaactactccctctcaagtcgaactccactccagtccagtccactccagtccgctctcccaatcacatgcgctccgagaggcgcgaggcgactgcccgcaggttgccatacaccttgctgggcggcgagccgaggattaggttgcagacggcccggcgcgcaagctgaatgttctggtagctgcccaggatgtggatcttgctatcggctagcacgatgcgggtcttggtcacgttctcgatggtgaatttggtgcggccgcccttgccggcgaggcggccgatggcgcgagactggtggtcgccgcgcagcgtcttcacgtccttgatttcgaacgactcgacgaacaggtcctccagacgcagcagggccagggcgtcgtccacctcgaagccgcagagaaaggcgcgcacgaagtcggcgccgcgctgcaggttggctatgtccggcgtctcggggcccacacgcagctccacctggcgcgccttcatgttgaagcggatctgcagcttcatgtgctccaccacgggcgtaaagatcttcatccagtgctccttgagcgaggagtacctgtgtggcggcacggataccttgcgcagctcgcttctggcccgctttgccttgggcggcgccgatgctcgcgaagatcccagcacctggccctcaatgccggtcgcctcgtccacctgcatctccacgtcctgctgcccgcctccgctggctccgcgcttcgtcgctctcttcgccggctcgaatgcgtctgctctgatgttctctgcctccatggtgcaatctgttgtgcttttactgcgttgtttccaataatttctcaatccagctgctttgtctgctccacgtgctcagtgtgaccgcgctcgaatctgagatttcaaatacatctgtagctgaataccacaccactgaatttcgacgaaaataccaatgcgtatgtacaattctacactggctaaaaagtatgtagaatgtagaattccgaaatataatacgcctgaattcttgataagaaacatcattggatttgaaggctgattgaagtgcgaattcatatttgatcactcattgaattattgctgtttcaaaagtaataattcaagtacagcctaaagctataaggtgacgtcactgtcatatagaacaacacaatgtaaattctcaaaagatggcaaagggtaccgaaaggaataatggtttctgttaggcccatatatatgtatatatatactgttatatatatactgttaatatataataacagtatatatgtacatatatacttaatcttaattttggaatcatattcagataactgttaatcagctacagacgagtgggataaatataatttaaatatatcataataattttataatatatataatataattaaatataaatcatttttgcataattattaaatgcaaccctttcattttcaatcaatcaaaaggtagcctatttttgacatttggtttgctttggtccctattgaattcagttcacatctagaacccgtaccggagaaaccatttccatgtcacaacggaacttcaagatgccaaatccgaacaacgaatcccattcctatttcctccggaatattccggaagaattgcagcctcagtttacgcgtggattcaatcagtggatgggcaatcagtctacgatgactaagggtttgccatccaatacagtgaataagtctgcccagacggcatctgtcaatgatggcaacttgcaagctagcgtgatcgcaatgctggcaggaatggactcgatcttggacatggagcagcctaacagaagtccttcgcgcgaagagcacgagcgcctaaatgagctgttgttcag

SEQ ID NO: 24452 - DNA, 807 bp, DROSOPHILA
tcacactgagcacgtggagcagacaaagcagctggattgagaaattattggaaacaacgcagtaaaagcacaacagattgcaccatggaggcagagaacatcagagcagacgcattcgagccggcgaagagagcgacgaagcgcggagccagcggaggcgggcagcaggacgtggagatgcaggtggacgaggcgaccggcattgagggccaggtgctgggatcttcgcgagcatcggcgccgcccaaggcaaagcgggccagaagcgagctgcgcaaggtatccgtgccgccacacaggtactcctcgctcaaggagcactggatgaagatctttacgcccgtggtggagcacatgaagctgcagatccgcttcaacatgaaggcgcgccaggtggagctgcgtgtgggccccgagacgccggacatagccaacctgcagcgcggcgccgacttcgtgcgcgcctttctctgcggcttcgaggtggacgacgccctggccctgctgcgtctggaggacctgttcgtcgagtcgttcgaaatcaaggacgtgaagacgctgcgcggcgaccaccagtctcgcgccatcggccgcctcgccggcaagggcggccgcaccaaattcaccatcgagaacgtgaccaagacccgcatcgtgctagccgatagcaagatccacatcctgggcagctaccagaacattcagcttgcgcgccgggccgtctgcaacctaatcctcggctcgccgcccagcaaggtgtatggcaacctgcgggcagtcgcctcgcgcctctcggagcgcatgtga

SEQ ID NO: 24453 - protein, 240 aa, DROSOPHILA
MEAENIRADAFEPAKRATKRGASGGGQQDVEMQVDEATGIEGQVLGSSRASAPPKAKRARSELRKVSVPPHRYSSLKEHWMKIFTPVVEHMKLQIRFNMKARQVELRVGPETPDIANLQRGADFVRAFLCGFEVDDALALLRLEDLFVESFEIKDVKTLRGDHQSRAIGRLAGKGGRTKFTIENVTKTRIVLADSKIHILGSYQNIQLARRAVCNLILGSPPSKVYGNLRAVASRLSERM

SEQ ID NO: 24454 - DNA, 4108 bp, DROSOPHILA
cagaggcggttatcaatagccactcagtgcgagataactttaaccgagtgctgtgccccaaactacgcacctacgtgtgccccatctgcggggcatctggggactcggcgcacacgattaagtactgccccaagaagccgatcatcaccatggaggatgcgatcaaggcggaatcgttccgcctagccaagagcagttactacaagcaacagatgaaggtttagagagggcgaatccagctctggagcagaggctctggcagcttttgcagcgtttatataacatgaaatatatatacgcattccgatcaaagctgggttaaccagatagatagatagtaacgtttaaatagcgcctggcgcgttcgattttaaagagatttagagcgttatcccgtgcctatagatcttatagtatagacaacgaacgatcactcaaatccaagtcaataattcaagaatttatgtctgtttctgtgaaagggaaactaattttgttaaagaagacttacaatatcgtaatacttgttcaatcgtcgtggccgatagaaatatcttacaatccgaaagttgatgaatggaattggtctgcaactggtcgccttcatttcgtaaaatgttcgcttgcggccgaaaaatttcgatatatctacaattgatctacaatctttactaaattttgaaaaaggaacactttgaatttcgaactgtcaatcgtatcattagaatttaatctaaatttaaatcttgctaaaggaaatagcaaggaacactttcgtcgtcggctacgcattcattgtaaaattttaaattttgacattccgcactttttgatagataagcgaagagtatttttattacatgtatcgcaagtattcatttcaacacacatatctatatatatatatatatatatatatatatatatatatatatatgttatatatttattcaattttgtttaccattgatcaatttttcacacatgaaacaaccgccagcattatataatttttttatttttttaaaaaatgtgtacacatattctgaaaatgaaaaattcaatggctcgagtgccaaataaagaaatggttacaatttaaggaaacaaatgtccttcttgcgtttgaaacaactaatccttttcgccctcgcggcgtttctcgaaaagggccaggaagatgccatcggtaagatcactgtccggctggcaatacaggacgttcttgccaatattgggatagtccttgtcgcccacattgtgccacttgttgcgcaaggccttcttgcagctgagcagcttgaaggatggatttagctgaagacaacgctgcaccacctgctcgttttcctccttccacagcgaacacgtgcagtaggcaatgcgtttgacgttcggaaaggcgcccatcgcgtgcgacaggatcttaatttgcaaaccctgcagcttttgcagccgcttgtcctccttcggctcgtcgcacacggtcatgcggttttgcattccgctgccagagcaactagggtccaccaggatgtactctacgtccggaaagcgttcgggtgctgaaattcaaacgtgttacttttttaaatattcattgtgaaatatataaatataaaactcacttaggttcaaggcgtctcccaaaatgggttttacaatatcgcaaccagcatcctttgttatttcgcacagcgtattgtagcgtacgtggtcctgctccacggagtagatgcatcccttgttctgcatcacattgcatatgtgcactgtcttcataccgggagctgcgcacatatccagcacagtggccccagacggcggagcaagtagttcggcggccaaacaggtggccttgttctgcagtataaacctcttgctgtgcaccaacggatggcggacccagtagttggaccacttggcaggaaaaatgagcacaccctcaacgtgcagatcggtcatgaactcgttctccgccagcgatttgatggcagtcagaaaatccgcatagctggcgtccgcaggcagctccttgcgccgccagtcgcttttatgcaggtagtccaaggcctccgccaagctgtatagatttgtgttgatgcgcacatatcgaggattgggttctgtgtgggcaaacaaaaagacgagttcaaaattgtagccaaagtaagatttattaagagttgttaagagtcgttactggtcctttaaacgatcgaaataatctggacttggctggcagcacttaagttactgttctttctttggctccgcagcttccggctcgtcgtcctcatcctgctgcacgggttccaagggtggtgggggcttctcgcggaaagcctttaatacatacatggccaccacgaggttaacaaccacaacagccgtgagaactgaccaacagttgaccgtgaaaaggtccaaatgggggaaggactcctgcagccagctgcggacgccatagaagcccaagaagggcagcgtgaacatgagcacactgtaggccaacagccagaggaagacctccgcactggtgtcctcctgctgcgtatgatgctccacgggagaatcaatgacagccggggaatcatcagtggtagctggcaccacatcgacatgctgttgtttcctgttcttcttgcccatctcagccggctaatactggtaatcggtgtgataacctgccttttcgctggacaccgaaatctctgatggaatttagcagtcgatccttgtaacttcgcaccgtttgcacgggtttgctttcgccgttcagctccttcctgccaaacagcagttcggtgactagaatcttggccaaactgggatcaaaactgggattgtccctgagcagtcctgtctcttcgatggccttttccagtgccacacgattttcgctaaattttttcagaaccgtatgcaaagagcgtgtacgctacaagtgaagtgcgagagggaaaagttatacgcatattggtttgatctgcggacgagaggtccaatccacttacggcatgcttctctgcaaatattagggtcttgatgcacttctgctgctccagtgccgccttcaaaatcttggcagtcgccctgtattgggtgggaacttttatggaatgcggttttttactcattgtcgtcacgtgcacgtgtatgtgttgtttgcgctagaataggtgcaaccccaatcacgactttatcgatatatgcttatcgaatgtcagggctggagataagcatgtggcgtttgaaacaaatcatattgttattcatgttttgaaaatatctacaattaatgtaaaggttgttctaattttgccaacgataactacaaaacatatatgttctatccaatatatttacatacagggtatcaaatttacaaataaattggcagtgtggccatacgttgcgagcaaaaattactgtacttcaagcattgccaacacaagaatattttcatggttaaaaattttggcgcgataaagccgcagtttaaaatgtcaaagtgtgcgcgttcttggaggtttaccaaaatttagaatcatgcttttatttatcgtgcataagttggtaaattggaattaaatcaagttttttccaatttgtttctggtgtgtcgtttgttttggggtctgtacggctgctttaattaaaaaatattaaaatgaagcacgctattctttaaggactttaaggaaacgtacctttctatgtttgcccaggagttgatagacgatatcaaggctgaggatcgcatcctacaatgtccttggtgcgaagaacagacgttgagtccatcagccagcacccggaaacttttgtattggcttttaacgctttcaattcgactttcagaaaagagtctcctcgaaaatcacgactgatatccatgtaaatgaatcggtagatacttgcactttctttttagttattaaaactgacacactgtcactttgcaggttttaaccgctggcggaaatgaagaaggaatccgggaatattcatttcagtccattgtggtgcacagcggaactcccctcaggaacaatcttagcccactaaacatcaataaactactaaaataactttgactgctgct

SEQ ID NO: 24455 - DNA, 1694 bp, DROSOPHILA
cacccaatacagggcgactgccaagattttgaaggcggcactggagcagcagaagtgcatcaagaccctaatatttgcagagaagcatgcccgtacacgctctttgcatacggttctgaaaaaatttagcgaaaatcgtgtggcactggaaaaggccatcgaagagacaggactgctcagggacaatcccagttttgatcccagtttggccaagattctagtcaccgaactgctgtttggcaggaaggagctgaacggcgaaagcaaacccgtgcaaacggtgcgaagttacaaggatcgactgctaaattccatcagagatttcggtgtccagcgaaaaggcaggttatcacaccgattaccagtattagccggctgagatgggcaagaagaacaggaaacaacagcatgtcgatgtggtgccagctaccactgatgattccccggctgtcattgattctcccgtggagcatcatacgcagcaggaggacaccagtgcggaggtcttcctctggctgttggcctacagtgtgctcatgttcacgctgcccttcttgggcttctatggcgtccgcagctggctgcaggagtccttcccccatttggaccttttcacggtcaactgttggtcagttctcacggctgttgtggttgttaacctcgtggtggccatgcttggcggaggccttggactacctgcataaaagcgactggcggcgcaaggagctgcctgcggacgccagctatgcggattttctgactgccatcaaatcgctggcggagaacgagttcatgaccgatctgcacgttgagggtgtgctcatttttcctgccaagtggtccaactactgggtccgccatccgttggtgcacagcaagaggtttatactgcagaacaaggccacctgtttggccgccgaactacttgctccgccgtctggggccactgtgctggatatgtgcgcagctcccggtatgaagacagtgcacatatgcaatgtgatgcagaacaagggatgcatctactccgtggagcaggaccacgtacgctacaatacgctgtgcgaaataacaaaggatgctggttgcgatattgtaaaacccattttgggagacgccttgaacctaacacccgaacgctttccggacgtagagtacatcctggtggaccctagttgctctggcagcggaatgcaaaaccgcatgaccgtgtgcgacgagccgaaggaggacaagcggctgcaaaagctgcagggtttgcaaattaagatcctgtcgcacgcgatgggcgcctttccgaacgtcaaacgcattgcctactgcacgtgttcgctgtggaaggaggaaaacgagcaggtggtgcagcgttgtcttcagctaaatccatccttcaagctgctcagctgcaagaaggccttgcgcaacaagtggcacaatgtgggcgacaaggactatcccaatattggcaagaacgtcctgtattgccagccggacagtgatcttaccgatggcatcttcctggcccttttcgagaaacgccgcgagggcgaaaaggattagttgtttcaaacgcaagaaggacatttgtttccttaaattgtaaccatttctttatttggcactcgagccattgaatttttcattttcagaatatgtgtacacattttttaaaaaaataaaaaaattatataatg

SEQ ID NO: 24456 - protein, 383 aa, DROSOPHILA
MSMWCQLPLMIPRLSLILPWSIIRSRRTPVRRSSSGCWPTVCSCSRCPSWASMASAAGCRSPSPIWTFSRSTVGQFSRLLWLLTSWWPCLAEALDYLHKSDWRRKELPADASYADFLTAIKSLAENEFMTDLHVEGVLIFPAKWSNYWVRHPLVHSKRFILQNKATCLAAELLAPPSGATVLDMCAAPGMKTVHICNVMQNKGCIYSVEQDHVRYNTLCEITKDAGCDIVKPILGDALNLTPERFPDVEYILVDPSCSGSGMQNRMTVCDEPKEDKRLQKLQGLQIKILSHAMGAFPNVKRIAYCTCSLWKEENEQVVQRCLQLNPSFKLLSCKKALRNKWHNVGDKDYPNIGKNVLYCQPDSDLTDGIFLALFEKRREGEKD

SEQ ID NO: 24457 - DNA, 3067 bp, DROSOPHILA
actgtttacggctgagttatttcaaaaatgttttgcatatcagattgagtctctgcatcttggcatggtggcatgcggcatggtggtatggtggctcggggcggcacttaaacgccttcgttttaatttaataagagcttgccaggcgaactgatgctgattcaactggtaactggtaactgaaatggtaactggtagctgctctgcatcccaaatgagcgcggaggaaaacagagtccgcggatatccaccaccacctccaccgccaccgccaactttggctgcaagtctctggactctgctgcatgtcaaatttgaatttagctgcatttttacaactgttgcaaagtcgctttcagttcccagtcttcggttgaagctccctggctctccgctccggatctgcatctggaatccgccggtggcggtggaggaaatcgcatgtgagccaactcagacagttggcaatttgcataaatttagattagtgacatctgacgtgagtctctgatatgcagagctggcgcgagcagggaagcggcattaagtgcggctcttggagatggcggcgattgccacctcctaattctccgaccagataagacccatcctgtgcccctccctttccgcccatccatccattcgagactgccagcgacaatggaatatgatttatggagtgcactcgagattgggcatcgagcaagcaggccgagaggctgcgtgaaattcaacagctcaagtggaaaattaatcgcatgcaagctcattatgagcattagttgacggtttgttaattgtcgccaagcgggaagcgcaggataacagcagcaggcggctcctcctttggcttgaggaggacaggaagtcaacttgagctgcatgcgaaattggctgcaatatttcaatcaagcttgagccgacagacgctcacctaattgcaattagaaaatggtaaaactttaatctgtatataaaaaaaacaactgatagtcggcatttaggcagcaacattcgtttcaaacgggcgcaggaatatgtggggttttatgctggaatccgagtactcgtgtcccttggaccaatcgtagcccagagcatacgcaaagagcttgccatcgccactgatggcgcacttagtgatcggctgaggatgaaccttgctttccagcagcttggaacgcatctggctgtcccagaagcagaacactccatccgatcccaccgtggcaatgtgctgcgtcaccatgttgaccttcacttcgttcaccgcatagacgtctaggatgccggaattctcccgtcgatggcacctgattggaaaactgaccgtacgatgagccatgctctgatcgaacaccatgccattcgtcttggcaataagccagctggtcagatctctattctggtggagcgccaccgatcgcacttgggtgttgctctcgcccggactcttcatgcgcccctgctccacgggtccgccacgcagagtgtaggccaggatggaccgatcgccgcaggccaccaccgccacgtcgttgagcacatcggcggcatagctacgatccggtagctccatcctggtgagttctatggcagcacgcgggtcccagaactgtatggggaagaaacaagcttttatccggatgtataataagctataatacccaccctaatggacttgtcccatgaggttgtggccaaataggggcccacccaatggcaggtgcgtgcagctcttgcgtgaagtcccacctttctcagctggttcgattctaagtcccactcagtcacctggccgctggagtcgctcaggtataccttgttgcctgagtcgttccaagtgacatcgaatggcgtgccctccagcgaattcatgaccttgggcaccagcctgtccgcttgcacctcccaaatgcgcacggtgttatcccaacttccggcacagattgcgttccaggaactcgatcgcggtgaaaactccagcgctgatatggtgtcatttggcggattgggtagttcgtaatcctgttgctgcgtttgctttggctggccgaattgattcatgactggaggagtagttgtacaactccggtccacgattaccagcttggtttcgataacattactatgtagtatatttgtaaatctcagaatcggtgctccgcttttcgatttcgtaagaatttttcgatttttaaaacgggcacttttctctggccgaaatgaaaagtaaatgactttttttatataaaaaaaatagtttatccagtgatctattgatgtttattccacatcaccacaagatcattctgccacttcccccacctcattttggcatacaccattttgccgttggcaacaaaaatggttgattttcgataggtacgacgccaaaagttatcgcgagggttgccatactgttgatgaaacgaaacaggcaggtaaaaatacatataaaacataaaagaattcattaattaatttaatggagggccaaaagtgttgttcgtaagtaatactacttaatttaattacttaaacggttaaagtacagtgaaaaagtaattgcgagcatcggaattacaactgtgaaaaggatggcagctctattgtctaaaaacagctttaacagctgtttactaaacattccgattgcaaaaagttaaaaaaccagagaacctaaaaacgaaatcggaagattttgctcaaatcgaaatcgaaaaaaaaaaattacgattaccggagctcttaatgctttctactaaccgacttctgtacaagttgaatcatatgcagtgggtggcttgggtggatttgtgtgacgatcgagaaacgccggtggccgccgaaacaattcgcctgccaatatgccagcgagaattccaataaaatgaacagcaaaccaaacatttgcccctccccttttgacgactatcgacgtttggcgaggggaatcccagcgaacgtgcaaatattttaactaaaatggcgagtgcgagttacttttatctgctttggcgtaaaaatacgaatcggtatttgtgtctgtgtggcaacaaccttg

SEQ ID NO: 24458 - DNA, 1011 bp, DROSOPHILA
atgaatcaattcggccagccaaagcaaacgcagcaacaggattacgaactacccaatccgccaaatgacaccatatcagcgctggagttttcaccgcgatcgagttcctggaacgcaatctgtgccggaagttgggataacaccgtgcgcatttgggaggtgcaagcggacaggctggtgcccaaggtcatgaattcgctggagggcacgccattcgatgtcacttggaacgactcaggcaacaaggtatacctgagcgactccagcggccaggtgactgagtgggacttagaatcgaaccagctgagaaaggtgggacttcacgcaagagctgcacgcacctgccattgggtgggcccctatttggccacaacctcatgggacaagtccattaggttctgggacccgcgtgctgccatagaactcaccaggatggagctaccggatcgtagctatgccgccgatgtgctcaacgacgtggcggtggtggcctgcggcgatcggtccatcctggcctacactctgcgtggcggacccgtggagcaggggcgcatgaagagtccgggcgagagcaacacccaagtgcgatcggtggcgctccaccagaatagagatctgaccagctggcttattgccaagacgaatggcatggtgttcgatcagagcatggctcatcgtacggtcagttttccaatcaggtgccatcgacgggagaattccggcatcctagacgtctatgcggtgaacgaagtgaaggtcaacatggtgacgcagcacattgccacggtgggatcggatggagtgttctgcttctgggacagccagatgcgttccaagctgctggaaagcaaggttcatcctcagccgatcactaagtgcgccatcagtggcgatggcaagctctttgcgtatgctctgggctacgattggtccaagggacacgagtactcggattccagcataaaaccccacatattcctgcgcccgtttgaaacgaatgttgctgcctaa

SEQ ID NO: 24459 - protein, 336 aa, DROSOPHILA
MNQFGQPKQTQQQDYELPNPPNDTISALEFSPRSSSWNAICAGSWDNTVRIWEVQADRLVPKVMNSLEGTPFDVTWNDSGNKVYLSDSSGQVTEWDLESNQLRKVGLHARAARTCHWVGPYLATTSWDKSIRFWDPRAAIELTRMELPDRSYAADVLNDVAVVACGDRSILAYTLRGGPVEQGRMKSPGESNTQVRSVALHQNRDLTSWLIAKTNGMVFDQSMAHRTVSFPIRCHRRENSGILDVYAVNEVKVNMVTQHIATVGSDGVFCFWDSQMRSKLLESKVHPQPITKCAISGDGKLFAYALGYDWSKGHEYSDSSIKPHIFLRPFETNVAA

SEQ ID NO: 24460 - DNA, 8861 bp, DROSOPHILA
tccccaccgctcttcttgctcctctcgcatgcgccaccggaatgccgtgaacccattagctggtgtagttttttgtgtacctcatctggctggattggcgatcggctgtaagcagccgaaatttatgcgtcatgcgggccttgcgatgtgtgtccaagatccgtggctgatcaccgccatcatcatcatgtaaattccaatcggtagccaccgtacaaaacagcaggcacgtacaggccatagatagtgtgaagttaatgatcgacccaatccatttagatacgatctttggcgatagaactcgattgattctcgatttgagctactttccgaaagttgagtggagtcgtgacaggttctcaggctgccttggcactgattcattcgatttgcatgagttctacgaattactcagactccatgaaacttgatagtctatatattggttgtattttaagcattgcatattaaacacaaccgctacatactttggagatacgtttattgaaatacatttgattaagaaataaaatttattacacaacaatacagaaatatttaaaccatattgaattctttacttttaatttactcactttcatacatagtgtatctcctccagaagcaatgttttatgggatctccctcttttaaatttgcctaaaataaatcttcgttcccttcgtggtgtgttctattttcggtttatacccggctgattaatgatgatcacccatgatgactgaccaaatttgtatttaattcttggcgctccgcacgactccgtcaagcgacaattaattacgaatgcgtcaatttccttaaagctctaatggttttccaaacaacaagcctgattgcatacgaagggatcccctcaagcgcaagctcccacgatccattaattgaaatgtgtgttttgcaccggaacgtgacaaagtggcaaagttgttttagctgggtgtttccttccctgatatcgctatcaatcaaccggcaaatgctttccgatctttgcagcaaactcggcctggacttggtgcccagagagggaccactggcggtggatccacatggcattggcatcgtgaagctctacaatgtccacgtgagcagtgctgataacgccaaggcctcctcggtataaatagtaatggaatccaatgggattgttgtaatagctcttgatttaacaacccacagagtcggggaactttgaggcggaagacgcagcgcaagatactcacccaccacctgtacttttgcatgcgcgattttggccatcggatcggtggcgatgatgcggaggtctacttcttcctctatgatgggagtcacatgcgaccgctgtccgaacggtttctggtcaaaatctccaaggatggtttctccaattacattgaaaggttgcacagcaactgcacggtgttcactgacttgggtatgggagttatcatatcaatatgttgtatgatctaaaccatttcacattttcaggtgccgctgatctaaatgaggaacttcacctggtggccgtggtcatgcgcgtgggcaagatcattcagtcggactcaattaagaagatcgagaagagtggcacgttgggtcacggtccaacctttcgtcgaccatttggagtgggtgttctctcgctgggcgacattgcacacttcgatagcagtctggagcagtcctccgatgagcgggagtataactttaagctgttccagtgcgaggagaaggactttcacctgctgcccgaactgattatcaagaaatcgagcgggaagtactcgcccatccaagcgagtcagggaactcagggcattgttgtgtctctaaaactcctgcacggtgggctgggtcaggctcggcaggagcagccgatgctcttccagggctctacgataaccaggaagatgggcttcccggatgtcatcatgcccggagatgtccgcaacgatctcttcctcaatctggagcgcggtgaatttgagcgcggcggaaagaatacgggaaagaatatcctcgttacggttgtggtgctcgatgtggcgggtaatgttcttaccgactgcctttggggtgcctccggcatggaatcccagccgcagtaccggtccatgatcctataccaccagaatgctcccagttggaatgagatgctgcgcctcagtgtgccgatcgacaagttttcaacggctcatgtgcggtttgagttccgacactgttcgacgagggataagacggaaccgaagctattcgccttcagctttgccagactaatggacaccggaggtgctactctgggcgacggcctgcacgagttgtatgtgtacaagtgcgaggatcctgcaaagcttcaggtagctaactatctgcggttgcagtgtagaccccgcgatgcacaggccaaaatggattgtggcggttgcttcagtcgcagttccaaagaagtgttcgttctgcgctccctgctctgctccacgaagctgacccagaacgctgaccttctctcgctgctgcagtggcgcacatatcccgaaacgatccaggactcgctgacgggagtccttcggctcaacgatgaagagctggtcaagttcctgcaggacgtgctggacgccctgtttgccatgttctccaatgaggagggtaacagcacccagcactcgggcctggtcttccatgtcctagtgagcatcttcagcctgttgcagagcaacaagttccaacattttcggccggtgatgaacgagtacatcgagaatcactttgcggctgctttggtttacaaaggactcatcacctcagtggagcacatggccgtgttcatgaccaaggcagagcaccccgacccattccagaagtgcttcggttccctggagtacatattcaagttgctaatccagtcgaggaaactgtttgccagggcaacaggtgggcagtatgaggactcgttcaagcgggacctacactccctttttacggccctgaatggaatgctagctgtgccctcgtacgatgtcatcatccccacccaggaggccctgcttaattcgacgggagtggtcctggagcaattgaaggacacactccccgctccggagttgggcatgctggcgcgcaatatgctggacgccattccccggggagctcccattcggttaattcaggcaaaattgcatgctgtcaaggatctggtgtctggggagctgttccacgaggatggtatgttacattagttgaaagtaatatccttattgcctaatttacaacacaatttcagattcccgcactgtggttctctcggtggcctgcaagcatctgcgcatgcatctaagtcgccgcgatgaactgcgtctgtgtgctgaaattctctcggagattcttagccaactgtacgatttacagaaggagcagcgcgagaaggtgaccaacaccttacagcacgatctggactctctgtgcaaaaatatactgggcattctgattcgtactataagcataataatggagggatccaatgcagtgctgccgcagttggtttcctgtctcttgggcttgctgcagctgctcgacgagacccactacaagcgctactgggacgagctgagtcccaacaaagatccgcgggatctgaaggagttcctgagcaaatcactgctggtgtacgaagaactgttgacacaggactggcatgtgttccccaacgattggctggtaatgaagcttgccgccaacgatgtgctgcgcatgtcgctggaggagttcgccaagcctctggtctaccgattcttgggtccccaggcattcgattcgcagctctggtggagctacttcagtctggctgttgccttcttgacacagccctccctgcagttggagcaatatagggagcccaagagactgaagatactccactcgcatggagacatgcgggtgctcatgggcttccagatactcagcatgtggtcgcagctgggtgagcagaagctgcactttattccatctatggtgggtccattcctggaggtcactttggtaccggagccagctttgcggaaggccacactatcggtcttttacgacatgatgcagtgcgagcaggtgggttgctgggactttatcgtttcaaccatgggtaattaatgtaaatctgcacaagcaggctgctcgtggttcgttccgcctggtggagagcgaactgattgacaagctggacctgctcatcagcgagaacaagggcgacgacgagtacagggagctgttcagcaccatgtaagttgcaaaacatgctttacggcaatatgttgtacataaatgtttgtaaatgtctgtaaatatacatatatgactcacttcacactcattgcaatcgccatccataaaaagggaacatctcagcttggtgtaagtttaacttagtgcaattttttccttgccttaaatgtagttcattccgctagttcatttgttgtatattttatttgtttgtaaaccttaccctttggcggtgtttaaggcgtaaagtaataccagttattgtatgctattagtttgctggagaaagtccaagtggagaaccccaactggaaggaggctggcatcgctttcatagcctcagtcaccagacttttggagcgccttctggactatcgtagcgtaatgcagggcgaggaaaatcgggataagcgcatgacctgcacagtcaatctccttaatttctataaaaacgaaatcaatcgaaaggagatgtatctgaggtgagtctaggagtagctaataagtttgttccagcttttaatttcatttttaatcctgcagatacatttacaagctgcacaacctgcacctgcaggcagagaattacacagaggctggcttcactctgaaactgtatgcatccatgctgagttgggatcgtgagacccagagctttgcccccttcgataatagtggtcagccagagtggcagcgcaaggagcgtctataccacgaggttaaccatcatccctaccgtacatggaatgtgcacttaaccttaattatgtcttgcagatcctaaaatacttcgacaagggaaaatgttgggaaaagggcattccactgtgcaaggagctggctcatttatacgaaacgcggcgttttgactataacaagttgagtgaaatactcattcaggaggccaagttcttccagaatatcctaactcagttgcgaccggagccggaatacttccgtgtgggattctacggaatgggtctgccactttttgtgcgggtatgtgaagatttttcgaaatctcattaattaaatttacttatggctatacacttttatactatagaacaagcaatttgtgtaccgtggactggagtacgagagaataggagccttcacacagcgtctgcaaacggagtttcctagtgctcagatcttgggcaacaacagtccgccggacaacgccattctgaatgctccggatcagtacatacagatcagcaatgtaagacctgttggggatgcacaggccttgaagaccgcaatggttcctgtgccggagaaaatagctcgtttctacgaggtcaacgatgtaacccgattcatctacgatcgccccatgtacaagggaacagttgacaaggacaatgagttcaagtcgttgtggatagaacgcactattctagagatagctagtccactgccaggtattctacgctggtatgaggtcaaacagaagacgatgcaggagttaacgccggtagagtacgcttgcgagattatcagcaacgctggcaaggaattatccgagctgattgtgcaatataagcgcgatcccaagaggaatattaatcccttctccatgcgtctgcagggcacaatcgatgctaatgtcatggggggtataagcaagtaccaggaggctttcttctccgagcagttcctcaagtcgccgcaaggtgctggacagcaggcaaatgtgcagcggctgaaggttctgatactggagcagattcagatattggagcaggccctcgaactgcacggtcagctagcgcccagtggtgtccagcctctgcacaatcgtcttttggaacgcttttcccagcttaagcaaagtttatccggcatgggcagactgaaacgtcagcactccgagagcattgtaaatactcccttgccaccgttgcctacagagcagcgagtagccccggcgacagcttcctcaagcttgaatgcgaatgcccactccaactatgtatatgatctagatgagatctacacgagaccgggagacactgtacgacccgtggacccactcagctcctatcaaacactgagcaaggagagtcttagtattcctctggaggatactgctgctcctccagtaccaaatcgtcctcgctcgcagaactttattggaaacggatccatggacagcccggaggttccgccgaaacgacagcctacattgaattctcccaatgctcctccgctgcctccgcggggtattacaccggacaagagggcgtcaaatccgttgattttcaatgacttcggctccggagatgccgtgggacgtcggcattctcagcagcagcagcagcatggccagaagtattccgttgttgatattagctacgatgatccagaggcagatcagcagccgcattcgctgccgccaaacttccaggacggaagcggtggacacctcagcgtctgttttgccccgaatgatttccgggactccggcatatcgacgactagttctagggaactgaaccacatgaatcttaacaacctgagcgaagactcatcgtcgatctcgaccattacagtgcagcatcgagaacactgtcgcatcagcagcaatggcagtttggactataatgccgcagcatcaatgaacattacacaacgagagagttcgacgagttcgtttgatgtggaggactttccagtgccgccgccgcccattccacccaaatccttggcagtgtcaagcaacggtgtcaacttttcactcgacgaggcccactcaccgcatcccagcacacaagcgaacaccacacaactcaatcacattcagaacccaaatcagaatcattccacaaacagtcaccatcatcttcagcagcagcagaatggagatggcgatggttatagcacgctgcagcacccgatgaacgggctggggctgcctacccttccaccaccaccttctgctgttgaatcgccaatgccggcatctgcaatagcctcatccacatctagtcatcagcacgatggcggcactttttgagttacaatatgtcgctgccatcatccacccgatcagccacatcagccacacaagccatcctcatccacgtcaacctcggacagcacggccacggatacggcttcggaatccacggaatccagttcgtctacccattcgatgacgccgccaccgcctcccccaccgccgccatcgtccttcacgcacttgcaccatcagatggcagcaacaactcactattgccaggattgtctgtcctcgccatcgccaccacccacaatcatcacagagcaggcacaagtgcatcccactccgggctcgacctcagcacagccccacatcgagcactgctcttgtggattgagtttctccgtggttcaggatcagcaggagcagtttcccaggctactctccaccagattttcaacgctggagcggcagaccgatggttttcaggtggagcaggtgtctggctgccagcatcatcatcatcaccagcatagcccgttgtatcatcttcctcaaagcagtcaggatgcacatgctcagacggatttttcctacgcgcagcgctgaaagaaatatctatagaaaaagtgaggggtcctggagacccacagagagtgagattaaatttcgctaagtttttaaccattattgtttacttttgtttttagaaatgctcttaatggaactcacgttcttttgaactatttttactcaaattatttttggtgccaaatttttgctgcaagtccaaagcgcaatataaacaaatgttgtaatgatataggttgcatatacaattttattaattttaatattattttattttatatataatttttcacggggaattgtcgctaaagttactaagaagaatgtttagataagaaaataaagatgaaatgatttttatattgaaagaggatatcaaatactgaaaccaaaattcagaacgctaatcaaaaacgatcaacgcaaaatatatacactgaaaacaaagcaggacaccgacaaaatgtgcaatgcagtttttactttaacgaatatagccatatacacaaaaatagacatatacgccactactacatatttatatgcgaacggcaattaggaattttaaagtgctactagcttcataacgaatcatataagttttccatttttgtaaatttttaaataaacatatttatatagagtcttcatacatgtatgtatctgaatatactataaagcgcgcattaatcaaaagcgttgaactcgtatttaaacaactaatcataaactacaactagtcaaccactcgaataaacattaattattacgaaaggaaatatatacatattgtctataaatgcatggcgccaatataagaatttactaaagaatttaataaagtataacaagtaaattgaaaagtttagcatattctaatattttaaaatgtggggttttatttagccagagctgccaacttgggccacctgacgtacaggcaaaaaagcacgccacctggcggtgatatttccaagcgaaaataaattaaaaaacgttgcgagtgcttttcatttgc

SEQ ID NO: 24461 - DNA, 6048 bp, DROSOPHILA
atgctttccgatctttgcagcaaactcggcctggacttggtgcccagagagggaccactggcggtggatccacatggcattggcatcgtgaagctctacaatgtccacgtgagcagtgctgataacgccaaggcctcctcgagtcggggaactttgaggcggaagacgcagcgcaagatactcacccaccacctgtacttttgcatgcgcgattttggccatcggatcggtggcgatgatgcggaggtctacttcttcctctatgatgggagtcacatgcgaccgctgtccgaacggtttctggtcaaaatctccaaggatggtttctccaattacattgaaaggttgcacagcaactgcacggtgttcactgacttgggtgccgctgatctaaatgaggaacttcacctggtggccgtggtcatgcgcgtgggcaagatcattcagtcggactcaattaagaagatcgagaagagtggcacgttgggtcacggtccaacctttcgtcgaccatttggagtgggtgttctctcgctgggcgacattgcacacttcgatagcagtctggagcagtcctccgatgagcgggagtataactttaagctgttccagtgcgaggagaaggactttcacctgctgcccgaactgattatcaagaaatcgagcgggaagtactcgcccatccaagcgagtcagggaactcagggcattgttgtgtctctaaaactcctgcacggtgggctgggtcaggctcggcaggagcagccgatgctcttccagggctctacgataaccaggaagatgggcttcccggatgtcatcatgcccggagatgtccgcaacgatctcttcctcaatctggagcgcggtgaatttgagcgcggcggaaagaatacgggaaagaatatcctcgttacggttgtggtgctcgatgtggcgggtaatgttcttaccgactgcctttggggtgcctccggcatggaatcccagccgcagtaccggtccatgatcctataccaccagaatgctcccagttggaatgagatgctgcgcctcagtgtgccgatcgacaagttttcaacggctcatgtgcggtttgagttccgacactgttcgacgagggataagacggaaccgaagctattcgccttcagctttgccagactaatggacaccggaggtgctactctgggcgacggcctgcacgagttgtatgtgtacaagtgcgaggatcctgcaaagcttcaggtagctaactatctgcggttgcagtgtagaccccgcgatgcacaggccaaaatggattgtggcggttgcttcagtcgcagttccaaagaagtgttcgttctgcgctccctgctctgctccacgaagctgacccagaacgctgaccttctctcgctgctgcagtggcgcacatatcccgaaacgatccaggactcgctgacgggagtccttcggctcaacgatgaagagctggtcaagttcctgcaggacgtgctggacgccctgtttgccatgttctccaatgaggagggtaacagcacccagcactcgggcctggtcttccatgtcctagtgagcatcttcagcctgttgcagagcaacaagttccaacattttcggccggtgatgaacgagtacatcgagaatcactttgcggctgctttggtttacaaaggactcatcacctcagtggagcacatggccgtgttcatgaccaaggcagagcaccccgacccattccagaagtgcttcggttccctggagtacatattcaagttgctaatccagtcgaggaaactgtttgccagggcaacaggtgggcagtatgaggactcgttcaagcgggacctacactccctttttacggccctgaatggaatgctagctgtgccctcgtacgatgtcatcatccccacccaggaggccctgcttaattcgacgggagtggtcctggagcaattgaaggacacactccccgctccggagttgggcatgctggcgcgcaatatgctggacgccattccccggggagctcccattcggttaattcaggcaaaattgcatgctgtcaaggatctggtgtctggggagctgttccacgaggatgattcccgcactgtggttctctcggtggcctgcaagcatctgcgcatgcatctaagtcgccgcgatgaactgcgtctgtgtgctgaaattctctcggagattcttagccaactgtacgatttacagaaggagcagcgcgagaaggtgaccaacaccttacagcacgatctggactctctgtgcaaaaatatactgggcattctgattcgtactataagcataataatggagggatccaatgcagtgctgccgcagttggtttcctgtctcttgggcttgctgcagctgctcgacgagacccactacaagcgctactgggacgagctgagtcccaacaaagatccgcgggatctgaaggagttcctgagcaaatcactgctggtgtacgaagaactgttgacacaggactggcatgtgttccccaacgattggctggtaatgaagcttgccgccaacgatgtgctgcgcatgtcgctggaggagttcgccaagcctctggtctaccgattcttgggtccccaggcattcgattcgcagctctggtggagctacttcagtctggctgttgccttcttgacacagccctccctgcagttggagcaatatagggagcccaagagactgaagatactccactcgcatggagacatgcgggtgctcatgggcttccagatactcagcatgtggtcgcagctgggtgagcagaagctgcactttattccatctatggtgggtccattcctggaggtcactttggtaccggagccagctttgcggaaggccacactatcggtcttttacgacatgatgcagtgcgagcaggctgctcgtggttcgttccgcctggtggagagcgaactgattgacaagctggacctgctcatcagcgagaacaagggcgacgacgagtacagggagctgttcagcaccattttgctggagaaagtccaagtggagaaccccaactggaaggaggctggcatcgctttcatagcctcagtcaccagacttttggagcgccttctggactatcgtagcgtaatgcagggcgaggaaaatcgggataagcgcatgacctgcacagtcaatctccttaatttctataaaaacgaaatcaatcgaaaggagatgtatctgagatacatttacaagctgcacaacctgcacctgcaggcagagaattacacagaggctggcttcactctgaaactgtatgcatccatgctgagttgggatcgtgagacccagagctttgcccccttcgataatagtggtcagccagagtggcagcgcaaggagcgtctataccacgagatcctaaaatacttcgacaagggaaaatgttgggaaaagggcattccactgtgcaaggagctggctcatttatacgaaacgcggcgttttgactataacaagttgagtgaaatactcattcaggaggccaagttcttccagaatatcctaactcagttgcgaccggagccggaatacttccgtgtgggattctacggaatgggtctgccactttttgtgcggaacaagcaatttgtgtaccgtggactggagtacgagagaataggagccttcacacagcgtctgcaaacggagtttcctagtgctcagatcttgggcaacaacagtccgccggacaacgccattctgaatgctccggatcagtacatacagatcagcaatgtaagacctgttggggatgcacaggccttgaagaccgcaatggttcctgtgccggagaaaatagctcgtttctacgaggtcaacgatgtaacccgattcatctacgatcgccccatgtacaagggaacagttgacaaggacaatgagttcaagtcgttgtggatagaacgcactattctagagatagctagtccactgccaggtattctacgctggtatgaggtcaaacagaagacgatgcaggagttaacgccggtagagtacgcttgcgagattatcagcaacgctggcaaggaattatccgagctgattgtgcaatataagcgcgatcccaagaggaatattaatcccttctccatgcgtctgcagggcacaatcgatgctaatgtcatggggggtataagcaagtaccaggaggctttcttctccgagcagttcctcaagtcgccgcaaggtgctggacagcaggcaaatgtgcagcggctgaaggttctgatactggagcagattcagatattggagcaggccctcgaactgcacggtcagctagcgcccagtggtgtccagcctctgcacaatcgtcttttggaacgcttttcccagcttaagcaaagtttatccggcatgggcagactgaaacgtcagcactccgagagcattgtaaatactcccttgccaccgttgcctacagagcagcgagtagccccggcgacagcttcctcaagcttgaatgcgaatgcccactccaactatgtatatgatctagatgagatctacacgagaccgggagacactgtacgacccgtggacccactcagctcctatcaaacactgagcaaggagagtcttagtattcctctggaggatactgctgctcctccagtaccaaatcgtcctcgctcgcagaactttattggaaacggatccatggacagcccggaggttccgccgaaacgacagcctacattgaattctcccaatgctcctccgctgcctccgcggggtattacaccggacaagagggcgtcaaatccgttgattttcaatgacttcggctccggagatgccgtgggacgtcggcattctcagcagcagcagcagcatggccagaagtattccgttgttgatattagctacgatgatccagaggcagatcagcagccgcattcgctgccgccaaacttccaggacggaagcggtggacacctcagcgtctgttttgccccgaatgatttccgggactccggcatatcgacgactagttctagggaactgaaccacatgaatcttaacaacctgagcgaagactcatcgtcgatctcgaccattacagtgcagcatcgagaacactgtcgcatcagcagcaatggcagtttggactataatgccgcagcatcaatgaacattacacaacgagagagttcgacgagttcgtttgatgtggaggactttccagtgccgccgccgcccattccacccaaatccttggcagtgtcaagcaacggtgtcaacttttcactcgacgaggcccactcaccgcatcccagcacacaagcgaacaccacacaactcaatcacattcagaacccaaatcagaatcattccacaaacagtcaccatcatcttcagcagcagcagaatggagatggcgatggttatagcacgctgcagcacccgatgaacgggctggggctgcctacccttccaccaccaccttctgctccacatcagccacacaagccatcctcatccacgtcaacctcggacagcacggccacggatacggcttcggaatccacggaatccagttcgtctacccattcgatgacgccgccaccgcctcccccaccgccgccatcgtccttcacgcacttgcaccatcagatggcagcaacaactcactattgccaggattgtctgtcctcgccatcgccaccacccacaatcatcacagagcaggcacaagtgcatcccactccgggctcgacctcagcacagccccacatcgagcactgctcttgtggattgagtttctccgtggttcaggatcagcaggagcagtttcccaggctactctccaccagattttcaacgctggagcggcagaccgatggttttcaggtggagcaggtgtctggctgccagcatcatcatcatcaccagcatagcccgttgtatcatcttcctcaaagcagtcaggatgcacatgctcagacggatttttcctacgcgcagcgctga

SEQ ID NO: 24462 - protein, 2015 aa, DROSOPHILA
MLSDLCSKLGLDLVPREGPLAVDPHGIGIVKLYNVHVSSADNAKASSSRGTLRRKTQRKILTHHLYFCMRDFGHRIGGDDAEVYFFLYDGSHMRPLSERFLVKISKDGFSNYIERLHSNCTVFTDLGAADLNEELHLVAVVMRVGKIIQSDSIKKIEKSGTLGHGPTFRRPFGVGVLSLGDIAHFDSSLEQSSDEREYNFKLFQCEEKDFHLLPELIIKKSSGKYSPIQASQGTQGIVVSLKLLHGGLGQARQEQPMLFQGSTITRKMGFPDVIMPGDVRNDLFLNLERGEFERGGKNTGKNILVTVVVLDVAGNVLTDCLWGASGMESQPQYRSMILYHQNAPSWNEMLRLSVPIDKFSTAHVRFEFRHCSTRDKTEPKLFAFSFARLMDTGGATLGDGLHELYVYKCEDPAKLQVANYLRLQCRPRDAQAKMDCGGCFSRSSKEVFVLRSLLCSTKLTQNADLLSLLQWRTYPETIQDSLTGVLRLNDEELVKFLQDVLDALFAMFSNEEGNSTQHSGLVFHVLVSIFSLLQSNKFQHFRPVMNEYIENHFAAALVYKGLITSVEHMAVFMTKAEHPDPFQKCFGSLEYIFKLLIQSRKLFARATGGQYEDSFKRDLHSLFTALNGMLAVPSYDVIIPTQEALLNSTGVVLEQLKDTLPAPELGMLARNMLDAIPRGAPIRLIQAKLHAVKDLVSGELFHEDDSRTVVLSVACKHLRMHLSRRDELRLCAEILSEILSQLYDLQKEQREKVTNTLQHDLDSLCKNILGILIRTISIIMEGSNAVLPQLVSCLLGLLQLLDETHYKRYWDELSPNKDPRDLKEFLSKSLLVYEELLTQDWHVFPNDWLVMKLAANDVLRMSLEEFAKPLVYRFLGPQAFDSQLWWSYFSLAVAFLTQPSLQLEQYREPKRLKILHSHGDMRVLMGFQILSMWSQLGEQKLHFIPSMVGPFLEVTLVPEPALRKATLSVFYDMMQCEQAARGSFRLVESELIDKLDLLISENKGDDEYRELFSTILLEKVQVENPNWKEAGIAFIASVTRLLERLLDYRSVMQGEENRDKRMTCTVNLLNFYKNEINRKEMYLRYIYKLHNLHLQAENYTEAGFTLKLYASMLSWDRETQSFAPFDNSGQPEWQRKERLYHEILKYFDKGKCWEKGIPLCKELAHLYETRRFDYNKLSEILIQEAKFFQNILTQLRPEPEYFRVGFYGMGLPLFVRNKQFVYRGLEYERIGAFTQRLQTEFPSAQILGNNSPPDNAILNAPDQYIQISNVRPVGDAQALKTAMVPVPEKIARFYEVNDVTRFIYDRPMYKGTVDKDNEFKSLWIERTILEIASPLPGILRWYEVKQKTMQELTPVEYACEIISNAGKELSELIVQYKRDPKRNINPFSMRLQGTIDANVMGGISKYQEAFFSEQFLKSPQGAGQQANVQRLKVLILEQIQILEQALELHGQLAPSGVQPLHNRLLERFSQLKQSLSGMGRLKRQHSESIVNTPLPPLPTEQRVAPATASSSLNANAHSNYVYDLDEIYTRPGDTVRPVDPLSSYQTLSKESLSIPLEDTAAPPVPNRPRSQNFIGNGSMDSPEVPPKRQPTLNSPNAPPLPPRGITPDKRASNPLIFNDFGSGDAVGRRHSQQQQQHGQKYSVVDISYDDPEADQQPHSLPPNFQDGSGGHLSVCFAPNDFRDSGISTTSSRELNHMNLNNLSEDSSSISTITVQHREHCRISSNGSLDYNAAASMNITQRESSTSSFDVEDFPVPPPPIPPKSLAVSSNGVNFSLDEAHSPHPSTQANTTQLNHIQNPNQNHSTNSHHHLQQQQNGDGDGYSTLQHPMNGLGLPTLPPPPSAPHQPHKPSSSTSTSDSTATDTASESTESSSSTHSMTPPPPPPPPPSSFTHLHHQMAATTHYCQDCLSSPSPPPTIITEQAQVHPTPGSTSAQPHIEHCSCGLSFSVVQDQQEQFPRLLSTRFSTLERQTDGFQVEQVSGCQHHHHHQHSPLYHLPQSSQDAHAQTDFSYAQR

SEQ ID NO: 24463 - DNA, 2465 bp, DROSOPHILA
ccattcctgcagggtcttgcgaccaacgatgtggcccggattcagtcgccggggggtcctgcctcaatgtacgcccattttctcaacaaggcgggcaggctgctgtacgacaccatcttgtaccgcaccaacaacccggaaaccatccttgttgagtgcgatcgggaggcttcctcggacttccgacgccatcttcgcacctaccgcgttcgcaggcgcattgaggtcgacagtgtagacgacgagtataccccttgggttatgtttaacctcaaggacgcttcggaggctgtacccaatccacatccagacttatttgtgtctcccgacccgaggctgcatgtccttggcactcgcatcctggcccccaccgacatggactggtccaagctgtccaaatgttttgctgacttcggtaccgccacagcagcctcctccgacaatagttatcaactgctgcgctacaagcaaggagtgggcgagggctgctcggaactgacaccgggcaaatgttttcccctcgaagcgaatgcggattacctgcatggcgtgagcttccacaagggctgctatgtgggccaggagctaactgcccgcgtccatcattcgggcgtgatccgcaagcgatacatgcccatccggttgacggccccaattgatgtgggttccagccaggacgtaacttctttggctggagcgaaacttggacgcgtctttggctttgcgcacaagcatggtattgcactgctgcgcatcgagaaggttctcaacggccgtcctgagttgatgatcgatggcgagcgctgttatgttgaacgtccagaatggtggccggaggatttgcctggaaagcgtcgcatggctttcgctgagtgacttacgaactgatttgaccaaatattgttatcatactattgttataagtgtagtaaatgtatatagtcctcgtataagttgcacagtctgtgtttttctattggtcttttagaaaatctcagacatggatcccgatgacgacctcgtcctggagaatgaggcagaggaaattgaacggttacagcttcccgaggagcttaaaaagcccattgatcccgaggaagaggatgaacgagtagcacgcatcgaattcaattgttctggctgtgaaatgcacgagatggtccattattttggacggaaaccgccctttgctctaggagtcatatacccagaggacaactacgtgatgcgagatcctttccaaccacctccacctcgttggcagtcaaagccggaatactatatcgcaatggggactaagtgctccatctgctccaagacggtgtgcaaggatcctggctgcagtttctactatacagcctctttttgcttgccttgtggcaaggaagaattaaaaaactggccacctgaggctcaagctcgaataagaaaacaaatgtctgtcagtcaaggcaggcaaacataaattagtctttaaatataaaacagtagtatgtaaaaattatctaaataagcagtgaaagagctattggctagaaaggatacattttaaactttattcaataatggaaactcgcacttattcaagtgcggttgattgtattgtttgtattgtatgctttctaatgcttaaatattattgcaaagtaaaataaaaccaatctgaagtttacaatgttaaatcattcattgccaagaacaattttatttgattattgagacaagtctttacatagttcgtagcgaccaaactgttgtgctttttctgcgtagtttcaaacattgcgcgtcccagttcttttttcaagcgaattagatcgaccctgcacggatttgtctcatgcggaatttgtttctcgaattctgcaattcggtgtgccaatgctttgtccaaaatggcccgatcttcgtcatattttttgaatgcggctaatgcgttctttttaaatgtttgctcttcgctgtttatggccataaaaaggttccatattttctcgtcgaaatcccgatacgtcttttttccccacggacgtgtcctgtatttggccaaaacttttagaatctctgtatcgtagttatcgggcctggcagtcgatgaagttggcgcgatgaaaattttttgcacttcaacattttcgcactctggacccggatgattcaatatttccaatttcatgaggttggattgactgaaactgccaatgagttgcacttgctgattggcaaagaagatgcgacacgttggcataaggttttccatcttctgaagtctttccgcaacttgtagcttcttaaagatttccctttcgagttctaatcggatttgattgtaaactgtaaagtcggtgtagacatcaattttggtagctatttcatacatgcttaagtttagagcaactaaaactgtttggaaattcttttcgaactctgcatttttttctgccagcaacggtcttttgtgaaaa

SEQ ID NO: 24464 - DNA, 465 bp, DROSOPHILA
atggatcccgatgacgacctcgtcctggagaatgaggcagaggaaattgaacggttacagcttcccgaggagcttaaaaagcccattgatcccgaggaagaggatgaacgagtagcacgcatcgaattcaattgttctggctgtgaaatgcacgagatggtccattattttggacggaaaccgccctttgctctaggagtcatatacccagaggacaactacgtgatgcgagatcctttccaaccacctccacctcgttggcagtcaaagccggaatactatatcgcaatggggactaagtgctccatctgctccaagacggtgtgcaaggatcctggctgcagtttctactatacagcctctttttgcttgccttgtggcaaggaagaattaaaaaactggccacctgaggctcaagctcgaataagaaaacaaatgtctgtcagtcaaggcaggcaaacataa

SEQ ID NO: 24465 - protein, 154 aa, DROSOPHILA
MDPDDDLVLENEAEEIERLQLPEELKKPIDPEEEDERVARIEFNCSGCEMHEMVHYFGRKPPFALGVIYPEDNYVMRDPFQPPPPRWQSKPEYYIAMGTKCSICSKTVCKDPGCSFYYTASFCLPCGKEELKNWPPEAQARIRKQMSVSQGRQT

SEQ ID NO: 24466 - DNA, 2612 bp, DROSOPHILA
cctgacgttagggctagaatagataaattgatttttaaacagtgccatcctttgactaagctagttttagtatttaactaagagctatataaacaactattttctcgtcttaaacttgggctgcgccttgccgtagtgctgatcgatgtgtgaaacgggcgcgcgcctcttgtcgttgcgctccttttgcgattttgttcggcatttgacgctggcggcgcccgtttgatttttgcccaactgatggaacttcttgcgctcctcgcgaatattcttcagccgctggcgttcgtccttcagctccttgtagtttttggaggccttcttcagcggcttggcgcccagcttgatcagctgaaacatttccattttgctcttgtttttgatcacacgctggtttttgatcgcaaaattgagcacctcgtggcgcgccttcttgatatcgaattcgggattcagttccatgccgccctccttggttttgtgcgatttttggacgccgtcgtcctgcttttttgttccacttttcgattggaagtgcgattcgtggaagacgtgtgcctgaaattcggtgttctcctgcttcttttgcagcgccaacgctgcacgcgtgggcaccggcttaaaatcggcgctgacgttcattatgctttcagttttctgtgtttatttgcagcaataatagtgaaatcaaaatattgaatgcacatgtacagtgccaaaatgtactaattcccacgtaacgcctcggtccatctggcagcgccgtttttcatgaatgttgcttgtaaggtggcgctttttaatgtccttattacgtcacaaaatctttttatttcaaaatatgtttcagaaaaactgctcagcttgcagtctattgctatttattaagtatacaatttctttacattaatttgtaaaatttcgtacttattaaaagcataataagatcttattgaatggtcaactattataatatttaaaataaattttttgtatattaaaagacattgattttactcattttgcttttgctttccgagtccgaatcctccgaccaaaaatcatctggcaaacaaatcgctttccagcccattgcgtccgcatcgtcagagatggaattctgctcatccagctggttgaagggactggcattcaaaggacccgaccaactcgcgacgcgactaactggcggtggaataaggcaatcggaattctccttccgatacgttcgagccttcagtttgtttactgcgttgggcaattgcggtacaggcacctcctcctcgtcgtcgtcgggcgatgaagtggaattgggcacatttacgatgtagctaatgggatccaggcggatccctatggttttctgggaggatcggctgtgtggtcgcgtcagatgtggattgccctctcgacgtcgccgtgcgtttctattttccgtcttgagcctcccgtttgccgacctgccgccattgatgacgctcctcgtggatatattcaccgggggcgactttcgcctggcggccagcttcttcggatgcggaatcctgtagcgaccattcgcgtagtcattgcgcggactgacgaaaattccagccaaatatttaagcattttccaagaaagtttactaagaatttaaaataattgcaagcgacgcataagctccgattttatttctgacgatcgagaaatgtgacggaaaaatgatttgttacaaaatttggagaagaaattttggaaatgattaattttatggttttcaaatatagcatagtatagctaggacacaaacccttgtaattccgcatagaaaatagttgggatgatccggcaacgcagtgcggatcgaaataaaaaagaaaacaatgcgctcgcaagaaaattgaagcaacaacaaatagccgataaatcagagccaagggacaagcgcaaaatggctaggaacacgggcagctcctcgggctccacgcccgctgcatcctcatccggatcgagcgcagcagcagcagcggcggcggcagcggcagcagcagcggcatccaatgccaaacagaagcagcgcagcccgcgtttcagtttatcctcgaatttgatcctggacaaatggaaaacgatgattggttgcgtttgcctggcgatagcctcgtacttcggctatctgggctacctggagacgcgcgttaacacgcccttcgatcaccagaagatggtggtgcatgccggcctggagcaaccggatcgctactggggctcctaccgtccgttgacgtacttcggcatgaagaccagggatccgcactcgctggtcatgggcctgatgtggtatacgcccagtaatctgggccccggtggccagggcattcgacactggtgcgagcagggcgataaactggactcgtacggctggacgcatcacgatggccgcagttttggcgttcaagagatccaggatctgcccttcgagctgaagacctcgttcgttaagtatccagagggcaagcagtacggcggcgattggactgccaggatatcggtgaggaatacgacaagggcgtgggacaagagcatctcgctaatctggtatgtggcattggatgagcgcaccaatgga

SEQ ID NO: 24467 - DNA, 612 bp, DROSOPHILA
atgcttaaatatttggctggaattttcgtcagtccgcgcaatgactacgcgaatggtcgctacaggattccgcatccgaagaagctggccgccaggcgaaagtcgcccccggtgaatatatccacgaggagcgtcatcaatggcggcaggtcggcaaacgggaggctcaagacggaaaatagaaacgcacggcgacgtcgagagggcaatccacatctgacgcgaccacacagccgatcctcccagaaaaccatagggatccgcctggatcccattagctacatcgtaaatgtgcccaattccacttcatcgcccgacgacgacgaggaggaggtgcctgtaccgcaattgcccaacgcagtaaacaaactgaaggctcgaacgtatcggaaggagaattccgattgccttattccaccgccagttagtcgcgtcgcgagttggtcgggtcctttgaatgccagtcccttcaaccagctggatgagcagaattccatctctgacgatgcggacgcaatgggctggaaagcgatttgtttgccagatgatttttggtcggaggattcggactcggaaagcaaaagcaaaatgagtaaaatcaatgtcttttaa

SEQ ID NO: 24468 - protein, 203 aa, DROSOPHILA
MLKYLAGIFVSPRNDYANGRYRIPHPKKLAARRKSPPVNISTRSVINGGRSANGRLKTENRNARRRREGNPHLTRPHSRSSQKTIGIRLDPISYIVNVPNSTSSPDDDEEEVPVPQLPNAVNKLKARTYRKENSDCLIPPPVSRVASWSGPLNASPFNQLDEQNSISDDADAMGWKAICLPDDFWSEDSDSESKSKMSKINVF

SEQ ID NO: 24469 - DNA, 2945 bp, DROSOPHILA
aaacaaacggaaaagtgtctggcgctccaggtgatctaaacaaatatgcatgtaccctaaattggggcaataaatacagtgaaacatttatagccgaaagtataactaaattgatactgactgtctgttaggggagtactgacgtcacagtttccggaaggggaatcgaaggaattttaaagtatttcataactgaagcttacttagctatcatcagctcacaggatgatctaaatatatgtgcccatgtgcccttcattggttcttggcatacagcgggtgtgctaggctacgcatagaagattcaaatcgacaacctgttcttgtgttcttgtgttactatattgcctaccaaactagtttagcttatgatcgtcttttagagggtctactgtatagtatacagtgtatacacgtttgttagtgttcacctactgacgtcacagttcctgtagaggaaactttgggatcttttttgggcagggcttaagcttacttatcatcagcttgcaggcattatccgagaagtgatcgccacgcccattcaccagggccgcctgcaactcggaagcgtttatctttccagatcggtcgcggtccaccatggagaaccattgctgtgcctgcggagacacctgggcattctgcggcggaaatgctcctggcggcggggcatagccaccaccgggctgggcatacgggttatagccttgtccctgtggataaacggtagtaagtacatttaatccactttcttaagcataaacacactcacataagacattttgtcacgagcctagttcgattctaattggaacttgagggacaaaacaattttaatgaaactacagatgacaagaagggcgttcaccaacactggtttgggcaagcgataacaatgtgacatatcgatagcattgctagacttattgcttggctatactcccatccctatcgccggtataaacaactaacaaaagcagcaaaacattaagcaaaaatgtcgaacttcgtgaacttggacatcttctccaactaccaaaagtacatagacaatgaacaggaagtcagggaggtgagttgacggttaatatcctaaaaaccaccatcttaaaccattgtttttagaacatccgcattgtggtgcgcgaaatcgagcatttgtcaaaggaagcgcagattaaactgcagattattcatagcgatttgagccagagtaagttctgtacaatttggtagcttgtatgttttgttctaatatgacattatacttgaacaatagttagtgccgcctgcggcttagcccgcaaacaggttgagctgtgtgcccaaaagtaccagaaattggccgaactggtgccagctgggcagtactacaggtgagtcagatggtgaaatccgtggtgtctattgtgggtgtcgaatgctccgccttctccagatactccgatcactggaccttcattacgcagcgtttgatcttcatcattgccttggttatttacctggaggcgggcttcttggtcacccgcgaaacagtggccgaaatgctgggatgtaagctagatttggaaggctctctggatacgaaataatagttaattactccacagtgaagatcagccagtctgagggcttccatctggatgtggaggactatctactgggcatactgcagttggcgtcggagctctcccgattcgctaccaattccgtcaccatgggcgactacgagcgtcccctgaatatctcccattttattggtgacctgaacacgggcttccgtctgctgaacctgaagaacgatggcttgcgaaagcgcttcgatgccttaaagtatgatgtcaagaagatcgaggaggtcgtctacgatgtcagcatacgcggtctgtccagcaaggaaaaggaccagcaggaggagccggctgttcctgcaaccgaatagtttacttcgtacgtaggataaggcgtttattaaaatgaaaaagtttcatttaaacaagcaaatatattacattcattaaacagagtatcattttattttactatttaaatcaggaatgctcgtaggaatcaaatgtagcaggatatatgtatgtaatcctgtgttaaaaatctgaaatgtgtttttgttttttttcagaacacatttctttacatcttaataggcaccatcttattttaatgatcagtttacacagaagcgaaatagtgctttgaaccataacaaaaaaacataagtttgtgcaacttaaaggtaattaaaatggctgtgcgcgttttgattaaatcataactaagtatacatagagacaagtgcagaagtttgatggcttaacccttttgaaacttgtttagccaccaccactgggccgcagttgttgttgttgccccgatcatatggtggatttgttgctgctcttctttggccgctgcttccgtttcgcctttgcttctgcttctcaggcgcagtttcagtctctcttttgccaccgcaacgcttacaacgttaacattgcgcgcgcgtctttgcattttcttgtttgctgcttcgtcgtccgtcgtccttcccgtgttgttcttattgttttttcccgctttgtgcgctctttattgtttcgccctttctagcattttgatttgaaagtggagactgcaattggttaccatttcaagaaagtaagtctggcgggcagttggccgtgtgaaaagtccgttggcccagaaactcacccgctctcttgaccacgcccccttttccgtccccggcccgaaaaaaaagctaaaaactgagagactccaacctgtttggcaataattgggtcacaaatctggtaaaaacttgttgcccgaaatggtcactaaacaaatagcactgtttttattacaaaactttagttgagtctgcagttgccttgttgttgtttgtttgttttaattttttt

SEQ ID NO: 24470 - DNA, 708 bp, DROSOPHILA
atgtcgaacttcgtgaacttggacatcttctccaactaccaaaagtacatagacaatgaacaggaagtcagggagaacatccgcattgtggtgcgcgaaatcgagcatttgtcaaaggaagcgcagattaaactgcagattattcatagcgatttgagccagattagtgccgcctgcggcttagcccgcaaacaggttgagctgtgtgcccaaaagtaccagaaattggccgaactggtgccagctgggcagtactacagatactccgatcactggaccttcattacgcagcgtttgatcttcatcattgccttggttatttacctggaggcgggcttcttggtcacccgcgaaacagtggccgaaatgctgggattgaagatcagccagtctgagggcttccatctggatgtggaggactatctactgggcatactgcagttggcgtcggagctctcccgattcgctaccaattccgtcaccatgggcgactacgagcgtcccctgaatatctcccattttattggtgacctgaacacgggcttccgtctgctgaacctgaagaacgatggcttgcgaaagcgcttcgatgccttaaagtatgatgtcaagaagatcgaggaggtcgtctacgatgtcagcatacgcggtctgtccagcaaggaaaaggaccagcaggaggagccggctgttcctgcaaccgaatag

SEQ ID NO: 24471 - protein, 235 aa, DROSOPHILA
MSNFVNLDIFSNYQKYIDNEQEVRENIRIVVREIEHLSKEAQIKLQIIHSDLSQISAACGLARKQVELCAQKYQKLAELVPAGQYYRYSDHWTFITQRLIFIIALVIYLEAGFLVTRETVAEMLGLKISQSEGFHLDVEDYLLGILQLASELSRFATNSVTMGDYERPLNISHFIGDLNTGFRLLNLKNDGLRKRFDALKYDVKKIEEVVYDVSIRGLSSKEKDQQEEPAVPATE

SEQ ID NO: 24472 - DNA, 3935 bp, DROSOPHILA
attaatctaaactacggcgagaacgcgttgtcccgggaggccagcatcctgctctcactgtgcatcatcgagaccgtgcgcattgtcttcgggcggaagagcagtctaagcgatcgtggtgagtaatccccatgatccccatgttactgcaagggtgggaaaagtccaccggcagcgatgatgacatggcgaaattatttgtttgcccggtcacaatgcccatttcatgccatccccctacctccggggccataacccataaacgtttggacgggcatacatacatatatgtatgatgtagcccactcggcgtatgcgtaattatggtcatcaccccggatgaaaacacgcgttttatggtggcaggggaaaggcgcccttctggcacattaagcaatatgcaaaggaaatctatcaaagcgaatcatcgaaatgagttattggaaaagcaattggagctgttaatattaattatcgcaatgtgtaaacatgaaattattagtataatactttaaaacactgaatcactttcaatcgaatacacttaattataaacaagtagacgaactatacgattttccgtgcatctgtagctaacattttccttgtttttctctctttgcaggctggcaagcaaccgcatccgtaatattaacactgcccagtcttgctattgttatctacttgtgttgttttcaaacctttgttctcaaactcgaaattattctgagtgccttaatgatcaccctacaaggtgctgaactagtctacgccagcatattcatttgtacaatgtgtcgccccgtcacatacacctagcagttgataagccgcgttgccgccgccacgtcaacgaccaagatcgagatcaagaccaagccagcactaacactcccacctggaggagaaggagtagaagcatccacagccgagcgacgactacgacgaagacgaaacactttcctctggcaatttcacatcaaacgattcgccaaggcctcaaaactaagccacttaaatgcacactaagccaccgcacataaaaacaaaacaaaaaatctagatcctactagacctcctaggaatccgtgccaagacaacccgataacatacccaatggctggcagttgaggaggactttcaacaaggtacgtgaacctttataaacttatataatccgcacagatcattcgcgcccgcggaaatcacatcgcagcgaaacacgacgcgtccgattctatcaaaagcaaagctgcatttaatttgcatttcttggttgcattcttttgcccggcctttgtggcgttgcctccctgctggcgcagttgctcctcggacccgctcggttctggtatttttatacggctctgatggtctaaaattatatgcgaactgcacggctcgtgcaacaccgctgctgtcccctaggtgcaatgtacacttctaatttgaatgtaatatacacggcccactgcgggcaagttagcctgactgtaatggccaagatgagagggctctccgtttggtctttggtctagtgaacatgccctgtacgattcacaggagagagattcacgggactttagcgaggcataacgctttgagtttttaaaaataattaaaattccaacaatggttttcatatattcaccctaaacctatcctgaatttcaaggtaaccatttaatggccctgggccctgtagagcataacgcccagggagtttttagtagttttttccccccaactagccgccagtgaaatcattctcccccacatttctaggcaggcgatctgccggccaatgctgacccaaacagcgagcagagaaaacaaataaaaggcgacaacgaccagcagcacattattcaaataaacagcacatttcgcagcgacaaaccgtgagaccgccgatgtcgatgccgctgccgctgcattggccaagcacggcaggttcgcgttattattatggtcagtctataaatacagtgcccaacgtgagcaacgccgccgtgtgagcgatccgggagatcaaatcggtccaatttgccgtagacatcgaggggtaacaggagaagcagcagaaggaggtgctaagccggcagaaagatgccgcccaagcgtccgccaccgctcgtgccgaagaagccaaatcccagcatgaactacgaggtgttgatctacctcaactcgttctactttggcatgttcgcctgttgcgagatggccatgggcctcctgaaggccatcaatctcagctacacgggacatactctagccctggacacgggggtgatgattagcttcattgtctttgagacgatccgattgataatggggcgcatgagttcgctggccgatcgaggtagaagctcccgcctgctggctggtctaattataggatattctaaaacaatagaatcatcctcaatggcgttatcaatcgtttaatcaaaccaaaccattagacttaagaaatactaattaactcattatcatccttatttataattgtaatagaatagtatctatggcttttacaatcagattctaatgaactcttctgcttttctatcacaggctggtcggccatactgtcggtcttcatgaccgccccctgctttgtgggcgtctcctatctactgctgctccagacctaccgactgcgcctggagtactgcctgtgcacgctgcagatcgccctttacctgaccgaggtgtggtatgccatcgtcttcgttttctcgctgtgtcgtccagtaacttatgattagccatatagacagaaacatccaacagccaactagcagcaaatatacatgcgaaagtttagcaatctataagatcgaaaaaggataatatgcggtgtaaggaaatttaatgaatttgaaaagcagtaggcagctgaattgctcatggccgtggagaagagaaaccaaacagaaagaaaaaaaaaacaaaacaaaacacatatgtagcatattaataattatgtatagtaaggtttatgataacatacacacactcttatatacatatatttaacggttttatatacaaaaattgttaacatttaagcatcaattggaaccaatataagacaacaagcaaaacctaaaacttgaataattttcacaattttaagatgaaaatttttttgtaaaaagaaaaatatcgaaaaacagccgaaaaacaaatttgatgtgtggaaataataatttataatagttcacagatagctcgaatcttaaaaagaattgtaaaaaaatcagtggaatgtctcacaaaatctagtcagcatcaaaatcatgaaaaacaaatggccgaaaggccattaaaaaaattcattaccactaagagtcagcgtttagtagttcataccaatattcaaaaggcggagaacaacataattaagcccagttaaaagtctagaccatgtgtgtactttaatgaaactactttatataaacctagcaaatagcgtaaataacattttcaagacgtcactaaaaacaatgcaaacccgagcgggcaaccgtttactagaaagcgaacaacaaattagctaaatcatataaaacatttatagagtgttaaaaactaggcgaaaaccctccattacacttctccccaattcagcctattggcaactcgaaacgccctttaaatcacgctcaattatccccgcctgataggatccgaggattgcagctcctccaatgctagtcactaatgttcacaaacattttctaagctagaccgaagattgtgtaataatttgataagacctttgtgtggtttcatagcaaaataacgcacaaatcgataacaaaaactctcaacagtccacaaatctcatgcttttaaaacaaaagaaataattttactgaaaccaaacagctggaagctagaagctgaaagaaaaccaaagccac

SEQ ID NO: 24473 - DNA, 503 bp, DROSOPHILA
caaaactaagccacttaaatgcacactaagccaccgcacataaaaacaaaacaaaaaatctagatcctactagacctcctaggaatccgtgccaagacaacccgataacatacccaatggctggcagttgaggaggactttcaacaaggctggtcggccatactgtcggtcttcatgaccgccccctgctttgtgggcgtctcctatctactgctgctccagacctaccgactgcgcctggagtactgcctgtgcacgctgcagatcgccctttacctgaccgaggtgtggtatgccatcgtcttcgttttctcgctgtgtcgtccagtaacttatgattagccatatagacagaaacatccaacagccaactagcagcaaatatacatgcgaaagtttagcaatctataagatcgaaaaaggataatatgcggtgtaaggaaatttaatgaatttgaaaagcagtaggcagctgaattgctcatggccgtggagaagagaaa

SEQ ID NO: 24474 - protein, 55 aa, DROSOPHILA
MTAPCFVGVSYLLLLQTYRLRLEYCLCTLQIALYLTEVWYAIVFVFSLCRPVTYD

SEQ ID NO: 24475 - DNA, 3068 bp, DROSOPHILA
tcgttcgttcagcctgaagaaacatctcgctacgcacttcatctccaatacccacaagcggaatgctgaagccgtcacctcgtcgtcggagtacatgtccatgctcagttttgaatcggatgaaacctggtcccaaggcactccactgaccacttccattgacgaggatctggtgcagtcgcaattcgaccttttgtgtcaggaagtttaatacatctcaagatgccatatgttttatcaatataccaaaaaaaaaaaaaaaatttaggtaagagctaacccacaaagacttaataacagctgaaaccacaaaagacaatatcaaatatgggtctaaaaatattggtgacatttttgtaattccttaaaactcagcaacaaagagacaacttgggaacaaatttagctttttttagcacgtagtttttaaaaaacactttacagtggccatgttattgcaaattttagtttttgctatttttttttgcgtaatttacatctgcattgcaattgcttccttgaatataacaaaagtgcctatatagtcttatcttatacatacatactttattgggctagttttaaaataaaatatattcagacatgaggtacaaaaatgaacattgaatttagaatcaaatctttttcgaaatacattttacgaaacattttacgtggattatttcgatttaccgaaacagaaatatgaagctatatgttttgttttcaaaaattgatcctgcgcattattagcatgcaggtcgtacttatttcaagcacccatgaaatggttcagcttaacgatttgaccaatattatttacacctattattaagttttaatattataagcagtatctgttttatcagactgctccagttgttaacagatcaatagctatttaaataaagattttgactttcaaaaatccccgccttgaatgaataatttatctggtttgcctcaaaatgtaatcaccatacaattgcctttccatcagtcgagtttagtgatcgagatgctgaacatcgtgtgtagagtctgcggaaggcagaaaatctgtgagaagagcctgaatctcttcgatttggtcaaccgaaaatatctaaagcacttgcacatgataagcggactaagagtgagttaaaagacgttttaaaattgagataaataatatcagcaccagttggtggatttggacgatgttcctggtttcatgtgcctttgctgtcaggcggaactcagatcggcattggcattccggaagctttgcattaagacccaaactaaatggctaaccatcgaggacgactcttcgtcgggtgatgaagataccaatgacaattcggaactggaatcggaaaaatgcgcattcagcgattttgggaaaaagaaagaaggcgagttggttgaagaaacttttcaggtactgattgaagaggagcccatggacaaaactctgaatagagatgcgaaagcgcagctgagggaagatggaatagatgagaagtgtgtaccttcacaaaagattatcaaagtatcaaccaaactggatgatcagatttacatatgcgagctgtgcgggactcatgccacatcgaaacccactttccagcgccacatgagaaaacacagaggcgaacgaccatttggctgcaagtaaacctcgctcacagattacaactgtaggttcggtatgctgattccatattctctttttagggattgtgatgccaggtttctctctgctggcgaactacgtgcccaccaccgggtacatactggggagcaaccgtttgcctgtcgcttctgcgaaaagcggtatgtcagctacatgggccggctgatccacgagcggactcacaccaacgatcgaccctatgtgtgcgaagagtgtggcaagaagttcaccactgcctacgtcctaaagaaccacatggtcatccacacgggcgagaggaatttccgatgcgatatttgcgatcgctccttccagagaaaggcgcacctggtaacgcacaccagatccatgatgcacctccaaaatgtcaagaagcagaagtcatgaaggattaaatagctcaagctatgaaataataagatttacatgctccttgagataaaaagatacccaaaaggggactatcttatttttatcttatcgtatttttatgaatttaagttgtatactcaatatttgcaccacacctgtttctcaaaatgaaataaatgctaatgcttttaagtgtgtaggacacagaaaacaaaaaatttgtatagattgtttgattttaattagtagcagccgttacgatttagtggttttataagtcgccagtgctggacaacgtctcaggtggaaaagctagtgcgctgcttcgtggcaaatggcaaatcagttttgggtggctgtcttgtttacaattggaaatttactaattagaatcgagtaagctggtaaaatgctgcaaaatgtgtgccgcgtgtgtgccagcagcacggacaactcgaaatcgttgaaactatttaacagcggcgcctgcaaagtgctgcaacaaatcaatttgctcaccggtgttctggtaagcctaccctacgaaacacattaattccttcaattaaaatgttgtatcttatttggcagctgcaatgcgaacccggtttacccgactggatgtgcgagacctgccagacggatttgaaaagcgccatatcctttcgtgatcgctgcttgaggagtcagaagatctttgaagagtcgctggtcaggaatgaagaggacacattccgctcctcagttcgtcgcagtgcccgttcccaaagacagcggcatgaagacaccgctccaaagacgccagcaagtccgctggaggtaatgattaagctggagagcctgagcaatggcgatgaggaggatgatggcatcgatcacctggactcctgcaacgaagcagacatggagctggccattaaagcgatgtccagctctaccgaagatgatggaactacctcaccggtcagattgaaaagaacccgacgtcggggacttaagaaaggcgggaaaggtg

SEQ ID NO: 24476 - DNA, 963 bp, DROSOPHILA
tcgagtttagtgatcgagatgctgaacatcgtgtgtagagtctgcggaaggcagaaaatctgtgagaagagcctgaatctcttcgatttggtcaaccgaaaatatctaaagcacttgcacatgataagcggactaagacaccagttggtggatttggacgatgttcctggtttcatgtgcctttgctgtcaggcggaactcagatcggcattggcattccggaagctttgcattaagacccaaactaaatggctaaccatcgaggacgactcttcgtcgggtgatgaagataccaatgacaattcggaactggaatcggaaaaatgcgcattcagcgattttgggaaaaagaaagaaggcgagttggttgaagaaacttttcaggtactgattgaagaggagcccatggacaaaactctgaatagagatgcgaaagcgcagctgagggaagatggaatagatgagaagtgtgtaccttcacaaaagattatcaaagtatcaaccaaactggatgatcagatttacatatgcgagctgtgcgggactcatgccacatcgaaacccactttccagcgccacatgagaaaacacagaggcgaacgaccatttggctgcaaggattgtgatgccaggtttctctctgctggcgaactacgtgcccaccaccgggtacatactggggagcaaccgtttgcctgtcgcttctgcgaaaagcggtatgtcagctacatgggccggctgatccacgagcggactcacaccaacgatcgaccctatgtgtgcgaagagtgtggcaagaagttcaccactgcctacgtcctaaagaaccacatggtcatccacacgggcgagaggaatttccgatgcgatatttgcgatcgctccttccagagaaaggcgcacctggtaacgcacaccagatccatgatgcacctccaaaatgtcaagaagcagaagtcatga

SEQ ID NO: 24477 - protein, 314 aa, DROSOPHILA
MLNIVCRVCGRQKICEKSLNLFDLVNRKYLKHLHMISGLRHQLVDLDDVPGFMCLCCQAELRSALAFRKLCIKTQTKWLTIEDDSSSGDEDTNDNSELESEKCAFSDFGKKKEGELVEETFQVLIEEEPMDKTLNRDAKAQLREDGIDEKCVPSQKIIKVSTKLDDQIYICELCGTHATSKPTFQRHMRKHRGERPFGCKDCDARFLSAGELRAHHRVHTGEQPFACRFCEKRYVSYMGRLIHERTHTNDRPYVCEECGKKFTTAYVLKNHMVIHTGERNFRCDICDRSFQRKAHLVTHTRSMMHLQNVKKQKS

SEQ ID NO: 24478 - DNA, 7138 bp, DROSOPHILA
aagcatacaaaacaatgtattaaatgaatgtgttattctactcctgatccttaaaagaccaatgacttgaacttgcattttacctggtatttaaaaacgatcatttatacggaataataaataatacggttgcaagtgatttggtaatttgaatgtgctttcatttttatttttatttgttgaaaacttcagcttaatcaacaaatcatgacatttgaaaagatacaattttaatatataaaactgaacacattgtcagaatggcatatatttaatccaatttgaaccccctttaaaacacagttctcgctttcctgaaatacacatccatacaatatatttaaacgattatccagttaaattctattcatgtttgccgaatgtgtgtatgaccaatcttgtatatatagattaaattttaatacgcttaaacactatagcgaaacattacacttaaaatgttcatttgcttttgcttagtcttgccacaagacacgggatggcgcggagtccatcgaaaatcgctgaaaacacggagaattaaaacgcgaatgtctaccagttaactatggattcggttctatattaacatgctaaggagatgattgaacagcttttgctccaggctagtcccttcactatcaattctagattatattttggtgtgtgattgttgtgtttcgggcggtggaagcgaaaaacaaagggctaattcaatttcaagggtcgtgtcgcagcacatttcgcaaatttaattatacatcataatattacacactttatgcttagagaggctatataaaatatatgttaaaagttattaaaaatcacgccaaatcaaaggccgccaaacgcatagcatctttagcataatcgaacaattaaaagaacggcgattagttttaaataggcgcactgaagccggttgcgcaggtaaaaaagaaagagaacggaagtaacaacaaaatttaacctactgcaaattgtaaataatctaaatttagtccagtgtctcgaagaagtcctgcggatcgacgaacatcgatgggctgctgtttccgctcaagatttccgcttcctcctcctcctggcgagccgcctccgcttccgcttcttccgcctcctcctccgctgccgctgctgcagccgctgccgccgatgaagatgagctgaccccgctcctgcgacgaccccgacgcactggtcccgtgcccgtgcccccgcccaccgatgccacagctgccgaccggagcgtactgcccgtcatcacgggatcgtaggtccgcgacgacggggcatcggtattgctggacagggaggatttgcggcgacgtttgttacgccgccttcggcgtcgtttgctggtctgaactgccacggcagccgttgatgtggagggcccagatccggttccggcgctgcccaacggttccgtaagcacactggttcgcggcagggtcagcgtggtctcgaacatcttcagcagcgtcggggaactgggtcaattttgcgggaacacatcgtcgatggtaatgaaagcgtcctcgcccagcgagtgctgtccgatcaccttgatcagctccgaggcgtgagccaccaggtattccagcggcggacgacgctcgaagttcagggactctgcataatcatagtaattagtaacttcgtttcgagacaagtgtttaaagacttacccaatatggccgagttgagtgtggtggaaacactctcacgtcgcgagggacacagcaaccagcccagcggactggaccaaggattagagtaggcaatcagactaaatgcatcctgtaacaaccataaattgaatatctctcgattacggataatcatattcttattgaagttatttttcaaatacaaagagtgcttagtctgcaagataccagtttctattgtttatacatttttatagtttacctccaacatttgacgctcctcttcagtcattaggttctccttctccagctgctggcccatgctggacagttccttgccgaactcaaggatcttctcgatcacacgaccacagttacgcgatgagggggaaacatctacatctgcaagtgctagggattacggatcttcccggaaatgccgccaatagatacatacccatttcctcgtcgatggcatctagagagttgcgcactgcgctggcattgccattggagctcgagtcgccgccgttggagtgactctggcagggctccatttctacgtccatgctgttgctgtcgtgctccacgcacttgttggagttgtcgtcaaccaacatgcttgaacagtacgttgtgattaaagatcggagtaagtattacatttgacttacttttttatatctggcctatcgccgccttgtggctttatcacagctggaatcgcagtgttgttctgttgttgagtctgatttatgttgacgttgccatttccactgccgctcttgctgtgcttgaacgtcttggtggactgtatcactgacgtctggtttgtgggcatggtctgtgtggtggcggtgactttgttgttcacgttctgtaagacaaaccatccggttctacttatcttccgcatgtaatgtttaaaaacccacctcaatgtcagctccattgatcatctcaatgaactggcggcacttcaatgcgaaccagaggtttttattattttccaggagtccggggaaagaacgtagtgtatgttcgatggcctggctcattttgccagtcagtataagcttaatgatctctggaagagtggatttaaagttggcatgtgtgttgtcatttcaaatggcaaatatacgaactttgacgtgtcttgatcgatgccaagtcctcgttgaaagtctgatttgtgtagccattgaaggcctcggcggttttgctgaacgcattatgcaccaaataagtggaaaccaggctaagcaatttagaagtcattgggttaagccatgatttttaaacacatttaacaaaaacgcaccgattcatcaggttttctggggtctccagcagatgtggatatcgatcgatcttgcggagcacattggagcgcatctccttcatcatatcgacgatcttgtcgaacttgaatggttcctgaccaaagttggcatccacttcctcgccaggcgtctgtaggcccacagtgggataaagcttagtctaaacaaaaaaaaaaaagattaacaaacataaagttagaagataaagtagttttaaaattccattgaatacgcaccggcaaatccctaaatgcgatgcccagatccactccgttcttggtgtagaagcacgtgttgttcacaaagttgacgcagcatccaatcacatcgccggtggtaaaagtggggccgtaggtttggccatttcccgaggagctaaacgagttgccatcgtcgccgtggtacccgtacgactgtttgtcccaacctacttgagggggggtgcggttattaggaatcatgggcacatctcgccgagcagcacaatggaacacaaacctggcaggcggttcatacggaactgctgggcagttaggccaatgcccatgtagccgttgcgtcccttggagattatccgcacctcgaagtagtacagtccgcaggaggacgggatcggataggcagtgcgcactgaggcggcatcactgtgctgcttgcccacacctaaaaagtcatgaggtttcagtatttgacagatctcaatttttatatgctatagcattgcagtaagacaatattcttttatccattcggtatgaacttcctactctcgaacttagtacatgggatatgttcttaacataaatgaatgagttggttatctggacaataaaaataataaaattgatactctaaataaaaaaactgatttttggcctaagtctacgtcgaaacaataatgagacattttatcaatttaaatgaaatatttcgaattattgagttatatattttacctgaaattaaagtaacctaaatatacattttacatctatgcaacgcaccatctacgtaataacttatacattttacgcgcattttacatgttatgtcgcactggtaagccagctgttgctgttagcggtttaacagccacgcgaatgagcgtgggagaagtgggttatgaaaaacaaaaaccaccagtgcacagctgagagcacctgtctgtgccctgtgcgtgtgtgtgccagagcgagatagagcgaaagagagtgaaaactgcagctgcactacgactcttcttctttctactgcattgagttacatccttcaagacaaatattagattttgtggatgggatttcgaataaataataatttcgataatgcaattaataactatgcaagtaataatttagtaggggctagccttatattcgggtgttttgatttaagggctaaaatattgtatactgtctctttagctttagatcaatacaaatttgaaaatgtaagaacaaagtcaaatcgttgtaataaagataaactccatgaactctggcacttataccacctggatactcatacttggctacagcgtagacaaacttattacaatttattccatatctatgtaactatatctatgtaagtgcatatttaattattacatttcattgcgaaattgaaatgtgcgtattagtggcaatatgaaaccgatttagaattgaactatgacagctcctaagaaatctgtatcttatagttgcctgatcgttgcctactttctattttagatggtatgaaatggagagttgatttatagagaagttcgaatcctactcacccttgtaggtgaccctcaagttgttctgcgacaaaccgatggacaagcacttgtcatggggactccagcacctgggcagcggagtctcgctctcgttgacattgggatagagcagccttaggggatccacgccctggtgctgtggcgaattggagctggcggcgggggtcgagtgatggcggcgaccaccgacccgcggcgatgatgtctgggtgctgctgcggggattgtggctggggaacatgtcgttgctgaagtgactgccgttgttgctgtagaagtgacgagtgcgtcgcgagaggctgttactgttgctgttgttattattgttgttgtgattgctgatattgttgttgttattgttgctgctccttggggctcgtgaggctgaggagtagcgcggcaaaacggccaccgagtgcaggcgctgggcaccggaaacggaagcgacttcgccggctctgtcgacccggtcctctaccacctcctcctcttcatccacctcctcgtcgtcgtcttcgtagtcgtcgatgcgctccacggcgttggcgtctatggtctcggctatagcgtttgcgtctataatcagtggcggctgctgttcgttaagatcctgcgatccggagtcctgctcgtccagatcttcgagaagcagcggtggcggtggctcggcttctggttcgatttcgggatctcgaacttgcggctcatccggttcttggttggtatcttctcgtcctaatgtctcccggttttccagcgatgcttgtggtggatgctcttccggattctgtgattctcggtgccgaataagcccctctatgtgatgcagctcctggttttgctccgcttgttgatcttggtgcactgcgggatattcttgattctgttgatccagcaatgggtgcagctcctggtcctgcgcgggcgaattctcctgctgatcctgctgcaatggtggcgcctcttgctgctgctgctgctcccgctcgtcccgctgcggtgccgtcgatgaagtcgtgggtggcggtgcagtctggtggaaagtaggagtgggtgagtgatcatgtggtgaattctcgcgagcttccgtttcagatgcattcaatgggggactagggtgatcgggatggggttggtcgtgagaggacgcggggacgggcggcgagggtgtgggcgaatgagagtgtgaccgagacgtagagggggctatttcggcacccatggctcccgattgagagagctggtgagagctgctgctggcgctgctgttgttgctattgctgttgctctccgaagagagtggcggggcctcttcgacgttctccatgttatggttgagttgtcgttgttgtttatcttgttgtggttgcaaaaggaggctgagagagagacgttcagcgaggaattagagagagtgagccagcaacgagcgagcaagagagagcggatgaagtgcatatgcagatgctgtgtgtgtatacgtgaggagtgacgaagggaggggtaaggaggctagcaaacacaaacaacttccaaaatgcaatgtcctttgtccgttacaccgttcacctcattcgcactctctcaatcactcgtgcactctctttcgttaactgacccaaaatacaaacaacaacagcaacagcagtttacagttgcgacgcgcagctgcagcacaaaaaaatacaacagcaacaactacagctacaaaattgcatgcacgaaaatgcaaaaaatcaatagccaaacgatattagccaatgctttctgcactttttaacattgctagcaagtcagttttgattattctacatttgtaaatgcctttttacgtcgtacttttctgaagttttctttgttttcccttctaaccaacgagtcactgtccacacacacacaaacaagcaccagctcacacactggcagcactctctccctctcgcacacacgcatatatgcatgcagcaagcacacacactcgcagctcccacacgcagagaagaaaattatcatttttttttagctggggcaaatgatctttgttggggttttatttagctgatgaattcgatttggctgtcattctatgctgttgatcggatctacagttgatatttccttatatttaccttcaaacgattgctatgagttgttaaatctacgaagttttgactttatgctatagagctggaacaaaagccgatgttcattcgatgatatcgatatctattccgacacctgacaacatcagagtgcgctcggcagctatcgattattcttatcgaataaatctctttaggcgcctaaattcaaaatttgataagcag

SEQ ID NO: 24479 - DNA, 3184 bp, DROSOPHILA
atggagaacgtcgaagaggccccgccactctcttcggagagcaacagcaatagcaacaacagcagcgccagcagcagctctcaccagctctctcaatcgggagccatgggtgccgaaatagccccctctacgtctcgctcgcgagaattcaccacatgatcactcacccactcctactttccaccagactgcaccgccacccacgacttcatcgacggcaccgcagcgggacgagcgggagcagcagcagcagcaagaggcgccaccattgcagcaggatcagcaggagaattcgcccgcgcaggaccaggagctgcacccattgctggatcaacagaatcaagaatatcccgcagtgcaccaagatcaacaagcggagcaaaaccaggagctgcatcacatagaggggcttattcggcaccgagaatcacagaatccggaagagcatccaccacaagcatcgctggaaaaccgggagacattaggacgagaagataccaaccaagaaccggatgagccgcaagttcgagatcccgaaatcgaaccagaagccgagccaccgccaccgctgcttctcgaagatctggacgagcaggactccggatcgcaggatcttaacgaacagcagccgccactgattatagacgcaaacgctatagccgagaccatagacgccaacgccgtggagcgcatcgacgactacgaagacgacgacgaggaggtggatgaagaggaggaggtggtagaggaccgggtcgacagagccggcgaagtcgcttccgtttccggtgcccagcgcctgcactcggtggccgttttgccgcgctactcctcagcctcacgagccccaaggagcagcaacaataacaacaacaatatcagcaatcacaacaacaataataacaacagcaacagtaacagcctctcgcgacgcactcgtcacttctacagcaacaacggcagtcacttcagcaacgacatgttccccagccacaatccccgcagcagcacccagacatcatcgccgcgggtcggtggtcgccgccatcactcgacccccgccgccagctccaattcgccacagcaccagggcgtggatcccctaaggctgctctatcccaatgtcaacgagagcgagactccgctgcccaggtgctggagtccccatgacaagtgcttgtccatcggtttgtcgcagaacaacttgagggtcacctacaagggtgtgggcaagcagcacagtgatgccgcctcagtgcgcactgcctatccgatcccgtcctcctgcggactgtactacttcgaggtgcggataatctccaagggacgcaacggctacatgggcattggcctaactgcccagcagttccgtatgaaccgcctgccaggttgggacaaacagtcgtacgggtaccacggcgacgatggcaactcgtttagctcctcgggaaatggccaaacctacggccccacttttaccaccggcgatgtgattggatgctgcgtcaactttgtgaacaacacgtgcttctacaccaagaacggagtggatctgggcatcgcatttagggatttgccgactaagctttatcccactgtgggcctacagacgcctggcgaggaagtggatgccaactttggtcaggaaccattcaagttcgacaagatcgtcgatatgatgaaggagatgcgctccaatgtgctccgcaagatcgatcgatatccacatctgctggagaccccagaaaacctgatgaatcgcctggtttccacttatttggtgcataatgcgttcagcaaaaccgccgaggccttcaatggctacacaaatcagactttcaacgaggacttggcatcgatcaagacacgtcaaaagatcattaagcttatactgactggcaaaatgagccaggccatcgaacatacactacgttctttccccggactcctggaaaataataaaaacctctggttcgcattgaagtgccgccagttcattgagatgatcaatggagctgacattgagaacgtgaacaacaaagtcaccgccaccacacagaccatgcccacaaaccagacgtcagtgatacagtccaccaagacgttcaagcacagcaagagcggcagtggaaatggcaacgtcaacataaatcagactcaacaacagaacaacactgcgattccagctgtgataaagccacaaggcggcgataggccagatataaaaaacatgttggttgacgacaactccaacaagtgcgtggagcacgacagcaacagcatggacgtagaaatggagccctgccagagtcactccaacggcggcgactcgagctccaatggcaatgccagcgcagtgcgcaactctctagatgccatcgacgaggaaatggatgtttccccctcatcgcgtaactgtggtcgtgtgatcgagaagatccttgagttcggcaaggaactgtccagcatgggccagcagctggagaaggagaacctaatgactgaagaggagcgtcaaatgttggaggatgcatttagtctgattgcctactctaatccttggtccagtccgctgggctggttgctgtgtccctcgcgacgtgagagtgtttccaccacactcaactcggccatattggagtccctgaacttcgagcgtcgtccgccgctggaatacctggtggctcacgcctcggagctgatcaagatgttcgagaccacgctgaccctgccgcgaaccagtgtgcttacggaaccgttgggcagcgccggaaccggatctgggccctccacatcaacggctgccgtggcagttcagaccagcaaacgacgccgaaggcggcgtaacaaacgtcgccgcaaatcctccctgtccagcaataccgatgccccgtcgtcgcggacctacgatcccgtgatgacgggcagtacgctccggtcggcagctgtggcatcggtgggcgggggcacgggcacgggaccagtgcgtcggggtcgtcgcaggagcggggtcagctcatcttcatcggcggcagcggctgcagcagcggcagcggaggaggaggcggaagaagcggaagcggaggcggctcgccaggaggaggaggaagcggaaatcttgagcggaaacagcagcccatcgatgttcgtcgatccgcaggacttcttcgagacactggactaa

SEQ ID NO: 24480 - protein, 52 aa, DROSOPHILA
MENVEEAPPLSSESNSNSNNSSASSSSHQLSQSGAMGAEIAPSTSRSREFTT

SEQ ID NO: 24481 - DNA, 2915 bp, DROSOPHILA
taaaatggtgaccgttaattaaactgtaagtacatctgtcgaaatttctgaatgaacaactattaatttcattttcccaacagcatcaaattgcctacctccccaccaccttcatcgaatcagaaatggtagaacaaattattctagaatttaagaaagttctgcaaagtattagccatcaggtttaatcttagttaaaattagttaactattaagcgtacacaataaagaatgtttctaccaaaaaacacttcacttacagttatgacatttatgattcatattccgttggagtaatgttatatttaaacaagagaaaccgctatagtcaatttcctcgactatcagatactctttaattagctagtgggagtgcgaacgagaaagttcaacatatgtataataaaatgaataaatttcaaaggcgttcatgcagacggacagctcagcctcgactcggatattgatcatgatcaagaatttatatacttcatatggtcgataaggcatcattttatttgttttatgctttttaagaaatcccagtatatccttttactctacgactaatggttttaaaaactgatgcattccgaataagaacactacgattttgataaaataaaaaaccaaataatttgtcaaaaaaggtacaccatctcattttcactattattccatcgtatatattatacagttttgacttatttaccaactgcaatagaaatacatcaatagattaaaatcactataccatccgcaaggaaataaaaaacagacattatacaatctaaaagaacgtcaaaatcgcagtaactcccctaattctgattggattacattattctccaaaaatttctttcattaaatcaattaaaatagtttggatattttgttaaaataattttttattaaataaatgaactgcacatagtatatagtatatgtcaggaaatacggcacattattgaatggatcacaaatggggaacggttttgtgtcagtagttgtcagtggtgcggacgtagtttactccagacggcatggataccttatcaaatcccttggggaagagtttatgagcctcttcatcggtgacagtgggcaggatcatgaccttagtgccaggctgtttatgaaacagaattaattagttcggaacagttcgcattaagtgggtagaaaaacttacggtccagttggcgggagtggccaccaccttgaggcgatcagtcagctggagggagtcaatggtcctcagaatctcgctgtaagattaaaggatcgtcagttgagattaacaatagttgtagcccgaaagaggtacttactcaacgttgcgaccagtggacatggggtagaacatggagaggcgcaccttatggtccggactgatgatgaacagggcgcggatggtcttgcccacctcgggatccttcttctgctcctcgtcgagcatgcccaggctgacggccaggtcgcgagtagggtcggcgatgatcgggtaggggaagtccccgggaatgtccaggcaatagctcttgatgtcgttcacccagtccacgtgcgagttcaatgcgtcaacggaatgtgccaggcacttggtgttccgcttggcaaactccggctggtgcaccgcaatcctgcccagctcagtggtgcagacgggagtaaagtcggcggggtgagagaagagcaccacccagctggcgatccgaagaagaattggtaagattcgatcagagaaaaagggtttgatggcacttacgagttgccctgccactcgtggaatttaatgggccccttggttgtgtcggcctcgaagttaggtacggtctgtcccaaacgcatcttgctgtttgattattagtttcaaaaaaacttagttgctcaactggtagctgcttttagctcgcacacttgttgcttactgaatactgactgggagagctggctgtcttttatacccaacgtgatcgacgtaaatagcgggtgcgatagagataggaaatgggcgctccctcaacgcgcgtgtttgtttgtagtatattattctgtgaacagattataaaacaatactgaacagattgtggagtagtttgctttggtggggggagtgggaaaccttgagcatggtgtcatgtgtgtgaaactcgacaggggcctctacaaaacgtggtacataatttggactttgagacgaaatgcttctggaagtatcttagaataaagtactgttttccttatttggttcttcattaatctcattttaaaagtccaataggcgcaaactcctttagcatctaacatccaaacagctgatctggtccagctgacagataagccggttccaaacataaacagagagccagagagcatttaaatgttaaatggtattggtaaatagaggcgaagcaccaacacctgcaaacatacagccacatcgataggcggatattgagagcaagagagcgccgagcagtgtgatggtatttgtgagtgcctccaaaaatcgcacacttccatagatcgcacggctctcccgttcacgtacacaaaacgagcctccaattgaaagtgaagagcgagtgaaatcatgagactgtgtgcgtgggtctatcgaatattaagcacaccagcataggtttttttttcagtaaaacacacaaatagttcgaatgggttttggaaagtcggatgggcagatcgctaactcagaagacagtacccaaatgggattcagatggttgaaattaaaataaaagatatagtcatcatggatattcaaaatgcagcaagtgttaaatttatttagaggtgggttatctttaacaaaattggattcacttccaatagctcgatcgtatttcctaagttactagtacattcgtaagagggtgctagttataaggtct

SEQ ID NO: 24482 - DNA, 727 bp, DROSOPHILA
cgagctaaaagcagctaccagttgagcaactaagtttttttgaaactaataatcaaacagcaagatgcgtttgggacagaccgtacctaacttcgaggccgacacaaccaaggggcccattaaattccacgagtggcagggcaactcctgggtggtgctcttctctcaccccgccgactttactcccgtctgcaccactgagctgggcaggattgcggtgcaccagccggagtttgccaagcggaacaccaagtgcctggcacattccgttgacgcattgaactcgcacgtggactgggtgaacgacatcaagagctattgcctggacattcccggggacttcccctacccgatcatcgccgaccctactcgcgacctggccgtcagcctgggcatgctcgacgaggagcagaagaaggatcccgaggtgggcaagaccatccgcgccctgttcatcatcagtccggaccataaggtgcgcctctccatgttctaccccatgtccactggtcgcaacgttgacgagattctgaggaccattgactccctccagctgactgatcgcctcaaggtggtggccactcccgccaactggacccctggcactaaggtcatgatcctgcccactgtcaccgatgaagaggctcataaactcttccccaagggatttgataaggtatccatgccgtctggagtaaactacgtccgcaccactgacaactactga

SEQ ID NO: 24483 - protein, 220 aa, DROSOPHILA
MRLGQTVPNFEADTTKGPIKFHEWQGNSWVVLFSHPADFTPVCTTELGRIAVHQPEFAKRNTKCLAHSVDALNSHVDWVNDIKSYCLDIPGDFPYPIIADPTRDLAVSLGMLDEEQKKDPEVGKTIRALFIISPDHKVRLSMFYPMSTGRNVDEILRTIDSLQLTDRLKVVATPANWTPGTKVMILPTVTDEEAHKLFPKGFDKVSMPSGVNYVRTTDNY

SEQ ID NO: 24484 - DNA, 12938 bp, DROSOPHILA
acgtttttgcttaaccttgacgaggaaccgacaaattttgtattacatttctgtgcaattaaaagttataacgtttgtggatatgaataaaaattttaccatacctacgtaggtgataaacgcgtacttagtagatggtttcattaaactaaaacaacatttttatggtgtttgtaaaagcgcaattttttaatgcgtttactcaattatttattgcccaggcccgtttgccacagcccatttagcaactttagctgtgcgttaccaactatttatatgcgttaccacatttgaaattgtatgagacagctggtattacaaagagtatatcttattaattcacattgtagcactggtgtaaaagtggcatatacattgaattacgaatgagagtgtaaaaatacggtgtacatttgtgtattcttattatttttggtagttttaaacatttgaggcatttctgtcgtttgcaatttacaaataaatggctaaaaactatggctgacgaatgagaacaccaaattgaaatcaacgaacttaagcgaaagctatatgaatatcgaagttacatgtgagatatatcaccgtgtatgtatgcttacgtaaatatatatatatatatgattccaaatgggtatttcttgatcaaagatactaacgattttctgaagggtccttaaatatttacgagtaattcacctttttgttgggtgaaactatttagttattaaacttgtacaaaaataaaaataaaattttgaaaatttcacaaactttgtggcaaataattcaacaatatattgtaggtctattacgatataaaatgaattggcacttcatgtataaatatgttattaaaaaatcaaaacataatataattctagtttattcaaggccctaaagagaatggtttttacttttgagatagaactacccatgccggagatgcgtgagaaaaatgtataaaaagcttagtcggcagtctagcgtttcctccaattcagaaattcgtctccttgaactccttggattgcagtacaggcgaaatagctcccccatcgccgttttcatttccattattgtgctcctctccgccgcccaccgtgtaggccatcacagtggcatgatccaatttcccgggcaatgctacaaaggcgctgctgtccaccacacgcttcctggccgcgcgatgctgcatgcggttcagttgcacctcacgcttggcgccatctggtcccgtagagagtttatagaagagttccctttgctccagggtcttcctcctggctgacgttatcatccgtacaaaatcgataagcaagtggcagagcctgcgtgccgatacgcagggcgaaaacgtgccgttgatgccatagctgagcagatcctctaagcggtagagggtaagagcatgccgctggggaccggtaacaaggggcagtcctgaaatggacttcggaatgcgttggggcaccaccgatggcggtggagctgataccaatccctggcgtggttcaataagcgtttgggagcgcatatactttggtcgactaggcgcattattaggcggactttccgccttggactgacgagctggtcgcgtgggcggagtcgaaggatgcagacgggcatagatggcggatgcactcttgttctgccgtttgggtgccaagttggcgggcttgacatgtcccgacgtctgaagcttaacatccggagtccaggcttcggcaaacttgcccacaactggatcgaagttatcgctgattccatccgacgttaaaaagactatgtctccactttcaatgcaggtcatcgagaaggttagattgctcagctctggcttgttgccatccgccggtccaagggcacccaacgcatcgcgcatgtccctcatggaactgatgtcgtgggatgcctgtgttagttcccgtactccgtgcttcttggagtacacatagcccagggaatcgccaacattacacgagcacacgacatatttccctggcgctccgtccagcggcagcacaacggctatggtgagagtagatagggctcctccaacttccaggatacaaccgtgtccctcccaaagactacgcagcaaactcacaaaaacctcctgggttgtggtggctcggcactccagcgcctgtccgaagaccgcccggtccagatagtccaaacaaccgtgaacagctgaacgggcggccagacgagcgccatcaccccagttgacaccatctgccatggccatggcagctgagtctccgcgcactaccattccgtagcagtcggcgatgggattgcccatgggttctttagtcagcatgttggtctcgtagagggacaccgagataccatatgcgaagtcgcactccatgcgccagttctccacgccagcgatcaaagctgcgggatcagagccaccctggttgcttacagcttcgcggagcaaacgttcccgctctgagttgggatccccatccgtcgagacctcagtctttgcatttaacacattcctattgttctgatcgctgttggcttttccagcatccgtgccagcagacgcagcggccagattggctatgctgcttttggaattcttgcgggaacgcattcccgacgcagaagcagatccggagggctgctccgcactgctctgtctgcgaggtcctgccggcggccgtccgaatttgctggtaagtcgggttgagttctgtgtggccacctgaactggtggtgtactcctcctaacgccatagcaatcatcgttctcctgctgcgtatctatgaagtcaatgtcatccgcgaagctggtgctcaagtgcagtttggagcgcttgatgccggtgagcccctcgtcaggacctgtgcaggcggctgttatagagcagtttccagcttcgtatgtatccaacttgagaacgggcatgtccgtgggattctggccattgtaaatctccggaccctcaacaaactgacgctgcattcggctgtcggtgaaggtggtcgggtaaatatttgagcaactttcgcaggctactaggtttctatttacttacccctccagatatttagttatgaagctaccatcatcatcctcgtgctcgctggcccgccggcgaccctcgcgaggctccgcgatgaagctcaactggcggaagtaagtggtgactttctggcgcagcgacggcatctttagtcgagttgctccctcctcctcgccagcagttctcgccctccagttagggttctcttaattgccagagatggaggggctaaaaaatggatgctgggatgctgaccagttcgttcacctcatcagtggcaattgttgtgggagtcgagtcactccaaacgaatccagccgccgaccctgcaaagaggtttaatttagagcttcatttaattatcaataaattatgcaattaaatgggactgggcaaacacgaaagaattacaagcaaattgcataggcagccgcataactgacattactccctcctttcaaccgcctactcctaaatgacgagatgtgctttttagttgccgcaggccctgcatcctttccctggccacacaaaacccttcgctcatcaggagcaggatgtcagaggagaaatcccaccctgtgaatgggcttttacccagctcattgcgaatgcagtagacactgaactgatgcggacacagaaatcccctccttccttcggggttcagatgacatagcttttagcagggctctccgcatgtgttctgaaccagagatgccaatttggttctttgctcaactaattttaaattgtttatggattaacttatgtgccaaactacttgcctttcaaaataaaccatttataaaatcgaacgcaataatttgggacttgatttatcacaacatttatttatttatattaaacccttttcaggatcaactttcaaatagtcctttagcatgaattaagtaactggcatcactgatgtgttgatgattaatgaatggacaaaccaactgcctggggcgacctgcaactccagcagatgttgggttttcggattctgacagcatcaagttcggtttcaatggaaagatgatatcatataggggtaagtttgccggcgagaaacacaccaaggtctgctgtacaattatgtatctaactctccgccgctatcgcagacgacatttaattgccgtgttagggcatttaactacctgatccattctcgtagacaatgtaacgccaagacagccttcatttcggcgagattacaatggatcgcaaacacaataaatgctaatcttcagcagcaattgccgtggagatgcttttccttagacgatgtacacaaaacgatttgtataaatgataaacaacaacaaaaaagtcggcacggaaagtagtttcgttgatgggggcaattattcaagataccccccctcccttgttgttgctgaaattttcacaaatgcttcaaagatatatataaaaagaaaaaaacacaatcaaccactttaatttgtggcataagtacttcaagtgacaaatgagtggtcaattaaaaactatgtcgattaacggtgaatactgtgggtcggtacgcctctctatgcgcttctcataaacggcacttaacggcacgcgaaaatcgcatgaaccctgaaccaattgttcgagtttcgatgaacttgaactgcactcacgaatcaatcagcgagtaatgtaattcaatttcaatctgatggccccaagatgcgcgatttcttggcaattgctgggcactgatccgattgccaccacacccgcattccttgcggcaaagcattaaaatcaaattaacccacataaccattaagtgcaggagtgggagatttcccattaccatatccacatttcccagatacaaatcaaatgaattgaaaagtcagagccgcgagacaaagtcgatcgctggacgaaagggatggatagctgagtgcccatgtggttataaagatatatctttctgtggatgcattgaggcgcggccagctgtgtgcactcgtaccggtccagggcaatcaatacggatgattgaaaagcccaccttcacatcaccacaaaacaattcaatttagccacaacaatgtgcagcttgcgattaaatgtgcagccaaagagattacaactgcaccacaagagccaacattgaagctcagccacaagcgttttgtagttcccatctgcaattgctccaatttctttacgcctcctccagatctgctcatccacgtcaatcagagtcgtcatcacttgacacacaataggcatctgactgtgacttactggcttctcaattccctcagctttttcgcttataagtgtccattgtgggatctcacaaattatttaagttctgacttttgtccacctgacggcacgtgccgagaataaagtataggttttatagagatggaaaaatctctggattgagaagtaaactcatgtaagatgcccgtagcagccgttttgtttacccatgtacatatattattttttaatctttaattgcattttatgtatgtattcaattgtatatgaaatgacactcccccaaacattaaacaaacaattcttcgaggcgtgtgccgcaatcaatcgacacttttcgattggatttcgggaccatcgaaattttcaacacttgaaactaatcaagcgtggaaatggggaaataggaacgcggtgctgtgagatcattgtgcaagatctgggtggggcgatccgtggtgtataaaaacaactgagtaaatattatcggatgtggcacagatctcgtgagtctttcgaactttgtttatgctcgaaaaccaaaataaaccatttgcgcttcctccaaccaaaaatagttgtgttggcccgtatttatagctgccgcccgtggaaacaaaaaatgtctgggtgaatttctcgcttgaaaaactcatttgggcaaggctttgaaatgcatttcccgtcgcattcgaaatcagctaaattttctgagctaatcaaatgcgcaaaattattgtttacacactgggttaattagatgtggagattggtttctctgctccgcttcgagattcttttgtgctctttcggctttgtgcatacttaaaatgtgtgtggatttacgagggagaagtgctaaaacccaatgcaaacaagtctgctttggggtccaaccaaatgctccaaccaaatgcaaacacacccgtgacattcagagtctggatgcacttgaggcaagtgacagttgtctgcagattatgtgctatgtgctgcatattgtggaatctcaaggtgcagtcggtgggccaaagccgcagtcaaagaaaaagccttaacagcacaagtcaagtgaggctgctcaaagccgttttgtgtgcttctgtttgggccagacaacaaacaacaagaagctataaaagcagagagtgaaaatttgttgcattcattgcgtgttttcttcgaaagaaagttgaaggccatcgttaagctgtagattaaatagagctgtctgcttgattacgagctcccaaatatttcaatcatttcgagcgacccactttatgtatattgcttttgtagcgagttccctccttaacgtataagttgtgtagcttaggtattctaagaccttagattagatgattctcccttatgggaattataatatatgaaacaaaaccgtatgcacaaaccacatacacgcgtcaagtgctgattcaaccgcagtcaaggcaatcttggataggaaatgcatgcttaattttcatttcctcatatgcaatttttctcatttcaagtccaggctgatcaagccgcataaaaataaaatattaagtagcaaatgcattaagcaaaatggacggggttccccaacccagagttttaaactgacaagcttttggcttaaaccttcccccaatatttgaccatgtgttgactcattggacaagccgtcagctgcattaataatgcattagaccagccccaggacataaaagtccccccatcgtgctaaagtgggcgcaacacggcctggggcttcatgaaaatctggcaattaaaatgttttacattatgtaaaccgcacgaaaacaatcactaaagagttccttcacctcgaaatggcgtcgtgaatatgaagcgatatgtatgatgtgggaaacaaaggaggagttgaggagtctcttcccggttttcgaagcatttcttataaattgccacctaattggcgtgttcaacattgtgactgtgcgtggtacgcctcatttcctgttgcaacaatttgcattaatagagggtctcataccacagattcagttcgagatctccccatccgtatgcgaatgcgaatctattccagtgaatgcatttcagtaccattcaattgaaggcgcgatgaaatggaaagttaagatccctttggaggattggatgtgtgtcagaagttgagaaacatcctttgttttatgtgccttccatgtgcattcgcacttaacgccaatgccaggacctaagagcacccaaacccacccagtttttccccactgcatttccgcttgcatgttttcccttgtttttccgcttttcgggtcgcgccacttggcccgcttttcagccacgaaaaactatacttgaagaacttgccacacgccgaatacaataaactaaaactggggcaaggcgaaataattcgggcctagaaaggcaatatcaaaggagtgccggagcttatgtatggtataagggtaaattacctttcggacttactgggtatatagcatcaaaccaccctcacacaaaacatttagtatgattgtttttaaagccatataattacggcgaaggaaagccattcccataccattctactaattggttgattttttgttggatttcgcaaacatctggcagaaaaattgatgccgccaaacaactccacacacatttggcaagcccacaagataatttgcataaattgaattgaagtctttacttgttggccaggtagcgacagctgtcgtcggtttatgtaggacttatatacgactaatcctgcatgaataaattaaatgggaagcctcaactaagtctgtctggcggcggatgggttttgggtttggcctctgccgaagcctttgttgccaagcatacaaatgagttgaatccaaactcctgggcgctgtcactctatgcaaatctagaaaaccagtaaccagttgttgtaggatggagaaggcacggtggacggactttcggggcgctcaactcacatattaaattaaatgttaatggcaacaaagacaattcaaacggagtcaaggcccgggccaaagaactgtggctaacaaagaggcaaacaacaccaatttctcgactgccccgcagcaattgagcaaccaacgagccactttgttcgccccatataccccgcccacatcccagcccctgtccacccgtgaaatctgttctccacctccagctacctctagataatattgcactgttcggtgtcaaatggctgcccactgacggacttcttggtttgtcaggtgccatggttattccacctacagtagaagctcttgaaagtggaatttctttctatctaataataaaagataattgccgagacagttttggttaaaagtggtcaaagtgctcaaagactctctatcgtcggttatgtacgttaatcatattagaagtaagtgaaaatgtccccagaaaggacgttcattacaaggagcccctactgtacaagaccttgcggcgggttaagtgaccgattggctgtcagtccccagccaaccaacctcacctctcggacttctagttttaatttgaatttcattccgtctcgtgtggtggccaaacgctttggtggttcgcttagtcatatcactcggctgactaatcattgaaagcggagcgtgcttggagggaaaccttaagccccagatataccccccttctaactccaaaccatttaccgaaatctccaccccgccaaaaccccacacagctgcaaattcaatgaacctttgctgctgttgactttgctgattaattggaaattggcaaaatgttatttattttcgcgcggctggtctagcgccaaatggttgtttttcatcaaaggcataaagttctataaatgttcccagacaaattggttttaatgagccggaaactttttcggttgagctcggatttttacgggtttggcggatagaaggagaagccacatattgtacccgattggctttaaacaaacacggacatactatactgagacaacttcttcagtggctcgctaatgcattatacaagaatgaactcctttgcaggcacggccgagcaaacaaacttcaacttgtccggaccaactgcgtcataaaagagccaacggcagcgccaatcgccatctccgtttccagcgagacaacaaaggatgttgggcgccgggaagcaggaggagcaggacctgggaaaccagccagttgtggatggagcgcagacagaacaacttcatgcaaccccatcccctgggaaccagacggcagccaggagtctgtgtgcctgatccttgccatctcgaaacgaaaaagaagccggcgaaaaatatataaaatggagaaacaaaatattttcccgatgtgcatgcatagttcaaagttagtttcaggcatctgtgcaccaccaaatacaccacattccccactacttacaagcagaattgtgaaaattttttggttgccaagcgaaagtgattgaattcctagggattttgtcgggcgccagttgaaaaggaatttttgatgcgtttaagtgccgaagtttccctaaaaaagtttggccttagagtcaggggatgtattaaaaagaaaaatgtcgaaagtttttgaaagaagagattaacaatgatgtgtgatacaatgattgtgtgttttggtctggagaatttaaatctcaataaaaaactacaaaatgtatattaatgaggctaacgatggttatattatgcaaacaagtgttggggggaatataattatttaaaataattgcatttttttgcgattcccactttgcaattctaatccctaataaaactagagataacttatcttatgaagcaatttgtttactactgcgactggtctacagaatatactgatgcaatcgctttagaagtgtggtaggtaatcccgttcgttctcagccggaaatcacccccaataagaagtttagataatcttagatacggtatctgcttgttgtttgccacatgcatctacaccctggattctaaacttagttcccccaaaatatctgaccgagttgtcccctttaatttacagcttatatccggcatgtttttctcccgtttgaattttgccacagtttgcgccagaagttgtgaaaagggcagaaagagaacgagttgaaagttcccattagaatgcccaatccaagccatcctgttcctttattgcgtggccccttttttttacattttccgtaattcccagccaggcaccatcacgtgtcgggttttctccaaggtattgggcttcgtggagaatcgattttgtggcctgacgagcctgttatccttggagcgagcgcttttggcttgtttcaggacatagaaattgcctgctgcatgtccgaaaggctcaacgagaaattatgctagctacactgaaatctaaacttcagttcaaggaactcaggaaagaaaatactattcagaaaatgaagtttttatgttttaaaacttttataacagtttataatattattgatacgatgtcaatattttatatttgttttagttcggtaaaatgaagattatcatgaatttttctcagtgtgcgaatggaggtgagtgcgaaaacgagaaggaggaagcatccatcacatgcatctgcagttggcaggcaggtaaaaatgttgtacaaaaaatgaataactgacattttaagtgggaaagtttttgcatcaaaatcaactgcctgccaatgctgctaccgaaattcaatatattaacaagtgctccgtaattgtaaattatcgccactttttacagtcattactattagtaagtttataattatgtgggtaacaaagcggtaaaatatgccaaacgaaaaacaacaccagctattagcacagtttcgaaatacgataaagcttgaaaaccggttattgcaccaacgaaagctgacttttgttgttcttgttttgtttgttattgttatttttgctagagcagctgagatttcgcagctgcccgtgaagttgaaaacaaaataagagaaaaaaacaaacggcaggtgaatcaacagcggttcaagcgcccaacccacccacaagtttgttggaggggggacgacgacgtaaaaaacagaataataaagacgtaaacccagttaaatggaaaaatcaaggcgaacgaacacacacggaagcaaaagcacaaaacaaaaggcgacaaaaacacgtcgaaggcggcaaaaaaatttggagaacccaaaaatcaatagaacttcgaaatatccataaccatgtaacacagtgcacattcacttacaataagtgtgccttcctcttctgggttgttttcttatcgctactttacatatgttggcgccacttgcaatggggaaatatatgtaagtgcgtgcgttccgttggtggtgtgtataaatatttaacatttgccggagggtggttccatcgcccagaacttcggcttctgcatggaatactaacataaatcgcgctgcacagtccacttttgtgtgttgcacttcgagtcccaatggttaccaattaatgtcgctacgaaatggaactgctaacgactgtttccgccgcggaccgacgttcctgcttcgatttgaaattcgaagtgaattggccaagccaagcgatatttgtggtaatcgaatcgtcgatatgaaacacactattctatgtgcaaccaaccgagttggcagctcccagcgcgatttttcagtatattttgcagtattttaattgttgcagacggctttttaaagcgccaccagttcgttcacattgtcgctatttttcagcatttcgcgggatctgtattttttataggcgaatattgaaatttgcatggtctaacattgattatagtgttgtattcaccgaatatttattggttttactgtccattgctttgaaagcaatagaaataattgaggatcaagtaagtttaagataaattattacagttaaatgccgatgcaggcactcacgcacactaacgcacccaaaacagcgacacgcgaatttgcgaatttcgttttggcccgttgtttgtgtgttgttgctgttgttacaacgttgtttgtgctaaacattaattaattgtcgcaatgtctgtttcgctataaatatgcgaaacgtgccgttgttatttgcgcgaaactaaatggccaattgcgctttaccggtgttagtgtaggtgtatgtgttgtctgtgtgtgtttgtggttgctggcgcgggcgaatggcgggtaatccgcatacactcgcacttattttttgcaaagggtttatgcgacactcgctttgatcacgatattaaaagctcaaacaccactctaccattatacaaatatttatttatgtaaaataaatgcggttaaataatttaccttagaacttgccctaaaggatattaagtgcaattaaaagtagaacaaacattcattgctaagttactaaatgaatagcattttcttttgcaaacttgttcattataaactactccttcgaatatatatttacttagtatattttctgtttccacgactttgtctcacacataaacacgtaaaagcgcgaaacagacacaacgcacac

SEQ ID NO: 24485 - DNA, 2617 bp, DROSOPHILA
cgaagcaggaacgtcggtccgcggcggaaacagtcgttagcagttccatttcgtagcgacattaattggtaaccattgggactcgaagtgcaacacacaaaagtggactgtgcagcgcgatttatgttagtattccatgcagaagccgaagttctgggcgatggaaccaccctccggcaaatgttaaatatttatacacaccaccaacggaacgcacgcacttacatatatttccccattgcaagtggcgccaacatatgtaaagtagcgataagaaaacaacccagaagaggaaggcacacttattggtcggcggctggattcgtttggagtgactcgactcccacaacaattgccactgatgaggtgaacgaactggtcagcatcccagcatccattttttagcccctccatctctggcaattaagagaaccctaactggagggcgagaactgctggcgaggaggagggagcaactcgactaaagatgccgtcgctgcgccagaaagtcaccacttacttccgccagttgagcttcatcgcggagcctcgcgagggtcgccggcgggccagcgagcacgaggatgatgatggtagcttcataactaaatatctggagggccgaatgcagcgtcagtttgttgagggtccggagatttacaatggccagaatcccacggacatgcccgttctcaagttggatacatacgaagctggaaactgctctataacagccgcctgcacaggtcctgacgaggggctcaccggcatcaagcgctccaaactgcacttgagcaccagcttcgcggatgacattgacttcatagatacgcagcaggagaacgatgattgctatggcgttaggaggagtacaccaccagttcaggtggccacacagaactcaacccgacttaccagcaaattcggacggccgccggcaggacctcgcagacagagcagtgcggagcagccctccggatctgcttctgcgtcgggaatgcgttcccgcaagaattccaaaagcagcatagccaatctggccgctgcgtctgctggcacggatgctggaaaagccaacagcgatcagaacaataggaatgtgttaaatgcaaagactgaggtctcgacggatggggatcccaactcagagcgggaacgtttgctccgcgaagctgtaagcaaccagggtggctctgatcccgcagctttgatcgctggcgtggagaactggcgcatggagtgcgacttcgcatatggtatctcggtgtccctctacgagaccaacatgctgactaaagaacccatgggcaatcccatcgccgactgctacggaatggtagtgcgcggagactcagctgccatggccatggcagatggtgtcaactggggtgatggcgctcgtctggccgcccgttcagctgttcacggttgtttggactatctggaccgggcggtcttcggacaggcgctggagtgccgagccaccacaacccaggaggtttttgtgagtttgctgcgtagtctttgggagggacacggttgtatcctggaagttggaggagccctatctactctcaccatagccgttgtgctgccgctggacggagcgccagggaaatatgtcgtgtgctcgtgtaatgttggcgattccctgggctatgtgtactccaagaagcacggagtacgggaactaacacaggcatcccacgacatcagttccatgagggacatgcgcgatgcgttgggtgcccttggaccggcggatggcaacaagccagagctgagcaatctaaccttctcgatgacctgcattgaaagtggagacatagtctttttaacgtcggatggaatcagcgataacttcgatccagttgtgggcaagtttgccgaagcctggactccggatgttaagcttcagacgtcgggacatgtcaagcccgccaacttggcacccaaacggcagaacaagagtgcatccgccatctatgcccgtctgcatccttcgactccgcccacgcgaccagctcgtcagtccaaggcggaaagtccgcctaataatgcgcctagtcgaccaaagtatatgcgctcccaaacgcttattgaaccacgccagggattggtatcagctccaccgccatcggtggtgccccaacgcattccgaagtccatttcaggactgccccttgttaccggtccccagcggcatgctcttaccctctaccgcttagaggatctgctcagctatggcatcaacggcacgttttcgccctgcgtatcggcacgcaggctctgccacttgcttatcgattttgtacggatgataacgtcagccaggaggaagaccctggagcaaagggaactcttctataaactctctacgggaccagatggcgccaagcgtgaggtgcaactgaaccgcatgcagcatcgcgcggccaggaagcgtgtggtggacagcagcgcctttgtagcattgcccgggaaattggatcatgccactgtgatggcctacacggtgggcggcggagaggagcacaataatggaaatgaaaacggcgatgggggagctatttcgcctgtactgcaatccaaggagttcaaggagacgaatttctga

SEQ ID NO: 24486 - protein, 709 aa, DROSOPHILA; identical to SEQ ID NO: 20802

SEQ ID NO: 24487 - DNA, 3572 bp, DROSOPHILA
gcaagattgccaagttgcagcagacgtcggctgaggagttcctggatcgcgtggagcgtgtggtgaatcccatcaaagatgggcagagccaggccaggtaagctcagtattcgggcagaagacaatccatagctgatcccttgccaattccaggtcctactccgagcttctgaatcccaagcaaaaactgcaggctgagcaggcagctgaactgccccacaagaagctcactgatatcatgaaactggaactgattgaggacaagaccgccgaagaggtctcccagatttggctggagtaccataagaccaaggaggtcctggccgccactctaagcacatctcagtacgagaacctcatggcgcgcgccaaggagcaccccgtctttctgctgccactgccccgcagtgagggattcgagtttgtcatgctccagttcgcagccaacaccgtgcacttcactccgcttttggcgtaccaggtgcaccatgagaacgctccggagtgtctcacagtggttcactataccgaggtccaagacaagggtgtagttctcatgcgcggtgaatacgacactaaggtactcacagcccaggaggctcagtgtctggccaatgagttgcagatgttctacctgaagcccgacgagggcaagctgcgcttgctgaacacttttacccgtaagccggacgagttcaagcacatggatctaattaaggaagttgagaacatacagctggtctaggccctgcgattttaatcaaaataaatagaacaaacacgacaaggatatattaaacacgaaacagtattcgttttgcaaattttaagtcctaattaatagccaatgcacacaagatggagcactttgattcggtgatggaagatattggtaaatattcaaaagtcaagaaacgctttgcatgcacaagcatagctcacgcccacaggtttcggaagggtccatctctttgccactgtgacactcggtctcctgcagatgctcaccatccaagaaacaatgggcatgggcatcattggtccggcggccgtctgcgatctccgcatgaatgaggcgcagttggcctcgttaacagcggccggctttatgggcattatatgctcctcttacttctggggctacatcactgacaagaaaggtcggcgctggacccttttgcggaccattactataagcaacttgtgttcactggcctcaatgtttacggtaacattcactggcttctttgtcatgcgcttcatcacatgtattttgtgagtaccatgaggagatcgaagaccacagtgtacacttagaaatttacgctttccttcagtgtggccggaccaagcttcgtggcagccacctacctaagtgagttctgttcgcaccggattatggtccgttccataactcacttgtacatgtttactggctttgccatgatctcgtgccctgcgtgggctacgctctttctcagctcgggcttaatagagtttgaggagaagttagtgggctccttgacactaagaccttggcgggttttgggttgtttgtacattctgccgggtgtggttgcctttttgctgttgctccttttgccggaaagccccaagtttttgctaatgattggtgagacgaaaagaggcttagatactatggagtggatatcccgcaagaacaccggacgtactcttagcgaggatcaaatgaaacgtttgctcgcctaccaggagcacgttcaggtcaagcggcggaaggagcatcagaacttctttcgctccatgctggacgatgctatgcccctcgttcggaagccctacggcggctatttcacgtgcgtttgcatggttatgttcgtcctagggctgctgtaagtatcggttgaaggctagggtcgttatcttttgctgattccaacaattcacaggacacacggcctgggaatttggtatacggccatgcgaaaccgttgcaatatgaggcaggggaacacgaatggcatgaccttctgccaggtactttttgttccagaaacgggtccgtttattgaaactgaatcggacttggacgtggtaagccaagaaacctccgctaactagtctgccaacgtttttaaaaatcaacatattcataatttactaggtctgtagtgactcctttaagggcttcaacgattcctttgttctgggctttgtctatgtagtgctgtacaacatatcctgggcatcgctattctgcgtgcacaagaaggtgatgttcgtattctccctagtggcctcctcgacatttggatttctgcttatctttgccaccaaccacatgttgcagctcttttcgctcgtgttcctgatcgcttttcccggcatcataattgggctgctcggtggttccctattggtattcgtgcccacctacctgcgcggcaaagccctctgtatcagcctgatgtggtgccgatgcggagcggcgtttggggccatgttggtgggctccaagatccagtacaactgcgaactcttcctgttggcgatctccatactacccttgagtaagatgcgatgccaatgatccttgaatataagttatgccatttctaattgctttacctacagttgccgcttgtatggaggggtacttgccattgtgacttcagggaatatgtaataagtaataagtaattgctctctttagccatgttatccaaattaaagcgcggcccaaaagtaggcaagtatgtcatgtctttgggttttcattaaagcgacttgtagtatactcaaggtagcaagctgtatatttcattttttatattgctgaagtgaaaaccataatttgatctttgcaccatttatttaagtattaacatcgattattggggtaattcatttattcaaccgacatcaagactagagtaaatacttatttctgtagctgcaactacttgttctttcccagcacgttaaactattgccccgaaaaacaatttaaataaaaatgcgtatgctaataactatcatcatgagttagtgacgttgccatggtcgtctaaaatggatttagaatatctcctcctcattaaaaccgcgagcctgtaacataaatctataattttccgcccaaaagtcagttattctatgcttacaaattctcctccattgttggcattttttcctagatttatgttgtccatctcgtgattcctcaggatatccatcagcgatccgcgctttccgaaccgaacgcgggctctgtcgccgtagtaggtgtccagatcctgcaggaacttgtaggcatcagccatagtgttgacatcgttctttcgcggaggtctggagttggacgcctccactcggcagccggcggctaggagggcaagggccacacaggcaaccaggatgcaacgcattgtttggcacatagttctataaatggctaatgtatgtttatgtaggatgttttgtgtatcattatagagctatataatatcttaactcagttaagcttaatttaattatcactgttcttttagtaatttgtcatgagaatccgaaaggcatgctaacatttc

SEQ ID NO: 24488 - DNA, 1383 bp, DROSOPHILA
atgctcaccatccaagaaacaatgggcatgggcatcattggtccggcggccgtctgcgatctccgcatgaatgaggcgcagttggcctcgttaacagcggccggctttatgggcattatatgctcctcttacttctggggctacatcactgacaagaaaggtcggcgctggacccttttgcggaccattactataagcaacttgtgttcactggcctcaatgtttacggtaacattcactggcttctttgtcatgcgcttcatcacatgtatttttgtggccggaccaagcttcgtggcagccacctacctaagtgagttctgttcgcaccggattatggtccgttccataactcacttgtacatgtttactggctttgccatgatctcgtgccctgcgtgggctacgctctttctcagctcgggcttaatagagtttgaggagaagttagtgggctccttgacactaagaccttggcgggttttgggttgtttgtacattctgccgggtgtggttgcctttttgctgttgctccttttgccggaaagccccaagtttttgctaatgattggtgagacgaaaagaggcttagatactatggagtggatatcccgcaagaacaccggacgtactcttagcgaggatcaaatgaaacgtttgctcgcctaccaggagcacgttcaggtcaagcggcggaaggagcatcagaacttctttcgctccatgctggacgatgctatgcccctcgttcggaagccctacggcggctatttcacgtgcgtttgcatggttatgttcgtcctagggctgctgacacacggcctgggaatttggtatacggccatgcgaaaccgttgcaatatgaggcaggggaacacgaatggcatgaccttctgccaggtactttttgttccagaaacgggtccgtttattgaaactgaatcggacttggacgtggtctgtagtgactcctttaagggcttcaacgattcctttgttctgggctttgtctatgtagtgctgtacaacatatcctgggcatcgctattctgcgtgcacaagaaggtgatgttcgtattctccctagtggcctcctcgacatttggatttctgcttatctttgccaccaaccacatgttgcagctcttttcgctcgtgttcctgatcgcttttcccggcatcataattgggctgctcggtggttccctattggtattcgtgcccacctacctgcgcggcaaagccctctgtatcagcctgatgtggtgccgatgcggagcggcgtttggggccatgttggtgggctccaagatccagtacaactgcgaactcttcctgttggcgatctccatactacccttgagtaagatgcgatgccaatga

SEQ ID NO: 24489 - protein, 460 aa, DROSOPHILA
MLTIQETMGMGIIGPAAVCDLRMNEAQLASLTAAGFMGIICSSYFWGYITDKKGRRWTLLRTITISNLCSLASMFTVTFTGFFVMRFITCIFVAGPSFVAATYLSEFCSHRIMVRSITHLYMFTGFAMISCPAWATLFLSSGLIEFEEKLVGSLTLRPWRVLGCLYILPGVVAFLLLLLLPESPKFLLMIGETKRGLDTMEWISRKNTGRTLSEDQMKRLLAYQEHVQVKRRKEHQNFFRSMLDDAMPLVRKPYGGYFTCVCMVMFVLGLLTHGLGIWYTAMRNRCNMRQGNTNGMTFCQVLFVPETGPFIETESDLDVVCSDSFKGFNDSFVLGFVYVVLYNISWASLFCVHKKVMFVFSLVASSTFGFLLIFATNHMLQLFSLVFLIAFPGIIIGLLGGSLLVFVPTYLRGKALCISLMWCRCGAAFGAMLVGSKIQYNCELFLLAISILPLSKMRCQ

SEQ ID NO: 24490 - DNA, 5609 bp, DROSOPHILA
ggcctgctagtaactcctatgaattttcgattttcctacgctgttctatgtgtggtgtagccaaagcaaagcgaaaatttataaagatacccaacatacccagcaattaccagtgaaaaaaatgcatttcccaaacataatccaatttagtcaccaatgaattttgagaaaaaacaactaagtgagcaagacgtggctcttgataagtttaaaatttacgtgttttgattaggttcctggcaatcgggacacacttcatccttgttggaccactttacactcgatcttctgctcttcgacttgttctgatttccaggtgcattgcatccacaaaatgtgccaattgacttgggctggaagatgttgactttgacctggccgctttccggattcagttcgattggcagcctcagggtcactgggtcgccgattaacttgcactgcctgtccttggggcaaggacacttgtcgtccgtatgtagacgggcactgacctccagggtggccggatagaaaagtgtcatcaaaggacgagttggcacggaatcagtgcctccgtagcaccttagcaaccgctgggtggcagtggctgcccgctccaaaacggcccgaatctggacaggatcgtcaaatcgaggcgcttgcttgcagatcacttcatcaccaccgcccacttccagatctggagtctcctcgtcgtcactgcggcagtcataaaagatgtctaagtcctcaaactcgccaatcataatgctcaacgtttaaacaatttggattaatctgatgccgttacgaatctgccgataaaacagtctactctatacaaagacaataatctcagagaactattgatgttgaattataatgttcctggttagcttcctataattagatctaatctgaagatcttatacacggcaaccttcaaggagaccgaaataagggtcagtcacttggtaatttacatttatgtttggtgtatttacatagaaataaagctctatttcttagctctgaacaaggtggaattgctcctctccacgggaatgtagacagtgcagcagaactccgattccgccttgtggttatggaagagcagaagtcttgtgtggattcgctgctcgatttgttgcaaaagcgccgaagatgcaggcttaagggccaactttaggttatggacacagtccagagcagccacaaatccttcatagctctcctgcgtcttctgagtactcttttcaatccacatgtcttgcaaaaattcaagatgctcacggaaatcctctccgccctcccataagtgaagaagacgggtccggaatgcggcaacatcgaggtatccgtccacggcgccctgaatcaaatccacgaagcacctggttctcagaggcatcaggagcagtcgttgctccacacccacatcgacctgtgttccacactcaatcgtctctggttgaacttgcatctccttttcattgcactgtgtcgtgacctgaacctcctcctccagggttttcacctcgtccgtttgtacaaatgacacgctggccagagattcccaattaagattaacaacttcagcgtgaagggagtgcagggaaattccggatctggccgagtgaaccgagtgaactgacaacagagagtggaaactactgcaggagaggctcttttgaagagggaaacccagagttcgattgagcgtacgtggacggtaaatgtgacggaagaggaaacgctgtatttttcgctggtgactgtttggtcttggatgcttctccttcttattctttgctcgctttttgcttttctttttgagctcgggttcgtgctgctgatccacagaacaaacctcgttgaacatctgtctcatggaatagggcaccgcggtgatcttcttctcttgctcatctgttggtcgaattatctgcggattcgccctgctgtctgattcaccaaggtgtagttcagatttttgggcagatcccccagctaattcccgtactattgaccggcatgaggatgtcacgacactaacataactagatttcttgctgctaacgagatttctttcttgactttccagatattctgaatcgacttgactttctagacttcccggattttcttgaatgacctgattatcttgagtttcttgatttccctggcattctagactagtcacagttgatagtcctgtctcaggtattttttctgaggaggcatcctggaccgtagcccaactggagccttcgggttccgaaccagctggcttggcgggctctttgctttggagactcacctcggacggactctgtgagagaagggtatccgccagttgctttacactgcaggcaattgcttggaagtccttgtgcagtggtagaccaaaatcacgaccctgtaatgataaggtgctgtaaggtttcagtaaaattctaaatactaccagacctacctcgagatcgagtagggccacgcccagtccctggctggcagcctggaggctcggtacctcatccttcttggcccgcttcgcaggactatcatggagttcatcggccaggctgtagccctcgggcataacgcccagtttgcgttccaagagctggcattgttcgtccttggttcgcagctcgtcctccaggcagcgcgcccgctcctccgaatccctcatttggttctccatctggcggattttgttctccagcgtgcccacctcctctttcagctcgccatttgtgacctcgatgtgcaggtaatcctttttgatgttgaagatctgggtgcgcaaagcatccgtctcctgcctcaactgatcctcggtgttctgctgcaccttcttggcaaagataaggtcatccatcagtgcctgggttttgcgcctctcgttttctagagcctctgttaggggcatcttgtgttccgcctccttttccattttggccattagactctccaagctgcactgcagagtgcgattctcggtgagcaggtcgcgatgctccttggtcatgcggaccaggcaggacttcaatgacagttccccctcctccagctgctggatcttttcggtcgccgctcgggaatcctcccggaggcaatcttgcagttgggctatcttctgcttgagactggcctccttggcctgttgggcctcctcgcgctccttgtactgctgctccagatctacccagtgtgagtctgctgtttccatggcttcgtagtgccgggcatttagctctttcagttggctacgcagactcttgacctcttcctttaggtaaacgatctcccgttcctcgccggaatcggtaaatcccgcttgaccgaggtcaaactccgttgtttggatcttggcactgaaatctcgatcctggtgtatagaagaagtgtagcccgaggagaggcgggggctgcctcccggggaggattcctcgttgcccattttggctagtgataacaagcggaagattaggagtaatggaagcgatcttctcagatcctgaagctcctttctggcttgcttcctttcggcctgcagatgctccagttgggtttcagctgccgctagatcctctcgaaggattagtacctccgccctgcaatcctgatacttggcgcctagtgcttccttgccgaattccaactccacgttgcgctggcgaagaatttcaagttccacctcgttacgctgcaaatggagtcgtgtatcgttctcggcctcctcaaactcgcacttggcctcctccaactgggcgttttgctcgattagcaattccactcggtccgcaagctctttgagatccttctccagctgcagttcccgctgcagtctctgggccaagtgccgtgcctgggtctcgccgctgctctcgtagatcagcagcttgccctccaactgctccaatctctcctgatagaactgcagatgcgggtggccaatgggattgggattcgaaagcagatcgcactctacgaacactccgctctcgctgaggctgctgctctgccacgagctcacctggttgcagtgcctcttgcttggcgtgggcggggctgtgggcgtggcacagttgctatacggctgaactgtggctacgatcctgtggttgtgactttgactgtggctgtgactgtgactgtgactgtgggttgaattgtgccttttgggagtttccgtccggttctgtatgtacgggaacaaaataaaacttgaattttagcgatttctttgctcaaaatattaacaatgtttaaataagagtaatgaaaatagtgagctgggaatcaataaatttatggattgtatatatttgcaacaacgtatgtaagttactccacaaatatctgacaatcattaatgtgctagctgtgctgtggagtttctagtaagttgctagtaaggtgtaaacctaacaaaagccgaaacttgagggctgcgggcattacacacctgatcgcctggcatcatggtatccagatccagttgctggacgcactgcagcaattgttgcaagcagcgcttgtcccgatcctccagccgctgggcagactgctccagcagatcctgcagactctggcagtggccctcgcaggtgctctccatctagattgaaataaatcggggatttcgggggtgatgtgattagatataatccgctgattaacagttacttaggcaaattaacactggcttaatgctccactgccaccactgacacactctcatgtgcacaacgatctacatctaatttcactttgctggctgctcgaataattacttttggttattgcaattagacgagtgaattggattttcaagctgaacgacttcactgctgctggctgccagctgaaactgttcggctctagaaattaagcgtaccgaaactgaaaagcagcaaaaatgattgacggaatagggcatcgaactggagataccccttaagagattttacagataactgagcattatagctaagatatttatgtgattgaatataatacaggattatgtgaccaccaaatcgattgaaaatatttctaagcccccatatcatcgatatacctttatatgctccatttaatggtcatcacaaaggtgtggggccatcaaagcctttttgctcgatttggttttctatgagcaatggcaaaacactcataagtataacaagatacatagatggcatccacttagggcgctacccttataagtagcgttttaagcgcttgaacacggatttgggtaaaacaactcttagacctaagcgtctacatggccaagaagcgactctagcatggggaaaattgtaggcgttgatcacagatcgaggtagtgacataaagtcaatgtgcgcagatagagtcactaacaattggaaagtttaaccacagttttcaattcctgaatattttataacaacacaggctaatgagttagccattaactgcggctgatccagtgaaacaatttcaattggaaaatacagaaagattgtttgtgccgttaaaccaaaacaatttccgtgctggcttagatgccaaacaaaactaaaagagactccagcacacatagttggccaacatcgctagcttggctctga

SEQ ID NO: 24491 - DNA, 3342 bp, DROSOPHILA
atggagagcacctgcgagggccactgccagagtctgcaggatctgctggagcagtctgcccagcggctggaggatcgggacaagcgctgcttgcaacaattgctgcagtgcgtccagcaactggatctggataccatgatgccaggcgatcagaaccggacggaaactcccaaaaggcacaattcaacccacagtcacagtcacagtcacagccacagtcaaagtcacaaccacaggatcgtagccacagttcagccgtatagcaactgtgccacgcccacagccccgcccacgccaagcaagaggcactgcaaccaggtgagctcgtggcagagcagcagcctcagcgagagcggagtgttcgtagagtgcgatctgctttcgaatcccaatcccattggccacccgcatctgcagttctatcaggagagattggagcagttggagggcaagctgctgatctacgagagcagcggcgagacccaggcacggcacttggcccagagactgcagcgggaactgcagctggagaaggatctcaaagagcttgcggaccgagtggaattgctaatcgagcaaaacgcccagttggaggaggccaagtgcgagtttgaggaggccgagaacgatacacgactccatttgcagcgtaacgaggtggaacttgaaattcttcgccagcgcaacgtggagttggaattcggcaaggaagcactaggcgccaagtatcaggattgcagggcggaggtactaatccttcgagaggatctagcggcagctgaaacccaactggagcatctgcaggccgaaaggaagcaagccagaaaggagcttcaggatctgagaagatcgcttccattactcctaatcttccgcttgttatcactagccaaaatgggcaacgaggaatcctccccgggaggcagcccccgcctctcctcgggctacacttcttctatacaccaggatcgagatttcagtgccaagatccaaacaacggagtttgacctcggtcaagcgggatttaccgattccggcgaggaacgggagatcgtttacctaaaggaagaggtcaagagtctgcgtagccaactgaaagagctaaatgcccggcactacgaagccatggaaacagcagactcacactgggtagatctggagcagcagtacaaggagcgcgaggaggcccaacaggccaaggaggccagtctcaagcagaagatagcccaactgcaagattgcctccgggaggattcccgagcggcgaccgaaaagatccagcagctggaggagggggaactgtcattgaagtcctgcctggtccgcatgaccaaggagcatcgcgacctgctcaccgagaatcgcactctgcagtgcagcttggagagtctaatggccaaaatggaaaaggaggcggaacacaagatgcccctaacagaggctctagaaaacgagaggcgcaaaacccaggcactgatggatgaccttatctttgccaagaaggtgcagcagaacaccgaggatcagttgaggcaggagacggatgctttgcgcacccagatcttcaacatcaaaaaggattacctgcacatcgaggtcacaaatggcgagctgaaagaggaggtgggcacgctggagaacaaaatccgccagatggagaaccaaatgagggattcggaggagcgggcgcgctgcctggaggacgagctgcgaaccaaggacgaacaatgccagctcttggaacgcaaactgggcgttatgcccgagggctacagcctggccgatgaactccatgatagtcctgcgaagcgggccaagaaggatgaggtaccgagcctccaggctgccagccagggactgggcgtggccctactcgatctcgaggtaggtctggtagtatttagaattttactgaaaccttacagcaccttatcattacagggtcgtgattttggtctaccactgcacaaggacttccaagcaattgcctgcagtgtaaagcaactggcggatacccttctctcacagagtccgtccgaggtgagtctccaaagcaaagagcccgccaagccagctggttcggaacccgaaggctccagttgggctacggtccaggatgcctcctcagaaaaaatacctgagacaggactatcaactgtgactagtctagaatgccagggaaatcaagaaactcaagataatcaggtcattcaagaaaatccgggaagtctagaaagtcaagtcgattcagaatatctggaaagtcaagaaagaaatctcgttagcagcaagaaatctagttatgttagtgtcgtgacatcctcatgccggtcaatagtacgggaattagctgggggatctgcccaaaaatctgaactacaccttggtgaatcagacagcagggcgaatccgcagataattcgaccaacagatgagcaagagaagaagatcaccgcggtgccctattccatgagacagatgttcaacgaggtttgttctgtggatcagcagcacgaacccgagctcaaaaagaaaagcaaaaagcgagcaaagaataagaaggagaagcatccaagaccaaacagtcaccagcgaaaaatacagcgtttcctcttccgtcacatttaccgtccacgtacgctcaatcgaactctgggtttccctcttcaaaagagcctctcctgcagtagtttccactctctgttgtcagttcactcggttcactcggccagatccggaatttccctgcactcccttcacgctgaagttgttaatcttaattgggaatctctggccagcgtgtcatttgtacaaacggacgaggtgaaaaccctggaggaggaggttcaggtcacgacacagtgcaatgaaaaggagatgcaagttcaaccagagacgattgagtgtggaacacaggtcgatgtgggtgtggagcaacgactgctcctgatgcctctgagaaccaggtgcttcgtggatttgattcagggcgccgtggacggatacctcgatgttgccgcattccggacccgtcttcttcacttatgggagggcggagaggatttccgtgagcatcttgaatttttgcaagacatgtggattgaaaagagtactcagaagacgcaggagagctatgaaggatttgtggctgctctggactgtgtccataacctaaagttggcccttaagcctgcatcttcggcgcttttgcaacaaatcgagcagcgaatccacacaagacttctgctcttccataaccacaaggcggaatcggagttctgctgcactgtctacattcccgtggagaggagcaattccaccttgttcagagctaagaaatag

SEQ ID NO: 24492 - protein, 1113 aa, DROSOPHILA
MESTCEGHCQSLQDLLEQSAQRLEDRDKRCLQQLLQCVQQLDLDTMMPGDQNRTETPKRHNSTHSHSHSHSHSQSHNHRIVATVQPYSNCATPTAPPTPSKRHCNQVSSWQSSSLSESGVFVECDLLSNPNPIGHPHLQFYQERLEQLEGKLLIYESSGETQARHLAQRLQRELQLEKDLKELADRVELLIEQNAQLEEAKCEFEEAENDTRLHLQRNEVELEILRQRNVELEFGKEALGAKYQDCRAEVLILREDLAAAETQLEHLQAERKQARKELQDLRRSLPLLLIFRLLSLAKMGNEESSPGGSPRLSSGYTSSIHQDRDFSAKIQTTEFDLGQAGFTDSGEEREIVYLKEEVKSLRSQLKELNARHYEAMETADSHWVDLEQQYKEREEAQQAKEASLKQKIAQLQDCLREDSRAATEKIQQLEEGELSLKSCLVRMTKEHRDLLTENRTLQCSLESLMAKMEKEAEHKMPLTEALENERRKTQALMDDLIFAKKVQQNTEDQLRQETDALRTQIFNIKKDYLHIEVTNGELKEEVGTLENKIRQMENQMRDSEERARCLEDELRTKDEQCQLLERKLGVMPEGYSLADELHDSPAKRAKKDEVPSLQAASQGLGVALLDLEVGLVVFRILLKPYSTLSLQGRDFGLPLHKDFQAIACSVKQLADTLLSQSPSEVSLQSKEPAKPAGSEPEGSSWATVQDASSEKIPETGLSTVTSLECQGNQETQDNQVIQENPGSLESQVDSEYLESQERNLVSSKKSSYVSVVTSSCRSIVRELAGGSAQKSELHLGESDSRANPQIIRPTDEQEKKITAVPYSMRQMFNEVCSVDQQHEPELKKKSKKRAKNKKEKHPRPNSHQRKIQRFLFRHIYRPRTLNRTLGFPLQKSLSCSSFHSLLSVHSVHSARSGISLHSLHAEVVNLNWESLASVSFVQTDEVKTLEEEVQVTTQCNEKEMQVQPETIECGTQVDVGVEQRLLLMPLRTRCFVDLIQGAVDGYLDVAAFRTRLLHLWEGGEDFREHLEFLQDMWIEKSTQKTQESYEGFVAALDCVHNLKLALKPASSALLQQIEQRIHTRLLLFHNHKAESEFCCTVYIPVERSNSTLFRAKK

SEQ ID NO: 24493 - DNA, 5440 bp, DROSOPHILA; identical to SEQ ID NO: 19024

SEQ ID NO: 24494 - DNA, 2219 bp, DROSOPHILA
tggccgtcgagaaaaattgaagtgaacgcaacgccgtgtttttcatttgccaataaaacgttaacagctcacgaaatatcgtaaagcgtgcccgcaaacgtcgccaaatatccctcattacccgctggaaagcgacgcgagatcgacaacgtgatgaagaaggcgcgcgccaacaccaccaacgattattgggacaagaagctgatcgaggcagaggagaaggatccaaaccgatggcgccacacgggctacaagaagatgtacatccagggggagagcagctctggagagagcgaacgcgacggtcgcgaaggtcgtgagggtggagcaccgccctacggtcgttatccgcccacaggtggaccgccgccaggtccaccgcctccgtcgcagcgttacggacgctctcgttcgccgcactcacgcagtcggtcgcgtttgcgcaaatcgccaccgctttcaccacctccgcgtcgtcgttcaccgcccatggctatgcacagtggcatggatcgccgtggtggacctcgctcgccgccaatgccacgatcgcccaacaatagccacgatgccctcatgcgtcgacccggaaacggccacggcggaaggccccgatcaccgccggaacccagtggtggctcgtcgtcctcgtcgttgcgacgcaagccaaacgcgtcgcgttctccgctcggacgtcgccggtctccaccgcttcctccgccctcgtcgtcggcaatggagaagcgaggtccagtcgcccatatcctgccgcgctccaagcgaccgccatcgccaccaccgaggcactcgatgcgttcgcgatcaaacagctctatgagcaccagctccgatgattcctgctccctctgctcacccagtcatcgtcacagatctcgatcccgcggtccgcgctcgccgccacccaagccacgtggccattatcgttcgggggcgcctccgccccctccgtcggaatcacatggccgtatccatggtcgccccaccactccaccgcccgtgcgcggaggtggaggcagttcggtttccgccatggagaagtatcgccaggcgaagatgcgtcacatcgggcatgaacgtgtcgcctcgtcggacacccacatgaagatcgcgcggtcctcgcgccattcgcctccgccggaagatccgcgtcttaagcaccgcccgccagagccaccagagccggcgtcagcgccagctgcagcacctacaacacaggcaaaaaagaagaagaaggaaaaggaggtgaggccacgcattaaaattgaaggtgagaaacgcaaaaaacatccgagcgggacgtccagtggcaccggagctaacgcggcaaactcctcctcggactcggacgattcgaacggctcggacagcgacgaggtcggcacgttgcccacattctcggctactacgcggctgacgctctcggatcgattcggcaaaatggcgcagtggagcatcgatcgcagcaacatggagaacatgcgcatcaccaaagactccgccggtggggccctcaaagtaatgattgaggagggcctggagtcgccgccgcgtcgctattcgtattcgccggcaccggccgggcactttccggaggagttagccaccacagcaccgtcgggaatgctgtcgtgggacgatgtgcgcgtccgttacgagtactacaagagtcgtggttacctaagagacttggacctgaaggactatatcaagtgggaggagtggtggtataaatatcaggaatggttgaaacaggaacgctactatgagtactgggatcgcagtcagcaattgcgaagacggcgcaaaaagctgccggtaactcagcgcttgaattgagtgcccctatcatttgaatcatttcattaattcttttaattcccaacttccaattcagctcatttacttgacctactatttccttccttctcgttgtatcttaatcatttcctcatcccaacttcccccgtttgtacatttaaaatgtatgaaactgcacttgtcaacttatattttgataatcaatataattaaaagccaagcacccggagatgtttggctcttggcctctgacatcctgttgttggtgtagtggggctttcattaacactgaactttgtaagttttttttcgagtgcatgttgttcagtacaacacacccatatacttgtaaacgcattaaacaacagtcggtacataaa

SEQ ID NO: 24495 - protein, 567 aa, DROSOPHILA; identical to SEQ ID NO: 19026

SEQ ID NO: 24496 - DNA, 3617 bp, DROSOPHILA
ttttctccctcaaaacagcaagtttatactacttattaaccaaggtaaaattaaaatgttttacaactgtcatcggaaaataaagcattccatgttttaaaaacacccaatcgaatggattatgtaaaagtattggattttttttattttgcccacttagtagcaagtggcgcttacggatgcccgatccatggggcaaccataaacttggatgtctgtgattagggtaaggaaacataacacttatttcacaagaattcgccagctgcttaaatggtacatgtaaaaatattgaagtatttttatttttctagacattctgagtggcgctcgatgtgtacgtacatacaactctttggattctgtgtgtacagtcaatttacgatgcccaagccgccctgagcgaattccatatttacaagagaagggggtggggattgggaggggggggggtgtcggaaagggttggggccttaaaatacctaaactcaactacactcaacaatttgcttatggtcactacttatacgccttatacaccggcggttgcactttaagcttcaacgttatagatttggccaggacaccagcggaggaaccacgatcccgacggccaatccccgcaccgaacactccttccgtgctagccggaagtggatcggcggtgggcgtggccgcaaggaacggccaaccggggcgtcatttgggatatgagccgcgccggagccggcagtctgctgtgcccggaattcgtgggggaatcgttcacgggaccgaccagcagcccctgccgggcggacgcagttgactagtggcggacaaaactttcaaagcaatcgaaagcgaaacctttgtacacacttaatagattcctgcgggtcgagttcgtggtcagttcgtcgtcaatgctcagtgtccagtaatcttttcgtttgttttttggatgagaaaatgagggaaacttaaacggctcggtaaaaaagaaaggcgtggcagcgcgctaaacaaattgctctgagctgttggcggacagctccatcagccgccaggcagccttggggttgagttcgttgcggtcgcggcacagcacccagacgtagtgaacccgcatcaccttctccggatctccctcgacgacctgactcttctggtcccgcacgcacataatctgctgggcttggaacgtgataatcagtaccgggccctgctccataaccttgcccattgccagttcaatgttctcgatgtcgaggatcttggagtccaggtacacgccggccttcttagcctccttaatgggatttgcgataatattgaaagtgctctcaaagcaccaatccttcagaatctccagatccccacggacaatcgattccagaatatttggaatgatgtccgtttcgcaatcgcggaggaaatccttctgatcaaagctcggatcgattttcaccagctccgtcatcgtttccgaaagctctgtctttgaaaagagtccacccatgacgtcggacactttatcggtcagcaggcgggaggcacgaataacagggttctcggactcgtcgtatttaaccttccagtcaagcaccttgttcacgtaggtattgttgttcttgaagttctcccacgactcgtagaacttggagtccttgtgcagctccatacctgaaaagtaacattacattatggccatgacctttgatcttattgaaggaaaaagatggagactcaccagtggcttccgtgttgggctccacaacgcgatcactatcgctcatgacgagctggacgcgctttcgcaacttggcaggagcacgatagacacgattctctatgctcgcgctgtccatctccttcttgatggtcgtcgtcgtgttagagatagcctggaatgcgctggtctggcccagcttgccactggtgtcggagatcgtgtcgctgacccccctagccttcttcgagagctcctcggtaacctttttggccaggtgggatttgctggcgtcctccagaacatcgcctacgcgctccttgatggcgcccagctgctcctttagcatgctagacgacttttgcgcctccgattcgacaatgttaaacttttgccgcgccgatttcagggcatccgattcttccagcttctgggcctcctcacggaactttcggatattgtccttgatctccttgttcttatccatctccgccttcatgttgtcgaagaactgcgagaagaagccggccctgcgacctggcgcactataaaagcggggctgcggagtaaagtcatgacttaggccggttgcgccatggggttttatgagccaaactctaacctgctgctgctgcaggttctgcgaggcctgctggcacgtgaagagacaggcgcgatcccgcacaagggcagctattctgtactgcaaggagaaaaaatcattgaaagcttcgaccgttttaacctcgaaatatgcacatgtaaggacggatgtgagcgaacgccagtgatgaccgggatcagaggtaacctaccatggtggggattaggtgaccgttcgcaggtagtttgatcggagcgaatgttcggggggtctggcgtcagaggctctaaactttatgtaattcctgccgcgaaacacgcacgtatcaagcagtcagctgttctcttcgttcagcgcgcgccggtgttgcaaaacgagcgctcttcgccggcggtggctcgtgcgatagttcgttttgtcggtaatccgatgttgccgcgccgatatcatgtgatgttgtcacagtgcgcgaaattcgaatggtggtgtgcagtgattgtgttgtgacggcgagtggcgcgtgtgggtgcttagttttgggagatgttttcgtatttttttgttgataactcaggctttgttgctgtgttgtagtactattttccattgcgcggtgtccagcttttaattagtggcacatattcttagcaagtaaaaattattttgcatactattaaatttcttataaattattttctaaaattaagtttaccttttcaattttactaaaaatatcgatatatttattatcgctggaaaactacattattccacctctaagcaagaaccgttagttggcgcgtagctttaccacaaaattcctggaattgccgtacgcttcgcagttgtttcaagttgtctaagggacatacgattttttttgcctctgcgtcacgattttaacccaaaagcgagtttagttacatgtacattattattagataaagaagtatcgcgaatacttcagttgaataaactgtgcttggtttttgggtgaggatttgtggaaagtagagtgcgcgataaccgtaactttcgacccggattttcgccatgttccgcagcaacttggagggcagtggcgcagcagcagtaggtgttgcaaatcccccctcgttggctcagtctggaaagattttccaattgcaggataacttttctgcttttcacgccagaggagggctcaacattctgggcctgcaggacatgtatttggataccagtggggccaactcgtcggccactttgagtccgcccattacgccggtgacccctgacccgtcgacgtctgcgcagtcgacg

SEQ ID NO: 24497 - DNA, 1375 bp, DROSOPHILA
attacataaagtttagagcctctgacgccagaccccccgaacattcgctccgatcaaactacctgcgaacggtcacctaatccccaccatgtacagaatagctgcccttgtgcgggatcgcgcctgtctcttcacgtgccagcaggcctcgcagaacctgcagcagcagcagccccgcttttatagtgcgccaggtcgcagggccggcttcttctcgcagttcttcgacaacatgaaggcggagatggataagaacaaggagatcaaggacaatatccgaaagttccgtgaggaggcccagaagctggaagaatcggatgccctgaaatcggcgcggcaaaagtttaacattgtcgaatcggaggcgcaaaagtcgtctagcatgctaaaggagcagctgggcgccatcaaggagcgcgtaggcgatgttctggaggacgccagcaaatcccacctggccaaaaaggttaccgaggagctctcgaagaaggctaggggggtcagcgacacgatctccgacaccagtggcaagctgggccagaccagcgcattccaggctatctctaacacgacgacgaccatcaagaaggagatggacagcgcgagcatagagaatcgtgtctatcgtgctcctgccaagttgcgaaagcgcgtccagctcgtcatgagcgatagtgatcgcgttgtggagcccaacacggaagccactggtatggagctgcacaaggactccaagttctacgagtcgtgggagaacttcaagaacaacaatacctacgtgaacaaggtgcttgactggaaggttaaatacgacgagtccgagaaccctgttattcgtgcctcccgcctgctgaccgataaagtgtccgacgtcatgggtggactcttttcaaagacagagctttcggaaacgatgacggagctggtgaaaatcgatccgagctttgatcagaaggatttcctccgcgattgcgaaacggacatcattccaaatattctggaatcgattgtccgtggggatctggagattctgaaggattggtgctttgagagcactttcaatattatcgcaaatcccattaaggaggctaagaaggccggcgtgtacctggactccaagatcctcgacatcgagaacattgaactggcaatgggcaaggttatggagcagggcccggtactgattatcacgttccaagcccagcagattatgtgcgtgcgggaccagaagagtcaggtcgtcgagggagatccggagaaggtgatgcgggttcactacgtctgggtgctgtgccgcgaccgcaacgaactcaaccccaaggctgcctggcggctgatggagctgtccgccaacagctcagagcaatttgtttag

SEQ ID NO: 24498 - protein, 428 aa, DROSOPHILA
MYRIAALVRDRACLFTCQQASQNLQQQQPRFYSAPGRRAGFFSQFFDNMKAEMDKNKEIKDNIRKFREEAQKLEESDALKSARQKFNIVESEAQKSSSMLKEQLGAIKERVGDVLEDASKSHLAKKVTEELSKKARGVSDTISDTSGKLGQTSAFQAISNTTTTIKKEMDSASIENRVYRAPAKLRKRVQLVMSDSDRVVEPNTEATGMELHKDSKFYESWENFKNNNTYVNKVLDWKVKYDESENPVIRASRLLTDKVSDVMGGLFSKTELSETMTELVKIDPSFDQKDFLRDCETDIIPNILESIVRGDLEILKDWCFESTFNIIANPIKEAKKAGVYLDSKILDIENIELAMGKVMEQGPVLIITFQAQQIMCVRDQKSQVVEGDPEKVMRVHYVWVLCRDRNELNPKAAWRLMELSANSSEQFV

SEQ ID NO: 24499 - DNA, 2943 bp, DROSOPHILA
aggaagaactgagacagtgcgtccgtgcaccattgagtcatccgcctgggtcaaggccatgcagaacccaaatacaaccgtaagattttacaattttatgtaattagatcaaaggctaatccatatatccatgctgtacagaacgatgagcgtgtgaagatgatgcaggctgcctgcgatcgtcaccagttgggctaccaggatgccatgtgcggtcgtggcatcgacaggcatctgttctgcctgtatgtggtctccaagtacctggaggtggattcacccttcctcaacgaggtgctcagcgaaccctggcgcctctctactagtcagactccgcacggccagacgcccaagatggacctgaagaagcatccgaactgcatcagcgctggaggcggctttgggcccgtggccgatgatggttacggtgtgtcgtacattattgccggagagaacctgatattcttccatatctcagcgaagactacgtgccagcaaacggtaatgaggagccctgattcatggcatggagcacagctaatcgaattgttttctttacaggatgtgcaccgcttcgctcagaacatatcgcaggctctgtcagacattcgcagcatgttcgagcagcacatgaaggaccatccgaagcccgccaaatcactcacaaacggcaaatccacataatcccgtttagtccatgtagtcgagattcttgttagcatttgtttttacccccctagttggtcgttttaaacacatctgatacatccgtctagttcgaaatgaagtgcaaaagtcgtcgtgagagttatacataaacaatgcaattttttataaacaattgtgacttggctggttttaagatttagtctttagatacttttgcacaatatttgatgtttctcaatcaattagtctgtaatcgaagaaatcgcgtaaccttaagtgctataaatatatttcattttaagcgtacgattggcctttgtctctatctctatcacgtcgccaaaggattggcatgtatagttactccattgatcttcttgtccacatggggacgatagttcttgggattgacgggcagtttctccagttcatccagggcatcgaatccatcgatcacacggccaaagagcgtgtacttcaagtcaagatttggctgggcggcataggtaatgaagaactggctggcattggcgttcggtccgttgttggccatggaaaccattcctcgatcagtgtgctgaagaattaagtggtcaagaattaaaggatttcttcttgtatcttgggaatcttttagactgaaaaacgaacccaaccacatgacatattaaaatgtaaaatgatatggatgtcaacatacattttgagattcatgtgctggttacattctaagattagatacaatataccctttaaagccggaatgctgggtattaaagccagctgtcatggcgcaactgaatgagggtttttctggtaaaacctaggtagccggctcaccttaatggtctccttgaattcgtcgtcgaacttctggccccaaatggactgtccattctttccggtgttcgtaggatctccagtttggacaataaatcccttgatgtttcggatgaagacgcagccgctgtaatagtcgctcgcacacagggcgaggaaattttcgcaggccttggggcaggcatcgcagaagagctctattttgaggtcacccacgtcggtgtgcagcgttacagactgcaaacaacacaacaaaatcggttaaaactgtaagaaatcagatattccaacttttgtttaccattttaaaagtgattgtgcagccctcgtttcgatatgcaatcggtccattaacgataacagaaatcgaaaacagcactatttggtattcccgtgaccgaaggtcacacttttaggcgcgaattctgccgcataaagtgatttttctcttcgcacttcaactaatcaacagcggcacattaagtaaacaggatgaagtgcaagatacccgagatttcgtggcacaaccgcgatcctgtcctgagtgtggatatacagcaaaatggcctggggctgcgttctccgacgatatgccgcctagcctctggtggttcggatgcccatgtcctcatttggtatgttaaccgaagtgatgacgccgagggcgtggatgtggagctggccgccgacctgtcccggcatcagcgtgccgtcaacgctgtccgctggtcaccgaacggagaactgctggcatccggcgatgacgagagtgttgtctttatatggaaacagaaggccgaccacgaagttgtcaacattgtggacgccgatggctgcagtgaacaggacaaggaggtctggttgactctcaaggtactgcgcggccatcgcgaggatatctacgatctcagctgggcgccgaactcacagtttctggtcagcggatccgtggataacacagcgatgctctgggatgtgcacagtggcaaatcactggctattctagatgaccacaagggctatgtacagggcgtggcatgggatccctgcaatcaatacatcgccaccatgagcaccgataggtaagcagtacagtccaaaatgttcgaactttaatcgaatggagttaaatttcttttagacaaatgcggatatttgatgccaataccaagcgagttctgcaccgagtcagcaaatgtgtactcccagtaaaagaggaccacgagatgcacggcaagagcatgcgattgtaccaagatggaaccttgcagaccttctttcgccgcttatgcttcacacccgatggtaagctgctgttaacgccgtcaggaattaccgactacgatggtgttgtgaaacccataaacaccagctatgggtttagtcgccatgatttgtccaaacccgcctttgtgctgccctttcccaaggaat

SEQ ID NO: 24500 - DNA, 507 bp, DROSOPHILA
atgcggcagaattcgcgcctaaaatctgtaacgctgcacaccgacgtgggtgacctcaaaatagagctcttctgcgatgcctgccccaaggcctgcgaaaatttcctcgccctgtgtgcgagcgactattacagcggctgcgtcttcatccgaaacatcaagggatttattgtccaaactggagatcctacgaacaccggaaagaatggacagtccatttggggccagaagttcgacgacgaattcaaggagaccattaagcacactgatcgaggaatggtttccatggccaacaacggaccgaacgccaatgccagccagttcttcattacctatgccgcccagccaaatcttgacttgaagtacacgctctttggccgtgtgatcgatggattcgatgccctggatgaactggagaaactgcccgtcaatcccaagaactatcgtccccatgtggacaagaagatcaatggagtaactatacatgccaatcctttggcgacgtga

SEQ ID NO: 24501 - protein, 168 aa, DROSOPHILA
MRQNSRLKSVTLHTDVGDLKIELFCDACPKACENFLALCASDYYSGCVFIRNIKGFIVQTGDPTNTGKNGQSIWGQKFDDEFKETIKHTDRGMVSMANNGPNANASQFFITYAAQPNLDLKYTLFGRVIDGFDALDELEKLPVNPKNYRPHVDKKINGVTIHANPLAT

SEQ ID NO: 24502 - DNA, 3939 bp, DROSOPHILA
cccacaaaagttgagttgtactatgaagtggtaagcaagtagaagtacacttataaaatggatatacataccttgattttttatacccaaaggttgctctactggaacttttggtgcaccacgatcaaatcgactgttcccattggtttcagcggacatcggaaatggccaataaacttttaggcattgacaagagcattagctttgctaatgtttacttcaaactactagcgcgtgcgaatggatccaccaaattacttatacttaggggactgcctccaaatgctggatgcacaaactggtatcgcgagaaattcctcgactcctgcaaagtcagcgatgacgcccaactaagagcatttagtgcccgccatgcaatatacccattgtttaaggcattgcatgtcgaacccggaactgttgtcgacggttcatttgatctcagtaaatcaagctacattcgccatggagatcataaatgtccggtctctagtctaaaacgtcgacggagtgaattggcgcctaaagaaatccttcgtaatatatatgaggcttctcttcaactgacccagtgcaccgcgaatttcgatgctgccgactgggaattgctcaagaaggtaatggccaatttgagtggaattgtaccctagctccctgctctatgcttttcgtatcgctcacttacctaaatcaattaattaccacctgtgtactcattttgaataagaatccctaattaagatgttgtgcgataaggcggttaaaaataacgtgtaaataaagacagtttacctgcaagcgaagcggatgtaaagctaacgaaactgcctgcgaaataggatcgaaaggctaccctggtgatgtctgatcgtcgggatggtgccattgcactcagcgaagcgatgacaatgcccagggatccgggattggcaaacccacaaagggcaaaagtggctatggcagcgctccgcggctataagaatactagttttaaaataatctataagaatagaatatgcagatgggtactcacatcaacctttttatcgctaaccaatatgcccaggtttctataagccacaaactcgtttatgaacgacttttgggccaccaccaggccaattgcttgacaatcgtgccacggcacgcccatcacgaagacaatcgggataaagatctgggagagaatgtagagtagggtgatgttatgcagtccaattagctcgaaaatccactccgttacagcgtctaggaagaacacaatggctaggaaggcgatgatattcgagacgattccgagcacaatcaacaaggctgctgcagctcccgaggcggccgcatccaaaatagacgtatccgtccttggcaaggtgtctgggcgattatcaaatgttgactcttatgaagaggaacttacgagctttccagcttaatgttgtcggacctggtcagagattcctcggtctcggggtagaacagtttggcgaaagccagtgaacccggagcagccattacgctggctgcgataagaaagctggcggaagcaccgaaggacacataagcccccaagacagtaccggccactgtcgcgtagccggaggtgcatatagcgtgcaactcgctgacggtcagtatttcgatgtacggccggatgaccagagggctctcggtcatgcttagaaacacgttgcccgctgcatttacactttcgcaaacggtggtgcccaccatggcctgcaagaggaacccaaaaccgttcaggatgaactgcatccagccaaggtaatacataatgctggtgatcacgctgaagaagaacaccaccgccagtatggcaaatgcaaagacgtactcatcgcaaatgcgatccccgtacacaaagcgtgctccgtgctgtgcgtagttcagaaatatcgtcaccttgtccccaaggcattgaaagatggaccggccaaaggggaggcgcaggcagagtatgcccagcagcagctgtcccaggagaccgtgggtcactatgcgccaaggtacttgcaagtggtgcttggacacggcgaatccgataaggacaaagcacacaggtccgagcagtccgatggccttgtatgcgtcattgcggcactcgaatccgaggtatgccaccaccacagcgagcacaatcgccagcattacgccggacactatcctagaattggagaaaatggaaaataaggattaaagcatttagctttttagaagaatcttttggagcctcaaatacattgtggacaggagctaaagttcttaaccaatatatatatattgtattcgaatggataatctttacaggtcctgaacatctacaattttttgacttatggtactgctgttcaagtctgaagggagatcatctcaaaggatcttgtactcaccactggcgactaaacgcaatccatttgtcaatcactggttccaggtagttattatacagcttgatgcccacgaatggcttaaatacccagtagtacagccataggatataaaacaagatgaacaagacgatgagaaacccgtatccatgacaccagttaatttggcacaatagttttggcttaacctctggcactggcttctcagaagtttcttctgtgtcataatcatcatcatcatcatcttcggttgagttatctatcgattcggttgtggcttccgagcccctattgggccagcattctttggaatccttgtctgggtttttcctcataaacatttacattcgaactcaaaggggtaacttaccgtaaaagatgaaaatgattgtggctgccgtaaagtaagatatgaatatgatatggagcagcacatggagtaccagataggtgattcgctttgccctcgatggcggaggcttttcctcctgttcgccttctattggttctgccattgtgtgtataaatgagaaacagtgtgtagtgtaaagaagtgttgtgtggatcttatgacttatatcccacagccccttagtaaacaaataggtaaaaataatcctaaacatctttaataaataagaattgtattttgctaaatttgatcagctaattatcacgaactacaactttaaggaactaaaactgagtaacattctttcgacccaacttctcgaatatcctgttgtagttcgcccgctcgtcatcttcttgtataaggatgcctataataaagtaaaactagttaaaataataagaaatatttatgatcgtttatcgactgacctgcaaagctggcggatacgaaacagactatgctgcccaccacaaacgctcggaaagccactgctgtaatggtggagcgacgatgtggtgccatagcactgagggatccgataaggatgcccagggaactgggattggcaaagccgcagatggcgaatgtggcgattccagcgctgcgggcctacaaaaatcgacctcaaacgttagtttccagatgagctatgggtttcacaccatctacaacttacagtgatatcattattttcgatgtattgacccagacgctcataggccacaaactcattgataatggttttggtggccaccaccttggcgatgatatcgcaatcctcttttggcacccccatggcccagaccagcgggatgaacagcttagagaatatccactcgaagtcgatttgctcgagacccaccaggtaaccaaaccaactgaccagaccatttaggaaggcgatgaaggcgacgaaggcgactatgttagcgataatgcccagaacaatgggcacggcgttgctggcaccactggacgctgcgtccagcagcgaagagtcctgtctacaaggatgacagtgaactagttagacatttgggttaaactaggcgccttagaaatacgtacgatttttccagttcaattgaatcggatgaggtctggctctcctccgtttcg

SEQ ID NO: 24503 - DNA, 1606 bp, DROSOPHILA
tttctcatttatacacacaatggcagaaccaatagaaggcgaacaggaggaaaagcctccgccatcgagggcaaagcgaatcacctatctggtactccatgtgctgctccatatcatattcatatcttactttacggcagccacaatcattttcatcttttacgacaaggattccaaagaatgctggcccaataggggctcggaagccacaaccgaatcgatagataactcaaccgaagatgatgatgatgatgattatgacacagaagaaacttctgagaagccagtgccagaggttaagccaaaactattgtgccaaattaactggtgtcatggatacgggtttctcatcgtcttgttcatcttgttttatatcctatggctgtactactgggtatttaagccattcgtgggcatcaagctgtataataactacctggaaccagtgattgacaaatggattgcgtttagtcgccagtggatagtgtccggcgtaatgctggcgattgtgctcgctgtggtggtggcatacctcggattcgagtgccgcaatgacgcatacaaggccatcggactgctcggacctgtgtgctttgtccttatcggattcgccgtgtccaagcaccacttgcaagtaccttggcgcatagtgacccacggtctcctgggacagctgctgctgggcatactctgcctgcgcctcccctttggccggtccatctttcaatgccttggggacaaggtgacgatatttctgaactacgcacagcacggagcacgctttgtgtacggggatcgcatttgcgatgagtacgtctttgcatttgccatactggcggtggtgttcttcttcagcgtgatcaccagcattatgtattaccttggctggatgcagttcatcctgaacggttttgggttcctcttgcaggccatggtgggcaccaccgtttgcgaaagtgtaaatgcagcgggcaacgtgtttctaagcatgaccgagagccctctggtcatccggccgtacatcgaaatactgaccgtcagcgagttgcacgctatatgcacctccggctacgcgacagtggccggtactgtcttgggggcttatgtgtccttcggtgcttccgccagctttcttatcgcagccagcgtaatggctgctccgggttcactggctttcgccaaactgttctaccccgagaccgaggaatctctgaccaggtccgacaacattaagctggaaagctcgacggatacgtctattttggatgcggccgcctcgggagctgcagcagccttgttgattgtgctcggaatcgtctcgaatatcatcgccttcctagccattgtgttcttcctagacgctgtaacggagtggattttcgagctaattggactgcataacatcaccctactctacattctctcccagatctttatcccgattgtcttcgtgatgggcgtgccgtggcacgattgtcaagcaattggcctggtggtggcccaaaagtcgttcataaacgagtttgtggcttatagaaacctgggcatattggttagcgataaaaaggttgatgtgagtacccatctgcatattctattcttatag

SEQ ID NO: 24504 - protein, 528 aa, DROSOPHILA
MAEPIEGEQEEKPPPSRAKRITYLVLHVLLHIIFISYFTAATIIFIFYDKDSKECWPNRGSEATTESIDNSTEDDDDDDYDTEETSEKPVPEVKPKLLCQINWCHGYGFLIVLFILFYILWLYYWVFKPFVGIKLYNNYLEPVIDKWIAFSRQWIVSGVMLAIVLAVVVAYLGFECRNDAYKAIGLLGPVCFVLIGFAVSKHHLQVPWRIVTHGLLGQLLLGILCLRLPFGRSIFQCLGDKVTIFLNYAQHGARFVYGDRICDEYVFAFAILAVVFFFSVITSIMYYLGWMQFILNGFGFLLQAMVGTTVCESVNAAGNVFLSMTESPLVIRPYIEILTVSELHAICTSGYATVAGTVLGAYVSFGASASFLIAASVMAAPGSLAFAKLFYPETEESLTRSDNIKLESSTDTSILDAAASGAAAALLIVLGIVSNIIAFLAIVFFLDAVTEWIFELIGLHNITLLYILSQIFIPIVFVMGVPWHDCQAIGLVVAQKSFINEFVAYRNLGILVSDKKVDVSTHLHILFL

SEQ ID NO: 24505 - DNA, 4156 bp, DROSOPHILA
caagtatccattgcattcgattgattaatttctagctcgatataatagttcagaggcagagccaaacgatcacttaaaggcacaattaacagacaatatcgaattaaatttattatattatataagcaatgcctatactacctctttgctcagctcatttcgtctgccctggaattgcggccctaagactacacatatgatactacggatctatttacaatttcgtatatcgttcaagttggctggtgaatggtagtgctatgaatcttaatgattagaagtgatccaccttgacggagaccgtgtgagcggcggcattgctgggcaggtcgatgttgtcccactcggtgtgcagattcttctcgctatcggtcgccttgagggccagtcccagtgatgcagttcgtccggcgcagtggggtatgttgagcgtaaccggtacgaggaactcgaggccctgcggcccgcacatcaccaacggtgacagcattgtctcacctacgaaggcaaataacaaggccattagtaggagttatttataatttcttcttacaaatgcaaatatagttgtgtttaatagagtgtggtggtacatcgtgtggggttataggaagtgggtaagtggacacaggcatagactccactcggttggaaacacaaacgattcgtgcaaaagcaaaattttatctttggataaaatattgaaaatagattagaggtaaggtgagacacaatgtatagaggtaggtctaaaaatgtatatgatattacatgcaccaagcaaaactacaagttagtatatatcgcataaaatctaaaactaatgtttaaaccacagcaaattaccagccaccatttccaaaggttaagtacgtaaaacataagggttgttaacaataacacaaaacaatgctgtaataaaaacaaaatcaagaggtttgtggtagtggcagtggttttggtggatggatacaatacgaagtagagtgggtttttgtgtttagtgggaccaaccattttccatgtccagcggaggaccgccgacagcttgtcccattcgcgggtcgctcacggtgaagtagatctcttgtcgtactccggccggaatggctcccggcgggatttgcagtgagacgtgccacagcttatccgccaaagtgccaccgttggagtcaaaaaatccgcgcgaggtgctgggttcacggggcagagtgggaaagcgtccgttggccgaaggttgattatttactggtccggcgatgggcaatgacatgctgctactaaacggcgtactggtcgcattgggtggacccactggcaagctggcttgtgatgtgtactgggtttcgatggaggtacagctgtcaccgattggggaactcggcggaggtgctgttcgcttaaggatattcgaaatgtggaagggagctctaccggatcgcggggtcggcggttgaacaggagctggtggaggggccaggggagaaaccttatctgctgcttcgaatacgtcatccgaatcattctgtgattgctccaccattccttcattgtgcagattattttcaatagctgttggctgctctgtctgatccgcagagctctcagcgggatcacgctgatcctgaacctcctcctcttcgtcatcatctacttcgtcctgcacaagaggagctctagctggattttctatcaccgtgtccgaagatttctgcaggtccgaacgacttaaggtcgaatcttcgatctgttcttccggttgagcattaatctccacctgaatctgctcggttttgcactccttttccttcttttcatctgtttcattttctcgggactggaggatactctcttcccgggtctcatagattggggccggtctgcccatacctcttttggatacatagatcggttcagccatgctgtccagggcttcccgtctagtctgatagatctgatccctcagttgtgacctcgttttcagagcactttccttggcctcccgccgactctggtatattgcctccgaattggaggcttccgactggctgctgctgctttgggggctaaattctcgctccatatccctcttgccctggctaatcctctcctgcatttctcgtttcgattggtacagatgatttctctgcatttcgcgctgcatttcgcgtcgtgattggtagagcggttcctcctcagtctgctcattggcagcccccggatagaatcgtctacgggtcatcacctccgaactgggcgcccttcgctgatcgggcagcatgtaggctccgttgcgggtctggtagatctcttgcggatcttgttcataaccaggactgatcataggcctccttggcggtccgggatttcctccacgatctgcagtagtggtgctgtgccgccttacaattctccttccatttcgtccgccagaagctgcagctgcctctgcttgccttctttcgagatcgatgcacgctcgattcgcatagagatcatattggtcatatccgtaaccattgtcctggtgatgcggcattctgggaactgtgttgccgatattcccatagatatcctcaccctccagattctgataggtgctgttcatcatctcctgctgttgcggcgcgtagtgaccacccctttgatagtaggcatcttgtgaatgtggttgcatcatgccttgtccaccatgggcacgctcctcaaagccagctggatacgttggatactcatccgggtagtagggtctttgcacacccctctccagcatcgattgctggcgtcgaagtcccttcggtttcctctccggttccaccatgctgttcattctccttagaggcctcgtactcttaagcagtgcattctttaatgccaccagtgggctctttagcaccgatttcttcttcttatgtggcggcaatggcggtggacccatctccaacccatgatcatcgtaatactgctgttggtgatgctgcgaatattgctggcgcggctgactatgtcccctggacgttccatagtggccgtagtagttcggatcttgggcgtgaggaggtcgctcgtgtggataacgaggagctgatcgggatcgctgcatatgatgcccttgggacggatgggcggcagggggtggcatgttatagtaatcatcgtagcgctcatcgtacggctccatttcgctaaagatttattatgtgattcgaaatttttgtgtgcaattagcaaggagtttttttttttaaatgtattcgtgaagtgaattcaagtttgggttctgaactttagcaatcaatttgtttttataaaaatgtccaccagaatatgttttaattcgcggcggtacatttcatcagttaaataagggaggtaaaaatattgaacaaacatgtctaacttgcaatttattcctgcaaaactttcgcttacgacacacaagaagcgcacatgtaaaatgtattcatatatttatattaaatactttgcatattaaccaaaactgtagaataaacataccatttaccaaatatttcaactttattttaaagtagttttttgttagttatggtttttatttagaaatgttgaatttacccaaaaccatagttagattcaagattaactttcaaatacctgagaaatgtattgagagttgttatatttaagaaaccagctaaaagcatgatcatattaaatagtaatacaagttgaagttcgaaagtagagaaatgtggatacgaatctttgtactgtaaactaaaatagcaagtcgaagttaacccgaaaaatgttttattttcgttttttttttttcattttttatatgtgcgtgaagcgctcaactcaacaaccttagatttggtttttacaaactttgttaagctttaatttatggtttggttaataattttggttattgcaaaatacaataattattaaatttatggaatatatgcgatctgttttcgttgtgcgtttttcgtgaattttgcatcgaataatttgtaatgaccatcaaccgcatgaaagtatgaagagattggcataatgattgattgattgattgactgattgtttcgctgactgaatgtttgatattgtaaagtacaaaaatggcatttaacaagaatataaaacatttttcgttaacaca

SEQ ID NO: 24506 - DNA, 2156 bp, DROSOPHILA
atgattactataacatgccaccccctgccgcccatccgtcccaagggcatcatatgcagcgatcccgatcagctcctcgttatccacacgagcgacctcctcacgcccaagatccgaactactacggccactatggaacgtccaggggacatagtcagccgcgccagcaatattcgcagcatcaccaacagcagtattacgatgatcatgggttggagatgggtccaccgccattgccgccacataagaagaagaaatcggtgctaaagagcccactggtggcattaaagaatgcactgcttaagagtacgaggcctctaaggagaatgaacagcatggtggaaccggagaggaaaccgaagggacttcgacgccagcaatcgatgctggagaggggtgtgcaaagaccctactacccggatgagtatccaacgtatccagctggctttgaggagcgtgcccatggtggacaaggcatgatgcaaccacattcacaagatgcctactatcaaaggggtggtcactacgcgccgcaacagcaggagatgatgaacagcacctatcagaatctggagggtgaggatatctatgggaatatcggcaacacagttcccagaatgccgcatcaccaggacaatggttacggatatgaccaatatgatctctatgcgaatcgagcgtgcatcgatctcgaaagaaggcaagcagaggcagctgcagcttctggcggacgaaatggaaggagaattgtaaggcggcacagcaccactactgcagatcgtggaggaaatcccggaccgccaaggaggcctatgatcagtcctggttatgaacaagatccgcaagagatctaccagacccgcaacggagcctacatgctgcccgatcagcgaagggcgcccagttcggaggtgatgacccgtagacgattctatccgggggctgccaatgagcagactgaggaggaaccgctctaccaatcacgacgcgaaatgcagcgcgaaatgcagagaaatcatctgtaccaatcgaaacgagaaatgcaggagaggattagccagggcaagagggatatggagcgagaatttagcccccaaagcagcagcagccagtcggaagcctccaattcggaggcaatataccagagtcggcgggaggccaaggaaagtgctctgaaaacgaggtcacaactgagggatcagatctatcagactagacgggaagccctggacagcatggctgaaccgatctatgtatccaaaagaggtatgggcagaccggccccaatctatgagacccgggaagagagtatcctccagtcccgagaaaatgaaacagatgaaaagaaggaaaaggagtgcaaaaccgagcagattcaggtggagattaatgctcaaccggaagaacagatcgaagattcgaccttaagtcgttcggacctgcagaaatcttcggacacggtgatagaaaatccagctagagctcctcttgtgcaggacgaagtagatgatgacgaagaggaggaggttcaggatcagcgtgatcccgctgagagctctgcggatcagacagagcagccaacagctattgaaaataatctgcacaatgaaggaatggtggagcaatcacagaatgattcggatgacgtattcgaagcagcagataaggtttctcccctggcccctccaccagctcctgttcaaccgccgaccccgcgatccggtagagctcccttccacatttcgaatatccttaagcgaacagcacctccgccgagttccccaatcggtgacagctgtacctccatcgaaacccagtacacatcacaagccagcttgccagtgggtccacccaatgcgaccagtacgccgtttagtagcagcatgtcattgcccatcgccggaccagtaaataatcaaccttcggccaacggacgctttcccactctgccccgtgaacccagcacctcgcgcggattttttgactccaacggtggcactttggcggataagctgtggcacgtctcactgcaaatcccgccgggagccattccggccggagtacgacaagagatctacttcaccgtgagcgacccgcgaatgggacaagctgtcggcggtcctccgctggacatggaaaatggttggtcccactaa

SEQ ID NO: 24507 - protein, 713 aa, DROSOPHILA
MPPPAAHPSQGHHMQRSRSAPRYPHERPPHAQDPNYYGHYGTSRGHSQPRQQYSQHHQQQYYDDHGLEMGPPPLPPHKKKKSVLKSPLVALKNALLKSTRPLRRMNSMVEPERKPKGLRRQQSMLERGVQRPYYPDEYPTYPAGFEERAHGGQGMMQPHSQDAYYQRGGHYAPQQQEMMNSTYQNLEGEDIYGNIGNTVPRMPHHQDNGYGYDQYDLYANRACIDLERRQAEAAAASGGRNGRRIVRRHSTTTADRGGNPGPPRRPMISPGYEQDPQEIYQTRNGAYMLPDQRRAPSSEVMTRRRFYPGAANEQTEEEPLYQSRREMQREMQRNHLYQSKREMQERISQGKRDMEREFSPQSSSSQSEASNSEAIYQSRREAKESALKTRSQLRDQIYQTRREALDSMAEPIYVSKRGMGRPAPIYETREESILQSRENETDEKKEKECKTEQIQVEINAQPEEQIEDSTLSRSDLQKSSDTVIENPARAPLVQDEVDDDEEEEVQDQRDPAESSADQTEQPTAIENNLHNEGMVEQSQNDSDDVFEAADKVSPLAPPPAPVQPPTPRSGRAPFHISNILKRTAPPPSSPIGDSCTSIETQYTSQASLPVGPPNATSTPFSSSMSLPIAGPVNNQPSANGRFPTLPREPSTSRGFFDSNGGTLADKLWHVSLQIPPGAIPAGVRQEIYFTVSDPRMGQAVGGPPLDMENGWSH

SEQ ID NO: 24508 - DNA, 2866 bp, DROSOPHILA
cccttacccgcagcaacagcagccactggaggacagcatgaatgatctgatatcgctggacgatagcaacaacaccagcttcgacctggaggacttcgatccgctcaatcagaatgctcgtccgttgccgccgctcagcacggcatttgccaagaagtgcagcacactgcccgctggcgtcaacagcagtgtggtggccagtagcgtcagcaatccactgtacccgtatttcgcgcccaagcacatggccacggtggcagctgtgacgggacggacgccaccgatgcacccaccgccgcagatccagcgcaacaccattgccgccaagcccgacgacgacttcgagctgctccgcaagtacggcctggaccagttcaccctgaacgccaacggaacggagaagtcgcagcagctcaccaccggaaagggcatgaacaactggacaacattcgattgaagggacacagctggtcagataacctgcatcaaatatgataccaaaataagtgtgattgatagattgtgttgtaaatagctaggagagataggcaaaatcaaggatgggagagcgatgacagtaaaataacccctaaatacccaaaattgtgtgtctgcagtagtgagttagtgagttatacttaagcagaggatccaattaaaacgcttgtttgtgtaaataactgtttagtgaaaagttttaacaattgcatgaatcggaactctcgctaactacgcatacttacatacatattgtacgctggacttccaaatcaaaagacacaagaatctagagtagcatgaatttaagccaattagcctaacaaattaccaataaatataaaataaattccaattaaattatgtggctctgtatttattgcataacataaattggagtattgacaagcggtctaaatgttttgaaatgtgaattgcgtacatggggaacacaaaacgttggctgtgaatgtgtaacatgagagcctcattaagaaggaatctactggctcttcgctttgttctcggccatgcagctcaggatgcgggtctgcagagcccgtgcacccttgaggttgatctcctcgttgtcgggcaacaacttatccatgcgttccatccattgcttagtctgcgggtacttttcccgttccactggtatgagcagatccaaggtcaccagagtggtgtggatggacacgtcggcaacgctcagttcgttgcccaccacgaaacttccttgctgcagaaagtgttccaagtcggagtacgcattgtggcagagggtcagcgatcgggggttgtattctccctcgccaccgtaaatgttccgagccacaatgtcctttaccacctgaaatagcactccgttctcgtagtgcatgcgatggtcgatgtgggctctccttttcaaatcccgcggatagagttggtcattcccggcgtacttggctaccaggaagcacacgatggcgtgactgtccacgtagacctcgccatcgctgtccacaaacaccgggatctggtgctgggggtttagctgtaggaagccagcgttacataacgaaatcaacggttttcaaatccaacgaaccttgacaaattcctcgctcaggtgttccttcttggcgaagtcaacgggtctaaggattcgaaaagatcttgcattagcaatctgcatttaaaagtgcaccattcttttggttcttttacttgagctccaggtccagtccaataagtttggccaccaggatgcatgccctggcaggaggactaaaaagggcgtagtacagcgttggcttcgacattctcccgaagaattcacacaccaaatggcgatcaaggtgaacaagaagccagcggcatgggcgcagattaacagggaacagacctaatgcattttgcaattccaacttctcatttcaaagattttttaattgttccattgtattactatttcattaagtactgcttaaaaaaaaaaacctttttcctaaataaaagaaactgtattagaaacccccctgaaaatatggcaactacgcgcgtgaacaaaagtaaaagttgtactgggactgccaacctgttcaaaaagtgaaaaacagctgattggcgcgaaatttaaaatgcagctataaaataatcccaactaattcgtgttgtcttaagccatttattctcatttaagtcaatcattagctaatatttgtatacaaactactgaaaaatataacatacttagaatgctacaatacacttgtggcgcattaagttaacttaacaggccaagtctaattctttgggtcgcctaatgatattgtaggaccttacttgtaagatctttgcggcggcgatttatggcgaatctagaagatcaattacggaatcctctttggccttagccatacagttttcgtcattatcctctgcaagtaaagaaaaggtttcaggtgggctcaattagaaacgggatgctgaatgaaaaattgaaaaatcagtttaatcttaaaacagagcttgacccccgttggtaaataaaacgacaggtcttggttgaaaattgtttaatcgtatagttaaagtacacatctccttgtacattgatttcatatttgttcgttcagatatttagggggtttgcatcatgtcatagtcaaagcattgttcaattttaaatcttaacatataaatccgtggtggtacggtttgagcttaaatacgccaacaaaggccagggaggtcatataaactgagcgtctagctggacgacatacataacatacataatccgtcgtttccaatcgatttgcattgataaaaacggcttcgattgctttcaatactatggacctttaatgccatatgccat

SEQ ID NO: 24509 - DNA, 742 bp, DROSOPHILA
cccatgccgctggcttcttgttcaccttgatcgccatttggtgtgtgaattcttcgggagaatgtcgaagccaacgctgtactacgccctttttagtcctcctgccagggcatgcatcctggtggccaaacttattggactggacctggagctcaaacccgttgacttcgccaagaaggaacacctgagcgaggaatttgtcaagctaaacccccagcaccagatcccggtgtttgtggacagcgatggcgaggtctacgtggacagtcacgccatcgtgtgcttcctggtagccaagtacgccgggaatgaccaactctatccgcgggatttgaaaaggagagcccacatcgaccatcgcatgcactacgagaacggagtgctatttcaggtggtaaaggacattgtggctcggaacatttacggtggcgagggagaatacaacccccgatcgctgaccctctgccacaatgcgtactccgacttggaacactttctgcagcaaggaagtttcgtggtgggcaacgaactgagcgttgccgacgtgtccatccacaccactctggtgaccttggatctgctcataccagtggaacgggaaaagtacccgcagactaagcaatggatggaacgcatggataagttgttgcccgacaacgaggagatcaacctcaagggtgcacgggctctgcagacccgcatcctgagctgcatggccgagaacaaagcgaagagccagtag

SEQ ID NO: 24510 - protein, 226 aa, DROSOPHILA
MSKPTLYYALFSPPARACILVAKLIGLDLELKPVDFAKKEHLSEEFVKLNPQHQIPVFVDSDGEVYVDSHAIVCFLVAKYAGNDQLYPRDLKRRAHIDHRMHYENGVLFQVVKDIVARNIYGGEGEYNPRSLTLCHNAYSDLEHFLQQGSFVVGNELSVADVSIHTTLVTLDLLIPVEREKYPQTKQWMERMDKLLPDNEEINLKGARALQTRILSCMAENKAKSQ

SEQ ID NO: 24511 - DNA, 6204 bp, DROSOPHILA
cgtccgccatccttttgtttagtcattcgccgcacaatgccaataaacttctgacccagcgacagttcccggaatcggacgcagttctccttgctccatactacatcagtcagttgtatgcctgaaagaagatcgtttttagttctaacgccaaactgctgaagttctcttgaacttgccataaagttgtgctggcaatgccatcttgggcagctttcttaactccggatttagagttttcagttgatcacaggcaattactccatcgtcgcccacgtcgacgaaacgcacgtgtataatctcatcgtaaatcttgtgaatacttacgctgcaagattaacagatttagtctgcgtttttattgcaagacctgaataagttcttaccgatgatatacgccttcggagtcaggggcagcgtaggcctctccaatggccagttgtgaaggctgcactcccttggctgccgtcttttggcaatgctcttgtaaattcttcatcaaagtctgcagctggttatagtatttgtacggttgcacctgcggaagaatcgcacatcataatcggagtcattaatttgctgatgattgacttaccgcaaagtgaccgggattgacggagagggcaacgcgcacctcgaaataggcacccactgccggaatagcctcgtaatccttgagcatgagagacgaaaaggtgctgccggtcgatcttgcggatggtttcttctctggcgtcaccgggggagtggtagcgacaaggtcgctgctgctgctctgattcgagaacacggagctgaagctaccgcgtctgggcagctggacattggagctcaggagcgtatgatcatacttctccggatgaatggagctgtgtgggtggggaatcaagggtggggcgggaacaagccagattgggggattgggaggcaattgttggtttcaaggtttaaaaaatctgattgctttcgggcttattgggtagtaaagtacatatgtgtggcagcttaagagtatatttttcagattatatacaaagatgtgcatgattttagggtaagcttacaaaacgtagatcgaatttgtgttagcaataacatatcaagtcagttccggtttattgaagcacttatagagatagcattaagcaaaggatcaattatattgttaatataaacttatagggcaccagtcacaattcagatgtcgttgtttagggagcttgatgacgatgtgattagatgacattgaccataatgatatagaatgaatagacattgtacaaaagcttcaataaaggcacttacctagccatctcgagctccaggcgaaggccaatgttcacgcacatatacatggactccggatcctcgcggatgaatacgtttaccagaggcttaccaccatccatggccacaaccttcagctgcgggagaaaatggtgttacggattcgacaagctttcaaaacatccctttcatataaaacacttacgagagcttcggtgcgccaaggtatcagaccacgcaggcgatgaagcatatgacctccgatctctggaacgtcgtgcaggcgaacgggtatcgcctgtggcgggaacgtagccagagctctgttgtttgcctccaggcggtagatattagagatgtgcgccttacgctgccgtccatcgtccacgtagtagacatcgaaggactcttcgtccggattcagtggtctggtgaccagtcgcccgcggaaccactgcttgacgccatcgacagtctcgtcgcacacgaatatatggcggtcgtggagcagatccgaatagctcactcggtcctgctcgcccaaatcagccacagtttgcgcaatactgcgctccacaaacttaaggtcatcattgcgtagcagcaccattagatcaccatcatcgttgatgtgagacacaagaatgggcgtggtcttgccgatcttcttttcatcactcagcgatggtgccggcgtgcacttcgttattcttttcgcaaccagatcgttcagatgaatgtcctcagccgttgaggtgtcgtacagcgtggccaccaagcacgcccgacgcttaccgttctccaccacaccctgggcagatccacccagttccaggaactgcttctccgtggtgagcacatgggccacaaccgtctggccgtccagctcctttgttaaaacctgcagagcgtgcggatgatcctcgaacttatccaacgcatacatgctgaggcacacggcctgggccgggagcgccaagaactgcggtggacagtggaagagatcttctgaatgaaacattgccacatcgccaaagtcgataaagtgataacggcccgagcgggtctcctcatccacagaaattgcacgaacacgattccagccatcgggcatctccactaaatagacttcctgagcgtaaggtttagagaccttttgtcggaaatgcggagactccatttggcgtccaatatgcttcgtcagttcctcaaagtttgcgatctgatcgatcatccgagcccacactatcttggtggagtcgcagaagctgatgaacatgttccagtcgtgcgatcctccttcgcttgactgccacggcagcaccatctgtggcagggtggttatgctggtgcggtccggctccgatgaaccaggatcgttggcaaacaatatgatccttggatcaatgccgtgctcaacacgaattttatttgacttcacgatcaaatcgtaccaatgactgggcagatgttgccggaaggtgctgccgtaccaatcctccagcttgtgacccaatatgccatgtgggtgctttaacagctccttgtacaatccatcgataaactccacatcgctaaatgtgcaagcagaaagcttttggtgtgactgggcatgcatgatgcgctggatggcgatctgtgctgtgcgttggtatgctgtctccttatcggtgaactcctgcggatagctactgtaaacatcgccagcgatttgcactgaacaatgtaggttccgtagcttgttgaatatgttgtatgcaggtttctcaaagtcatttgccgcgcaatagaagttgagcgtggagacgggatcaagtgagggatcgaatttaagtggcaccttaacttttggatttgtaacgacattgcctgtttcaccttgacctccgtggatatcttctttgtacgtcgctttagcggcggttgtcgtttgagcgtattccggcgaagctggcggcgtgatgggcgctaccgctggcgtgggtgcatccgattgcggcgttactttcaatctgtgattcacagagacgcccgtggtgcgctggtgaccagggtacattactcgcggatgacgtggccgcttgaatgaggattcagggctgtgatagacggtgcttgtatcttgctggcgctgcgaagcactgttgcccagtatggcacgcagcggaggtttgccgtcattgtgtttgtcttgtccgttagccactttaacgtgccttggtccatgtccattcatgactggtgcctttttgttctcaattgttacgaagatcgtttccgtcacagcccgatcgcgggtttctttttccttctgtttttccctagcgacttccttcgttatttgaccacgatctagatcgtcttctttcttaagctctttctttcgccttgtgatatattctggatttttgttgaaaacctgcaggttttccgaaaacggaccttgaatattattgaaactttcaaacagctcttgggttatgatgcccgttagatcttgtttatgctcggctatagcctgattctcacacttagctgctcttcctatttcttgatccggctgatgattcggctgcttattccgttgctggtagtggtacttattgccgtgagtgtgcttctgggcaattggcttgggcttctgggcaattggagtgggcttcgataagcttgtggacttgctggtcttctgctgacgtaccatacgcacaatatgttctgtgttagcgttatacttcgctgtgatgaacacctgttgcgggatagatgtgaaggtaattaattttgaaactcgcattatgctgcatattatgctacttgtattaaatgcttatctgtttccctaatatctgtatgtatataatatatattaggtatattaggagaacttaagatgtaaatccttttgacaatctttctaatgcataagttccggttattgtatacgacgacccttaaccaggaaaccctacactgtatacatgagctaccacttctagaaaggggaaagtggctctgctcgaacaactcttgagtttggaaatccaatatgctccatttaactgaagagtcagctattttacagccaagcccagtgagtccacttaattgtttggaaatccgagtggattgaagaagttgagtttttgtttatgattcacattgagtcgagctgtttcgctgctgcaatcatctttatagggtcacagcgatctggatatgggcagggggttttcaagccccaaacgtgataatggtgcagagcgagagctcggaatgctagatacagaatacataattacaattaaatgaataacactcgttcgtttggctcgtctgattattgatttggcaagcaatgcaaaagcgttggccggaagagcccgcccatccaaacgcccactttcgcccacaggtgtggaggcagacggctaaacaagaataatgcacacagttcaagtgcaatacggccagatggggactggcatttatagagaaaaaatcaaaacatacgactgacgaacgttcgttcactttcaccatgcaaacatgcaatcgcatacgaacgaacacacaggcaatttgaaattgctggccttttcgattttcgcgttatacacttttgttttcgactgtcgttgcacttattaaagcaaagcgcttaatcagcacgcatttgtttaatatgtacaagtgtaccaggcgaaatcgaaactagactaagtaagatccattgtttacacttttcacggcgcagatgaaaagaagaagacgccgttgacacgttgccccttcagcggcgggcggccccttttcgacggagagagcgggcgggaacggtccgtcgagcggtcggtcacacagagtgaagcggtaaggtagcagcgcagcagcagcggctcaccgcacgcgttcagccagagaatcgaactgaaagcggtgggcgccgctcgcgaaaagctcgatagtcagcggcgatgaccacctgtctaagttaacgtcagatctagcggtttttatggccatattagtaattacaaactctcattaaaggtgaaatcaaaacggaactagctaaccatctccttttcctaaattcagtaacactgatttctttaattccagtattctaattaattaaaatacattgaaaagaaagtaaaaaatatctagctagttttagctaacagctatggtgacaccagcagagagcaactcgaaagctgcgcacgtgagagaggcacccagagagcaagctcaggcgaagtgggcaaaagaaagcggttaaagtgggtggaagagagccgctcactccctgacatttgcgatatgcaataattcgcaaagaatcttgccaacaatttaggcaacaggcgtaacaattggaaggacggagatggcacttacctgattaccgctttggtgaaagttgaattgattcgaatccttaagcagctcttggtcattcgagtagcccagcctgcgaaagggtatcggctcaccctcaatctccatgtaatctgcgacgatggaccgcagcgtaaccggcggcttagctgacgtgattagggccctgaccaccttggccacgtattccaggacctcctgcttttccattatgatcgttccacgattctgtcgaagagagcgagaggcggagagaggttaacccattgagcatgattcaagtggcgtggaatgcgtgcgcccaccgccacccccactcccaaatcagcaacaattaagcatgcacagaaaaaaacaacgcggcaaaaagaaatttctaatatactatttctaaactatagggtctaaagggttgaaagggtctaaattattctgcaaacattgagttgcgcctgttccgcgttattctttcagtgtgcacaataaaattggcaaacacagggctagaaa

SEQ ID NO: 24512 - DNA, 3061 bp, DROSOPHILA
ctgaacgcgtgcggtgagccgctgctgctgcgctgctaccttaccgcttcactctgtgtgaccgaccgctcgacggaccgttcccgcccgctctctccgtcgaaaaggggccgcccgccgctgaaggggcaacgtgtcaacggcgtcttcttcttttcatctgcgccgtgaaaagtgtgttcatcacagcgaagtataacgctaacacagaacatattgtgcgtatggtacgtcagcagaagaccagcaagtccacaagcttatcgaagcccactccaattgcccagaagcccaagccaattgcccagaagcacactcacggcaataagtaccactaccagcaacggaataagcagccgaatcatcagccggatcaagaaataggaagagcagctaagtgtgagaatcaggctatagccgagcataaacaagatctaacgggcatcataacccaagagctgtttgaaagtttcaataatattcaaggtccgttttcggaaaacctgcaggttttcaacaaaaatccagaatatatcacaaggcgaaagaaagagcttaagaaagaagacgatctagatcgtggtcaaataacgaaggaagtcgctagggaaaaacagaaggaaaaagaaacccgcgatcgggctgtgacggaaacgatcttcgtaacaattgagaacaaaaaggcaccagtcatgaatggacatggaccaaggcacgttaaagtggctaacggacaagacaaacacaatgacggcaaacctccgctgcgtgccatactgggcaacagtgcttcgcagcgccagcaagatacaagcaccgtctatcacagccctgaatcctcattcaagcggccacgtcatccgcgagtaatgtaccctggtcaccagcgcaccacgggcgtctctgtgaatcacagattgaaagtaacgccgcaatcggatgcacccacgccagcggtagcgcccatcacgccgccagcttcgccggaatacgctcaaacgacaaccgccgctaaagcgacgtacaaagaagatatccacggaggtcaaggtgaaacaggcaatgtcgttacaaatccaaaagttaaggtgccacttaaattcgatccctcacttgatcccgtctccacgctcaacttctattgcgcggcaaatgactttgagaaacctgcatacaacatattcaacaagctacggaacctacattgttcagtgcaaatcgctggcgatgtttacagtagctatccgcaggagttcaccgataaggagacagcataccaacgcacagcacagatcgccatccagcgcatcatgcatgcccagtcacaccaaaagctttctgcttgcacatttagcgatgtggagtttatcgatggattgtacaaggagctgttaaagcacccacatggcatattgggtcacaagctggaggattggtacggcagcaccttccggcaacatctgcccagtcattggtacgatttgatcgtgaagtcaaataaaattcgtgttgagcacggcattgatccaaggatcatattgtttgccaacgatcctggttcatcggagccggaccgcaccagcataaccaccctgccacagatggtgctgccgtggcagtcaagcgaaggaggatcgcacgactggaacatgttcatcagcttctgcgactccaccaagatagtgtgggctcggatgatcgatcagatcgcaaactttgaggaactgacgaagcatattggacgccaaatggagtctccgcatttccgacaaaaggtctctaaaccttacgctcaggaagtctatttagtggagatgcccgatggctggaatcgtgttcgtgcaatttctgtggatgaggagacccgctcgggccgttatcactttatcgactttggcgatgtggcaatgtttcattcagaagatctcttccactgtccaccgcagttcttggcgctcccggcccaggccgtgtgcctcagcatgtatgcgttggataagttcgaggatcatccgcacgctctgcaggttttaacaaaggagctggacggccagacggttgtggcccatgtgctcaccacggagaagcagttcctggaactgggtggatctgcccagggtgtggtggagaacggtaagcgtcgggcgtgcttggtggccacgctgtacgacacctcaacggctgaggacattcatctgaacgatctggttgcgaaaagaataacgaagtgcacgccggcaccatcgctgagtgatgaaaagaagatcggcaagaccacgcccattcttgtgtctcacatcaacgatgatggtgatctaatggtgctgctacgcaatgatgaccttaagtttgtggagcgcagtattgcgcaaactgtggctgatttgggcgagcaggaccgagtgagctattcggatctgctccacgaccgccatatattcgtgtgcgacgagactgtcgatggcgtcaagcagtggttccgcgggcgactggtcaccagaccactgaatccggacgaagagtccttcgatgtctactacgtggacgatggacggcagcgtaaggcgcacatctctaatatctaccgcctggaggcaaacaacagagctctggctacgttcccgccacaggcgatacccgttcgcctgcacgacgttccagagatcggaggtcatatgcttcatcgcctgcgtggtctgataccttggcgcaccgaagctctcctgaaggttgtggccatggatggtggtaagcctctggtaaacgtattcatccgcgaggatccggagtccatgtatatgtgcgtgaacattggccttcgcctggagctcgagatggctagctccctaaacaacgacatctgaattgtgactggtgccctataagtttatattaacaatataattgatcctttgcttaatgctatctctataagtgcttcaataaaccggaactgacttgatatgttattgctaacacaaattcgatctacgttttgtaagcttaccctaaaatcatgcacatctttgtatataatctgaaaaatatactcttaagctgc

SEQ ID NO: 24513 - protein, 879 aa, DROSOPHILA
MVRQQKTSKSTSLSKPTPIAQKPKPIAQKHTHGNKYHYQQRNKQPNHQPDQEIGRAAKCENQAIAEHKQDLTGIITQELFESFNNIQGPFSENLQVFNKNPEYITRRKKELKKEDDLDRGQITKEVAREKQKEKETRDRAVTETIFVTIENKKAPVMNGHGPRHVKVANGQDKHNDGKPPLRAILGNSASQRQQDTSTVYHSPESSFKRPRHPRVMYPGHQRTTGVSVNHRLKVTPQSDAPTPAVAPITPPASPEYAQTTTAAKATYKEDIHGGQGETGNVVTNPKVKVPLKFDPSLDPVSTLNFYCAANDFEKPAYNIFNKLRNLHCSVQIAGDVYSSYPQEFTDKETAYQRTAQIAIQRIMHAQSHQKLSACTFSDVEFIDGLYKELLKHPHGILGHKLEDWYGSTFRQHLPSHWYDLIVKSNKIRVEHGIDPRIILFANDPGSSEPDRTSITTLPQMVLPWQSSEGGSHDWNMFISFCDSTKIVWARMIDQIANFEELTKHIGRQMESPHFRQKVSKPYAQEVYLVEMPDGWNRVRAISVDEETRSGRYHFIDFGDVAMFHSEDLFHCPPQFLALPAQAVCLSMYALDKFEDHPHALQVLTKELDGQTVVAHVLTTEKQFLELGGSAQGVVENGKRRACLVATLYDTSTAEDIHLNDLVAKRITKCTPAPSLSDEKKIGKTTPILVSHINDDGDLMVLLRNDDLKFVERSIAQTVADLGEQDRVSYSDLLHDRHIFVCDETVDGVKQWFRGRLVTRPLNPDEESFDVYYVDDGRQRKAHISNIYRLEANNRALATFPPQAIPVRLHDVPEIGGHMLHRLRGLIPWRTEALLKVVAMDGGKPLVNVFIREDPESMYMCVNIGLRLELEMASSLNNDI

SEQ ID NO: 24514 - DNA, 2445 bp, DROSOPHILA
ttaattaatataaattttaaaataattatgctaaatgcttaatagtataagaataagtttttaaagtggaaacaagttaacaaaatgcagaaacacctggcaaaatcaatccttcctgcgttgaaaagggcattcgtataactctcgctccgttagcgagatatcatggcgtgtctggatgggatgatggttggttggatggatgggatggcttgatggttgggtggatgatgtggggggccaaaggagcgccggcgtgtgtcacgtttaaaatatgcgcatttttgcaaatgacatttcagtcgcaccgcactatcactaattgatatcatatgatggaattcatgcacagacaccaactgaccggcgatggcaggcggcaaaggacttgcaggacctcccggtcctgccgatcggtaatcggtgctcggtgcttggtgctcggtgctttcatgattgttggaatggcggttgctggtggcggcgaaattgtcgggttcatttttgccctttattgttgctgttgttggtcgattgccgtttcgctttttgcggtttgtcgtcgcgtcaggaccgccatatgcccccgtgtccatcgtcctgtgtccattgtcctgcgtctgttgcctgctgtctgaggttggccgctctgcggtgccgagactgcggcccgatcattcatttgtcaagttgtcaggacacggttcggcagtcggcgagatatcctgtcgctgacatcaagaatgccatttagatttcacagctgccgatgtggctataagttcgtggttgtacctccaacgtcacccctaccaaatatcttcccaatgattaagtttttgcggacagaagacaaccatttatatttgttcattcgaactcaagtcttaaacaaatccaacccattaaatactatactttcaattgaaaatttgaatattgtggaaatatattaggtcccaccagttttcagaaagccttcaaagaaaagttcattctagttcgaaaaaaattcaaagttagacgtcaagataaaatcaacacacacgaagaaatggatttcggtgaaaacgtgtttgaccgtttggatgcgtggactaaaagtgaagtgaagcccggtgaaatgggacgcatcttggccgttcttctgaccctgatagtgatcagctttgccattgtcgttgtggctcgcatcctggtatctctggccataccaacattggttattgtggcacttttgatggcataccgtttcgtcactctttcggaaatgaaagatggtctcatggctgtgcccgatattctaacatcgtgtacgaactttatatctggccttttttgccagttgaaggcaaagtaaaattcttgtaaattgtttatatattatatatatattggatactcttctgctattcataaagcgtcgctttaatatacaaatttttaaaacaaaaagttataaacaaagtttggttcttttacaggaatacaattgtctacagtctatacagaatcctttgacacagcttcaccattactagaagttatttcgaattgtcagccattcttatgtggcctctcgaataacccaacatcattttagtccttcacactggcccattatttatttatagcctcaacgttgttcacatatcgataaccgagtttgccatcaacattcctgtcaggacatttaaaggcctaacaaccggacaatgagtgggacagagagacagctacggcacagaagttgcagcccagacacaggatccatgtttatgtcctggccggtcaacaaaaatgccaaactgcagtgcgacccatgaaaatcccccttccccgacactcacaccctcatttaatagtttgcttgccatttttgcccagtgtgtatgtgagtgtgtgtgttggccaagttttgtctcgttcaacgtttcaccattggccgtgacgctcgtttcgacggcgcgattgcgaactttgttgctattttaccaactagccccaccaacatccccttggatgcgggtccatctatggaaacgtgcgttgtctgctacctgacggttgactttctttctctaatgaaatgcggttacaaatgcaattttacatttttcacaaaaaagcattttatctgtcgacaccaggcccggcccgaaaacgcagactcgaaaaactccaggatgcgactccggagtttgcagcactgcgggaaaataagtcacaaaagaaaatacaagtaaatttataaatattttcaaatacttaaagacttcaaattgttgtgtagtggatgatagatgaacacaaaatcttagaaaaatgcttaaaaaccctccgttttgaaaggagtaagaacgagccttaaaaggcatatatattaaatattttttcaagtgtacttcttgcaaaagcacaggcagacagtcagtgcacgtgaca

SEQ ID NO: 24515 - DNA, 445 bp, DROSOPHILA
gttcgaaaaaaattcaaagttagacgtcaagataaaatcaacacacacgaagaaatggatttcggtgaaaacgtgtttgaccgtttggatgcgtggactaaaagtgaagtgaagcccggtgaaatgggacgcatcttggccgttcttctgaccctgatagtgatcagctttgccattgtcgttgtggctcgcatcctggtatctctggccataccaacattggttattgtggcacttttgatggcataccgtttcgtcactctttcggaaatgaaagatggtctcatggctgtgcccgatattctaacatcgtgtacgaactttatatctggccttttttgccagttgaaggcaaagtaaaattcttgtaaattgtttatatattatatatatattggatactcttctgctattcataaagcgtcgctttaatatacaaattttt

SEQ ID NO: 24516 - protein, 101 aa, DROSOPHILA
MDFGENVFDRLDAWTKSEVKPGEMGRILAVLLTLIVISFAIVVVARILVSLAIPTLVIVALLMAYRFVTLSEMKDGLMAVPDILTSCTNFISGLFCQLKAK

SEQ ID NO: 24517 - DNA, 3435 bp, DROSOPHILA
caatatgctcgatgacgctactctctaagtaatataataaattttaagtttacaacaaggtaaagcagcaaacaaagcaaaattatctagatatatgcgattgattattgtaatgattgatgattatgatgtttaagatgttatagctatgtgaccgaattgtgcgagaaacgtgaaaaaaaatttggggaaaattaagtaacaagcaagcaaaccacacaagtaacaaacaaacaaacaaacaggcgaatgaataatattacctatctacatacctttacctatatcgatttaaatataatatatatatatatgtgtatatatatatatgtatatctatattaatatatatacaaattattaaaatacaaacaaaaacaaaaatgatgaaaataaataagtaatatctacaaatttacggatacaataacaatatataaagattgaaatgatagcacattatttcttattaatgaagaaaatcccatttaagtgtttggacaaattgtgtattaaaaaaaaaaacaaaaatcaaatgtaaactttcttgtttcaatttgttaatatttacctgctttaattgaattagatagatgaatgaatactagttgatactagtcaacaggagcgcaatcaagtctgggcatttattggggaattcctggattcgttttttatttatacaaaacaaagtaaattgaatagttcccgccactgtcattggaataaatggaaggcttccaagtgaaccacccgttcgttgaacagctcaaaaaattcaacgccatttgtgcagtaaaattgttccgttttcaaattttgtaatttgtagcttttatccttaaaaatgtaaataaatgtcccaataaaacatgagcttgaaatattacaaagaaaaaatgcttccagtaacggcataatagtgtgaacgaaacttttgcacaactgaacactaacagtaaaagttccgcatgtatttctaagctgctctgctacggtcacaccatagaagatacctggaaagttctcaacttttttcgttttgataaattgattaattcattcgaaatggtggttaaagctgtctgcgtaattaacggcgatgccaagggcacggttttcttcgaacaggaggtgagaatccaaaatcatttgaacttctctgctcggcaaaatgtacgaaaaacagaagttctaaaggtcaaatagccggctgcacccgcggccccctcttccacttcaatatgctgctttaaattctgtcgagcattttaattaagtccgatttgagtttacgcctagtcacccagcaagtgcacctttatatttatataagccgcaccaaaatgcgcatatgtgtgtgcgctcaagtgcctacagcaaaggtcacgaaattggtactggacataaaaaggagttaagatataaagctcacttgttcgtaaagtatcgttaaatatcaacaaatatttgttttagaataagcattaggaatatgggaataattagaatgatgctgttcataattaatttgtacatcaaagtcaaagcagcaatgtcaagtgtcaagtaaacgattataaacttgatgattacaggttatgtttcagtgccgaggaaatttatgtttttaatctataaagataaccaaatgtttactttgctgcctataaatatttccgtttaacgtgtgtctattaacaaatgttattttctataataacctattatcatatgaagttggccacgctcgttatcataatcagtgcttctgctcactattatacacaacttgtgtcttatcagtattcgagtattatctgaagcgttataacccaatcccttcatcccgtccacagagcagcggtacgcccgtgaaggtctccggtgaggtgtgcggcctggccaagggtctgcacggattccacgtgcacgagttcggtgacaacaccaatggctgcatgtcgtccggaccgcacttcaatccgtatggcaaggagcatggcgctcccgtcgacgagaatcgtcacctgggcgatctgggcaacattgaggccaccggcgactgccccaccaaggtcaacatcaccgactccaagattacgctcttcggcgccgacagcatcatcggacgcaccgttgtcgtgcacgccgatgccgatgatcttggccagggtggacacgagctgagcaagtcaacgggcaacgctggtgcccgcatcgggtgcggcgttattggcattgccaaggtctaagcgataatctattccgatgtcggccactgtgctgatctactctatttagcactacccactggagatatacaaacgatatacatacttctaaacataaatacatagcctgtggtctgttagttgatacgcaacctttgaggttcaataaattggtgttttgaaattgccccataaacaaaagttatagttttcatttgagttgagatggtaagaatgaatatatcacttgttgctcgacgaattcgcaagtagaatcgggttatagattcgtatgaaatgaattacatattagatgagtgcagaacccaaaaatcacgatgagacacacattcgttcatgttttgataacatatctccgttttagattatttatttatttttgtaattactttggttactctccgggcagcctggttaaaagtctttaaaacacactttataaacaatgagttaggtagtattatttacaaaaaatattgtaaatcaagatactcgccacatgagtagaaactaatattaatttcgtgtgcggtataaattcactacaaaagaacaaagtcatatactacgacggggatttaaatgaacctaggtcttgttgaaatatgattggtagacaatgcccagcgatgaagtggcgaatagggtgaagtagctccaccaggtggcaaagcccaggaaacccttgtacacctccgtggagaaaacctgaaaaagaaattatgattaaaactggcattgacgtgcacagcaaggattcttacgtttttcaggctgctaaacgaagcctgcagcgattgcgccgactcaataatattaaagtcaccatctccttgggaaacggcaacaccagctccttccgtttcgctagccgcacactcgtgctgcaggacaacgctctcgcggaaaatacccgaccagctaaagccgcccagacttttgtacataagtgtgagataaaggcataggatcagtggggcagcaaattgcagcgtcacaacacatagatagtagaaaatagacgagatctgtaaaagggaaaggaggatttactcgatgaacgtttgtataaaataaagactgcctccaccttctgcttgaactctacgttggtgatccgaccggcctccttgcgcagatccatgatcttgtcgtgggccagattcaggtacgattgcag

SEQ ID NO: 24518 - DNA, 710 bp, DROSOPHILA
acaccatagaagatacctggaaagttctcaacttttttcgttttgataaattgattaattcattcgaaatggtggttaaagctgtctgcgtaattaacggcgatgccaagggcacggttttcttcgaacaggagagcagcggtacgcccgtgaaggtctccggtgaggtgtgcggcctggccaagggtctgcacggattccacgtgcacgagttcggtgacaacaccaatggctgcatgtcgtccggaccgcacttcaatccgtatggcaaggagcatggcgctcccgtcgacgagaatcgtcacctgggcgatctgggcaacattgaggccaccggcgactgccccaccaaggtcaacatcaccgactccaagattacgctcttcggcgccgacagcatcatcggacgcaccgttgtcgtgcacgccgatgccgatgatcttggccagggtggacacgagctgagcaagtcaacgggcaacgctggtgcccgcatcgggtgcggcgttattggcattgccaaggtctaagcgataatctattccgatgtcggccactgtgctgatctactctatttagcactacccactggagatatacaaacgatatacatacttctaaacataaatacatagcctgtggtctgttagttgatacgcaacctttgaggttcaataaattggtgttttgaaattgccccataaacaaaa

SEQ ID NO: 24519 - protein, 153 aa, DROSOPHILA
MVVKAVCVINGDAKGTVFFEQESSGTPVKVSGEVCGLAKGLHGFHVHEFGDNTNGCMSSGPHFNPYGKEHGAPVDENRHLGDLGNIEATGDCPTKVNITDSKITLFGADSIIGRTVVVHADADDLGQGGHELSKSTGNAGARIGCGVIGIAKV

SEQ ID NO: 24520 - DNA, 6335 bp, DROSOPHILA
atcaatagcagagtgagcggaaaatcagcttaaccagctaaatggcatataaataaatataaggtttttattttggaacacgctcatccaacacacatgcacacgcgcatacacgcacgcacacacacaggagtaaaggtatgggtggcctcaagtgtgtgtacatattttgatgttaggtgggaaaaaagcgggcggcaagtttacgcaatcgccgagcgaaaagcaaagagcagcagctatacgttgtgaaaagtgtgctttttgtgtgtttacaaagagacaaacaagacatccgtcgtttgtatgtacgtgcctatgtatgtatgcgcaggtggagtcggttgctagctgaaaaatcaacgagcggcattttttacgcatttccaatacgccacatacatatatacgtgcgtcgtttgcgcgtgtgtgtgtgtggttgtgtgtattttggtgtttttatttatttattgtgcttctctttcgtcgtttgccgttacgagtgatgtatgcatgtatgtatgtactcgccaaatctatatgtggctgtgtgtgtgcgtgtgtttacttatatgaccgtatgtatgggcgtttgtttgccttttgttgttctcgttaattttattttggtttcgttttgcatgtttatgcatgcaagctcgatcgatttcgattgatgggtagccatgtggggcctgccagtgcgagagttctcaatccgttcatgtgtgtttgtgtcgcgagttccagtgtatgtgcgtgtgttggtgccaagtggaaccaaacaagtcagagagtggagcagtgttgccaacgttcgttaataaccgcattaaaaaagaagtcgcctttttttgctccccctccgcccctttgccagagaaaactcaagatacagatcgttctgcaaaagttttggttgccatggaagttcaagtccctctgtgtgcacttattttctcctaaaacactcaaacaatgatgcatttgcggcgaattccatagtttgccatttgttgcacaggtgcataataaagggttttataactttaatagtggtggctggcaaatagcctgttgtttacattctatcgaaacgtgttcaaaatcaactagtgcaaaatatgtaattacttttataagtagaacaacgtgtccctttaatagatatttttataaattttaaaactaattttaaataaaattagttgtttagccggaaaatgtgatcaaaagtaaaaggaactaaataaaggtaacaaaaaaaaaacaactaatgaataccattctagaaacatttatgttacatgtacatacatacacatgcaatgcttcattttcgggcgcttttccttcgagtgtcacatggacacaactttttaatgcagctcttttctgctttgaatgatttattcgctatttgtggcatgtaatcgcctgttggcaacactggccgcaagctcagtttcgtttttgtggagagaggagttaccgatataagtgtggagttggagagcggagattttccattcccgggaaagcaaaaagagcgcaagcgcgagcccgctatttatcagtaaatagagtgtgtgtatgtgtgtttactcacgtagtttccgcggcgagtagtagtagttgtgttattattattattatttttgttgttgcttcaatcggcgcttgtttttgttgccgaccgaggtatgtacatatgcatgtacatacataaatacagcggtgcaaaggtgtgattgtgtatgtgcggctgcggtagcaaaacagagtaaagcaaaaaccgaaacagcaacggtgtgacttagtgtgtgtgtgtgtgtgcgtgtgtatatttggaaaataatttgtggctgacgaaaagaagaaaccttgaggccaaagcgaaaagagagcgaaaggcgcgtgaaaagctaccaaaaaacaggaaaaaattgaggcacaatcagtgcgggaataaaacaacacagttctcaatgtgcaaagtcaataggtaaaaaactttaactgcaaactatgcaaaggcttggattcaaagaaaacaaataaatgtagatacccaaacaatcatggtgtttatatcatgttgtgcaattttagtgaaaagaacagataataatcaaagataagaatgtaataaataaatgagttatatttaaattcaatcacatttgaataacttttttaggtaatttatgtaatgatatcaacgtgaatatcaacatgaaaaagcgtgaaaaacgtggtacccatttcgtgaattgttattatttaccgctttgtttaagcaaagagttttgaaacaaacctattaacgaccattcatttcgatcattttgcaggccaacaacaacactaagcgagcataggacaagttaggcacttacctttcaatggccgccactaccacaacaacaaccacaacactagcaacaaccaccggcaatagcagctccacaaacaacagcagcagcaacaacaacaacagcatcgccagcagtcacaacaacaacaacaacattgttaccgtacacaccgtactgaacaacccacccaccaatactgcaggcggtggtgttgccgacgccgccaccgttgccattgccaaggacatgttgcagctgcatcatggcgcagcagcagcagcaacagcggcgctgaataactacaacaatagcagcaacaataacaacaacagcgccgatcagctgaccggcaacagcaacaattcagcaaaccacccacctgccaccagtagcaccaccaactcctcctcatcctccaccacctccgccaacaccaacaacccctctgccaatgcggcatcgacattaacatcatcttccccgccatatggagaactacgcttcaatcaggaggtactgcccatcacggatgccgtgacagtaatcggacgcaactcgtccacgtcgctggttcacttcaacgttgccgagaacaaccttgtgtcgcgcaaacactttcaggtgctctacgatgtggagctgcgagccttctttgtccagtgcctaagcaagaatggcatctttgtggatgatttcctgcagcgccgcaatgtggatccacttcgtttgccgcagcggtaggtataccaccaagggaatcgcgaagcaatatgaacattaatattaacttattgtttgactaaagaattctttccaatataccattttatgcacacttatctctaatgcaatgccccatattcatattgcagctgctacttccgcttcccgagcacggagattcgtatcgagttcgagagctatgtgcccgccacttcatcggatgcaattgacggtcattcgccatcgttagtcgttggtggtggtggtggagtagctggtggtggagcgcacgttattattacaccgctaccgagggacgaacttcaccagcagcaattgcatcaccaccagcaacagccgcatctgcagcaacagcagcatccacaccacccgccagcgcaccacctgccgttgcagcagcagcagcagcagcaacaaccggcgcaccacccgctcccgcacacaccacaccacccgctccaccacacagcactgcaccagcagcaacagcgtagtggcagcatcgttgtggcccctccagctggagcagctgcccacctaattgccggcgatggacccggcatatattcaccgctcaaaatatccatacccaagaaggagcagaagagcccctacctatcaccaactggcaagtggaatttcattctatataacatttgaatccttaaatgcggaccacattcagccgttttaaattgattacggagatttattaaactgttataaaaccgaattttctaattctaatgaaattgtttaattgtcatcgcaggtacaataagcgctgccaacagttgtccggctagtccacgtcagggtttcattcagaatcagcccaataattacaataactacggtaacaacaatacagtaagtgaaccactttagagatcgccataaactatatgcatactaacaaacaatgaacatttgcagcaggatctgttccagactccctccacagccagctacaatcacaacgagaagccgccgtatagctatgcccagctcatcgttcaggccatatctgccgcaccggacaagcagctaacgctctcgggcatttattcgtttatagtcaagcattacccgtattaccgcaaggagacgaacaagggctggcagaattccatacgtcataatctcagtttgaataggtaatgttgatcgatgctgggagtgatagtagaaattgtttcaattacacaatcgactttctgcaggtatttcatcaaggtggcccgctcccaggacgagcccggaaagggttccttctggcgtattgatccggacagcggtgccaagctgatcgaccatagctacaagaagcgtcgccagcgaagcagccagggcttccggcctccatacggtatgccccgctcggcgccagtctcgcccagtcacatgggtaagtgacaatcgtttgtcagaggcattgcatcatatatatatatatatgaactctttcctgtcttctccccacagataattcgcgcgagagctcaccgctccaagatattgtgttgcaatcagcacctggatcaccgggcatgtcgctggaacagcgagctgctgatcccggtatgttttgctcaatttaaatccgtttcattcaattccaaaatcgagttgttaaagtattgttctccaaacactcgacttgggaatagaactttgagaaagtcatctgattgtaatctttgggattatcttgcagaaattatttacaactcacaaaatgcacaccagcaacagcagcaacaacagcagcagcagcagcagcagacactgtcaaacaattccaatcagtacaggtgagcacaacattaaaatgattcattcaatgcgtgtcttaaacatttattttcgtattttccagtagtggcagtccgtactacgtaaccaatcaaagctctggagtggccacaccacagacgcatgtggaaggaagcgcagcgagcggcggcggcggaggcggcggggttggagctctgcttgcgctaaagaggaaccatgtgatgggcggcggggcatcgcagcatacgctgcatcagcagcaggccgtggcccagcaacagcattcagagattatctacgaggagttgccgaccgactacagcggccacattgaggccagcgaggaggagtgcgtcaccactgccaccgatgccaccgtggccaagcgacccaagtatgtgtcggaagtgctctgatgcgtgcggatccagaagcaccggcagaacaagggcaaatagtgaggcccatgggtgtaaacgattagaaagcaaaaacaaaaaagtatctccatcttgtatattgaatttgccaatcaaaaacctatacctaaaccccgaaatacaaatcaaattaaatagccacacacgcagaacttaaggaacatgaacgcacgcgaagagcaatgtatatgtaaattgatatggaacattttacaaatagcaactgtgagatgattgtgtttgaaatgttggccatgcagccgttcaacggcggcgacttatgcaagcacacattttgaaaattcgaaaacccgattcgaagtaacgactttatcccctagatctgacgaattcaatatgctcgatgacgctactctctaagtaatataataaattttaagtttacaacaaggtaaagcagcaaacaaagcaaaattatctagatatatgcgattgattattgtaatgattgatgattatgatgtttaagatgttatagctatgtgaccgaattgtgcgagaaacgtgaaaaaaaatttggggaaaattaagtaacaagcaagcaaaccacacaagtaacaaacaaacaaacaaacaggcgaatgaataatattacctatctacatacctttacctatatcgatttaaatataatatatatatatatgtgtatatatatatatgtatatctatattaatatatatacaaattattaaaatacaaacaaaaacaaaaatgatgaaaataaataagtaatatctacaaatttacggatacaataacaatatataaagattgaaatgatagcacattatttcttattaatgaagaaaatcccatttaagtgtttggacaaattgtgtattaaaaaaaaaaacaaaaatcaaatgtaaactttcttgtttcaatttgttaatatttacctgctttaattgaattagatagatgaatgaatactagttgatactagtcaac

SEQ ID NO: 24521 - DNA, 2529 bp, DROSOPHILA
catagtttgccatttgttgcacaggtgcataataaagggttttataactttaatagtggtggctggcaaatagcctgttgtttacattctatcgaaacgtgttcaaaatcaactagtgcaaaatatgtaattacttttataagtagaacaacgtgtccctttaatagatatttttataaattttaaaactaattttaaataaaattagttgtttagccggaaaatgtgatcaaaagtaaaaggaactaaataaaggccaacaacaacactaagcgagcataggacaagttaggcacttacctttcaatggccgccactaccacaacaacaaccacaacactagcaacaaccaccggcaatagcagctccacaaacaacagcagcagcaacaacaacaacagcatcgccagcagtcacaacaacaacaacaacattgttaccgtacacaccgtactgaacaacccacccaccaatactgcaggcggtggtgttgccgacgccgccaccgttgccattgccaaggacatgttgcagctgcatcatggcgcagcagcagcagcaacagcggcgctgaataactacaacaatagcagcaacaataacaacaacagcgccgatcagctgaccggcaacagcaacaattcagcaaaccacccacctgccaccagtagcaccaccaactcctcctcatcctccaccacctccgccaacaccaacaacccctctgccaatgcggcatcgacattaacatcatcttccccgccatatggagaactacgcttcaatcaggaggtactgcccatcacggatgccgtgacagtaatcggacgcaactcgtccacgtcgctggttcacttcaacgttgccgagaacaaccttgtgtcgcgcaaacactttcaggtgctctacgatgtggagctgcgagccttctttgtccagtgcctaagcaagaatggcatctttgtggatgatttcctgcagcgccgcaatgtggatccacttcgtttgccgcagcgctgctacttccgcttcccgagcacggagattcgtatcgagttcgagagctatgtgcccgccacttcatcggatgcaattgacggtcattcgccatcgttagtcgttggtggtggtggtggagtagctggtggtggagcgcacgttattattacaccgctaccgagggacgaacttcaccagcagcaattgcatcaccaccagcaacagccgcatctgcagcaacagcagcatccacaccacccgccagcgcaccacctgccgttgcagcagcagcagcagcagcaacaaccggcgcaccacccgctcccgcacacaccacaccacccgctccaccacacagcactgcaccagcagcaacagcgtagtggcagcatcgttgtggcccctccagctggagcagctgcccacctaattgccggcgatggacccggcatatattcaccgctcaaaatatccatacccaagaaggagcagaagagcccctacctatcaccaactggcaattgtccggctagtccacgtcagggtttcattcagaatcagcccaataattacaataactacggtaacaacaatacacaggatctgttccagactccctccacagccagctacaatcacaacgagaagccgccgtatagctatgcccagctcatcgttcaggccatatctgccgcaccggacaagcagctaacgctctcgggcatttattcgtttatagtcaagcattacccgtattaccgcaaggagacgaacaagggctggcagaattccatacgtcataatctcagtttgaataggtatttcatcaaggtggcccgctcccaggacgagcccggaaagggttccttctggcgtattgatccggacagcggtgccaagctgatcgaccatagctacaagaagcgtcgccagcgaagcagccagggcttccggcctccatacggtatgccccgctcggcgccagtctcgcccagtcacatggataattcgcgcgagagctcaccgctccaagatattgtgttgcaatcagcacctggatcaccgggcatgtcgctggaacagcgagctgctgatcccgaaattatttacaactcacaaaatgcacaccagcaacagcagcaacaacagcagcagcagcagcagcagacactgtcaaacaattccaatcagtacagtagtggcagtccgtactacgtaaccaatcaaagctctggagtggccacaccacagacgcatgtggaaggaagcgcagcgagcggcggcggcggaggcggcggggttggagctctgcttgcgctaaagaggaaccatgtgatgggcggcggggcatcgcagcatacgctgcatcagcagcaggccgtggcccagcaacagcattcagagattatctacgaggagttgccgaccgactacagcggccacattgaggccagcgaggaggagtgcgtcaccactgccaccgatgccaccgtggccaagcgacccaagtatgtgtcggaagtgctctga

SEQ ID NO: 24522 - protein, 740 aa, DROSOPHILA
MAATTTTTTTTLATTTGNSSSTNNSSSNNNNSIASSHNNNNNIVTVHTVLNNPPTNTAGGGVADAATVAIAKDMLQLHHGAAAAATAALNNYNNSSNNNNNSADQLTGNSNNSANHPPATSSTTNSSSSSTTSANTNNPSANAASTLTSSSPPYGELRFNQEVLPITDAVTVIGRNSSTSLVHFNVAENNLVSRKHFQVLYDVELRAFFVQCLSKNGIFVDDFLQRRNVDPLRLPQRCYFRFPSTEIRIEFESYVPATSSDAIDGHSPSLVVGGGGGVAGGGAHVIITPLPRDELHQQQLHHHQQQPHLQQQQHPHHPPAHHLPLQQQQQQQQPAHHPLPHTPHHPLHHTALHQQQQRSGSIVVAPPAGAAAHLIAGDGPGIYSPLKISIPKKEQKSPYLSPTGNCPASPRQGFIQNQPNNYNNYGNNNTQDLFQTPSTASYNHNEKPPYSYAQLIVQAISAAPDKQLTLSGIYSFIVKHYPYYRKETNKGWQNSIRHNLSLNRYFIKVARSQDEPGKGSFWRIDPDSGAKLIDHSYKKRRQRSSQGFRPPYGMPRSAPVSPSHMDNSRESSPLQDIVLQSAPGSPGMSLEQRAADPEIIYNSQNAHQQQQQQQQQQQQQTLSNNSNQYSSGSPYYVTNQSSGVATPQTHVEGSAASGGGGGGGVGALLALKRNHVMGGGASQHTLHQQQAVAQQQHSEIIYEELPTDYSGHIEASEEECVTTATDATVAKRPKYVSEVL

SEQ ID NO: 24523 - DNA, 2521 bp, DROSOPHILA
gtgctgggtcctcgagtccagcggttcctctggtggaagcgctacttaactggcctgcagctggtccagtttaccattatcttcttttgggcgtcacagatgttagtccgtggatgcgagtacggcacctggataaccctatcgatggccatatattccctgcctttcctctttatgttcgggaaattctatatgcaaaagtacacggtatcagcagtcggcaagaaacctatataaaccaataacacttttataaatagcttaaattctattgctcgttttagttgtaaaaaccaagtgcatttttatactaattttcaaacaaattgacacagttaataaaagctcgaccttgaatatcaattaaaatacagtcagtaaaatgttaagtgaaaatgttataggtaaaacctagaccttgaccaaagtttatgctccagcgacttgtaattagattttgacgaaaaatatcaacgcatcaacggagcgatcaaaatgcgtatataagtgactgacccttggcagtcggatctgattcaaacttggagccaccatatgccatgacgtcgtcgatgggtaatgatacgaaaactgagagctattcgtatccattcgcggatttggcggacgaacggacgcaggattggccactggtcaaatcgccgtggaatattatcgcactgcttgccctctatttacttatggtgcgctatgcgcccaaatggacagccaggtgagatcgagtccaagcatttgcacatccattacaaaccaccagcgctggccactcggtatttcagatgcaagccgctgcagttgagagtgcccttgttttgtcacagcttggcaatgatatttctcaatggttatatttgcctggagttcctgacggcttcactaagtcttggctacaacttcgcatgtcaggagtgtcgggtgagccatgatccacatgaaatccgggtgagttggcgaagcaactgggaattgagaagttaagaattcgaaatctgatgcagatagcggcagctatgtggtggttttacatctcaaagatactggaattcgtagacacggcattcttcatcttgcgccacaaatggaaccagctgagcttcctacatgtgtaccaccatagcaccatgttcttgttttgctggacttatgtcaaatggctgccgacgggttcaagtgagtttatataccttaaaaatattatatttctagtagtaatatctcgtattccatgcagccttttttccaagcatgataaactcttttgtgcacgtgattatgtacagctattatgcattgagtgtgctgggtcctcgagtccagaggttcctctggtggaagcgctacttaactggcctccagctggtccagtttaccattatcttcttttgggcatcacaattagttttccggggctgtgagtacggaaaatggttaacgccaatcggagctgcctatatggtgccatttctctttatgttcggtaggttctatgctcaaaaatactgtgtttcggcagttgtaaagaaagccaagtaaatatagcaatcgaatttgttagtagtattatagaaggggtttcaattggttgactaatttaattagttatttggggacacagaataaaaagaacgtacaatttctatgaaaatacaatttgtttatagcttcaatgtgacactttctgtggttatagcattgtatataaaagtattatcgattggcttgtattgcttcgtaatgatcttgatcacctcctgggcagcgcagccacctgaaaggaattagcagaatatagtatcggtcaacgcataaaccaaatggaatatttaccaataaaagcagacactgcatgcaactcagctccgccatatcgacaaatctcgtgcagaacatcatcgctgatggtggcgtgcattcccaaatcgctaagcatcttggcggcaatgctcttcagacgtccaatgtcctgctcaacgatgcactcgccgggaatgttgccacactcgctgaggaagcgctcgtaggcgcgcagcgcaaagttgtatgccgtgaggttgccctgcagctcgttgtcctcaactggaaggcaaggaaaggtaagtcatttaaggttgttccaaaatagatagatagatctttacccagtggtagcaggcgactgctcttctcgtactcctctgcaatgcgtgtaccccttatgaccgccagtccggctgcttctttgcaaatgagacgcacacttctctcatcaatgctgtcggcaggcaaagccaactgcttaaggtactcctggcacttgtgatacacctggtcggcgtcttgcagcgcctgttggcggtagatgtgctgcagggcgatataggagtccgtattggcagtcatgtccggcagaacgccaggcagagggagatggccctcattctcatgtatcacaaagtgctttagggccttggccatgatccaaaagacgttgctctgtaaaaaaaaaagaaaaacaaatgaa

SEQ ID NO: 24524 - DNA, 521 bp, DROSOPHILA
aattcgaaatctgatgcagatagcggcagctatgtggtggttttacatctcaaagatactggaattcgtagacacggcattcttcatcttgcgccacaaatggaaccagctgagcttcctacatgtgtaccaccatagcaccatgttcttgttttgctggacttatgtcaaatggctgccgacgggttcaagtgagtttatataccttaaaaatattatatttctagtagtaatatctcgtattccatgcagccttttttccaagcatgataaactcttttgtgcacgtgattatgtacagctattatgcattgagtgtgctgggtcctcgagtccagaggttcctctggtggaagcgctacttaactggcctccagctggtccagtttaccattatcttcttttgggcatcacaattagttttccggggctgtgagtacggaaaatggttaacgccaatcggagctgcctatatggtgccatttctctttatgttcggtaggttctatgctcaaaaatac

SEQ ID NO: 24525 - protein, 140 aa, DROSOPHILA
MQIAAAMWWFYISKILEFVDTAFFILRHKWNQLSFLHVYHHSTMFLFCWTYVKWLPTGSSEFIYLKNIIFLVVISRIPCSLFSKHDKLFCARDYVQLLCIECAGSSSPEVPLVEALLNWPPAGPVYHYLLLGITISFPGL

SEQ ID NO: 24526 - DNA, 4092 bp, DROSOPHILA
acagccgtctgttgtcctatgatgacagaaatgatgccaacttcgcaggacatgttatctccaatggaagtttctccaagattctgggaccgggagttcgcctgggttggcttgaggttcctccgcgcctgaaaccaattttagatggaagtggttttgccactagtggtggatgcttcaacaactacacatcagggattgtgggcagtctatttgagcttaagctagcccagaagcaaatttctgagtcctatgaagcttataaggagcgcatgctggccaccacgcaagtgcttcgagatgagttgcccgactgctgcaagttggtcagccccacgggcggatacttcatttgggtgcggataccggatcgattggactgccgggagtttctcaagtactgcatggagaatcacaagatctactttatagtaggaacacgcttctctgcggatggtcaaagtggcaaacagttcttccgcctgtccatcgccttctatccgaagtcgaagttggtggatggtgctagaagactttgcaacgcacttaaggattacatagccgagcaatagattccccatggcgtatcttaatatggcaaaatgtgtttattattgtggttatctgctatcgtactttaaatatgacttaaaaggatgtgactgtgcactaaactacttatcaagaagttatctactatataaagagatatatgatatacacacgtttgttgtacagattcttgggcatgacgctaaaaatatcacaaatctgttaaattctatacaaatacacaacaattagttcagagtataactttacacacgtacagcggatctcagctcaactgtaactatatccctagttgtatctgcatctgcatcttgtcatttgtgctgcgctgcgaatgtttacagatttcaatatctttcgattgctcataatactttcgcttgaattggaatgcccgctggcggatttacgtccttgcatatgcaaactactccgaaaaggttagtacgatctccttgagtgaggtatacgtgccgattaccaagcccaggatgcccacaatgatcagcacaaagttgcctgcaaggatttttggttagtaaatagatatctatggctatttaatcagcacactcacttaacaccagccagacttttgcgaaacccttcgtattgtaccaatgtgtgcagatctggatgagtgccgggaatgccaaacccaaagcggaaaggcatagtgctccaaacagggagatgaacagctccaggttgggaatggccactgccaggaggactacggtaaataaagacatgaatattactggctaaagaatatgcatatatagggaatatcagacttacaggtgatcagaacaagaccagttcgcactgcgtactcccaaaacagggcattccgttgggcgcccaggcgcttggccacatagtcattccaggtgatatcaatggccacatagcaggccaatccatgggtgatataaatggcaaaggccagcatgcctttgacgcacatggaaagccttaaaggagacacatttaaaagtcagtataatcaggatataactaacaagttagcttacacttcgtgctccggcatgtttagtgtgatggaaccaagcaccgcagatccatagttaagataaccaaagagacccatgcccacgtagaggaacacaatgagcaccatggatacgttgagcacaccacagctgccgccgaacttctgcggtgtcttcatctcgttttccaggggcaggattacaccgatggcttccagggcaaacaagacagtgccaaagaagagcgggaaattcgagggttttccaaaggcatccttgccctctgtggtaactggctcgcggaagatgtagtagcagatgatgccgaacgataccatcgtaatggcgttggccagcgtggagaacggagccagatacttaagattccgcacccagttgatgaggatcagtggcagcagtatgatgatcatgcagagtcgcacatcgatgctcgtatcggccactgcatccacaatggccttaatgttggacgccacgaagaccacgtaaacgcaacaggtgcccagttgatagattagcaggaaggtgttaaccactgtgccaatgtagggagcaaaaacccggaaacatttggggccttcgcccattgccgtttccgctaccattggataattcatgctgggcatctgtcagggagattgcgttattaatctagattatctaacttcaggataagtgcgtaacccaccttcttcctgcggcacagttcatactgagccttgaccagctggtgaatgcagaaggtgcaaatgaaaccaatgacaatcgtaccaatggatccagtgatataaccggagttgcgaaaggcatttggcatggccagaattcctgtgcccagcgaaccctttagcaaatggaacagggtttccgagttccttaaaattatttatattatattatttttttaggaattatcttcagatcctcgcttacgtggtgggatgctccacatcgcgatgatgatagggattgtagtcgggatccttggccactacggccttgttcttctgacccttctccgccagctccaatttgtccggatgatcggcgacgtaagccgaattgctgtgtccattcttggtcatgacttttaattaaaaatacgaattaattaaaagagtataaatactttagaaaaaattaagctataaagccccctcccgttaagaatagtattaatcagtgacttctccgaaatctacagcatatctacagctgtatctgtaaatgtatccgctttgcatttgtatctgcatctgcatctgtggcgcaacaagtgcgtgatgtgcacgatgcgcgttgctctgaaaatagtttgcgccgctgacatatttctaaattgaaagcagactgcggcaatgtcaagttcagtgccagcgattcattgccccgattttcgaatccgacgttttcccctttctgattttacggtatttacgagtcttacgagagtacctggcataacacgaatcgttcggcgttctgagacgtgctaaaatagaatggaagcgaaataacaaaggccaattttagtgtcacttgtctgtagaatcggactttgttgtccgcctcatgcttaattggaaaaaatatgtgtattcgtgtgacaacggacaattcgagactttacggcttccagttaagataatctcatctgtccgagagatatggaaattttggcaaattacgccaacttttccggttctcaatggatcgttttacgagcgtgcctctttgcaattgccttcattgataatatctgcagatcagatgacatataacatgatatgcaagtcgagtcgagtcgagtcgagtccatctagtctataacctgaatgacactctgcataatctcaagtacggcggcttttctttccgtacctctgacaaattctcagatatgaggaagtcataacaccgatctatggggagctcttgacgttgattacactaaattgacttttggaaatacatgagtaatagttctagctgggaaaactatgcaaaataatttatttatgagtggaataattgctgcatttgtatatctaatgatttaatgggaaattctgaaattcctatagctgctgtcggactatttagaaaagatttcgaaagaaaagacagttttaaacaatagtattcatcaatgaacgcaactgggcgtatgagcaatgtgcttatagtaaaatctatgttaaacagttaacaattgaaattttaaggaaatatctataatttcgcttatttcacattctttaccaattaagccattattctaataactttctaatagtctaattccggcttacacgctatgggcccattgtatcaccaccaaaaatagacaaagcctagactagacgcaaaacagaattcgcagaaataatttccataatttatttcaactatgctaaaacaaaataaacccccccttagtttgttttactaatgaagtgcaggcggttttaactggattcgc

SEQ ID NO: 24527 - DNA, 1418 bp, DROSOPHILA
aacgccgaacgattcgtgttatgccagtcatgaccaagaatggacacagcaattcggcttacgtcgccgatcatccggacaaattggagctggcggagaagggtcagaagaacaaggccgtagtggccaaggatcccgactacaatccctatcatcatcgcgatgtggagcatcccaccacgaactcggaaaccctgttccatttgctaaagggttcgctgggcacaggaattctggccatgccaaatgcctttcgcaactccggttatatcactggatccattggtacgattgtcattggtttcatttgcaccttctgcattcaccagctggtcaaggctcagtatgaactgtgccgcaggaagaagatgcccagcatgaattatccaatggtagcggaaacggcaatgggcgaaggccccaaatgtttccgggtttttgctccctacattggcacagtggttaacaccttcctgctaatctatcaactgggcacctgttgcgtttacgtggtcttcgtggcgtccaacattaaggccattgtggatgcagtggccgatacgagcatcgatgtgcgactctgcatgatcatcatactgctgccactgatcctcatcaactgggtgcggaatcttaagtatctggctccgttctccacgctggccaacgccattacgatggtatcgttcggcatcatctgctactacatcttccgcgagccagttaccacagagggcaaggatgcctttggaaaaccctcgaatttcccgctcttctttggcactgtcttgtttgccctggaagccatcggtgtaatcctgcccctggaaaacgagatgaagacaccgcagaagttcggcggcagctgtggtgtgctcaacgtatccatggtgctcattgtgttcctctacgtgggcatgggtctctttggttatcttaactatggatctgcggtgcttggttccatcacactaaacatgccggagcacgaagtgctttccatgtgcgtcaaaggcatgctggcctttgccatttatatcacccatggattggcctgctatgtggccattgatatcacctggaatgactatgtggccaagcgcctgggcgcccaacggaatgccctgttttgggagtacgcagtgcgaactggtcttgttctgatcaccttcctcctggcagtggccattcccaacctggagctgttcatctccctgtttggagcactatgcctttccgctttgggtttggcattcccggcactcatccagatctgcacacattggtacaatacgaagggtttcgcaaaagtctggctggtgttaagcaactttgtgctgatcattgtgggcatcctgggcttggtaatcggcacgtatacctcactcaaggagatcgtactaaccttttcggagtag

SEQ ID NO: 24528 - protein, 465 aa, DROSOPHILA
MPVMTKNGHSNSAYVADHPDKLELAEKGQKNKAVVAKDPDYNPYHHRDVEHPTTNSETLFHLLKGSLGTGILAMPNAFRNSGYITGSIGTIVIGFICTFCIHQLVKAQYELCRRKKMPSMNYPMVAETAMGEGPKCFRVFAPYIGTVVNTFLLIYQLGTCCVYVVFVASNIKAIVDAVADTSIDVRLCMIIILLPLILINWVRNLKYLAPFSTLANAITMVSFGIICYYIFREPVTTEGKDAFGKPSNFPLFFGTVLFALEAIGVILPLENEMKTPQKFGGSCGVLNVSMVLIVFLYVGMGLFGYLNYGSAVLGSITLNMPEHEVLSMCVKGMLAFAIYITHGLACYVAIDITWNDYVAKRLGAQRNALFWEYAVRTGLVLITFLLAVAIPNLELFISLFGALCLSALGLAFPALIQICTHWYNTKGFAKVWLVLSNFVLIIVGILGLVIGTYTSLKEIVLTFSE

SEQ ID NO: 24529 - DNA, 7055 bp, DROSOPHILA
aattaacgtttatttaattaatattaatgcggacgccgctcttgcggcttgctgctgctgcaacattacatgttgcatttgttgttgtgttgcattttggcatagatttttgggtcagcgcagtcctgttaaagattgtcaataaacggtttgttaactcggtaacctagtcatgatttcgattttagaaaggaagcctttaatgtgttattaatttttaagttatttataacgtttacaataaggtggaatttgaaagattagcccggattttatgggtagtacaaatttcagtaatgcatcattatatatataatttgattaataaaaggatgtgtcacaaacttgtacacttttctttatctcccataatacccagcaatgaccctcgaagttgtgcaaatattttaacacaaatcgaagtggccgtcgatccggtaaccgaaaatcaaattgaaatcgaaagtaaagtcgtcaggcggcaaatacatcattcgctcgcctcgagatatccgaaaggaaacgggcgtttcgatgggcaaatatttgcgagccagcgataagggctctctcttatttttcttttctttttttattttattttccttttttttttggggtaatcgatcagtgtcatgcgggggtgggggcgtggaccttgcagagcaataaacccagtaatttatagaccaatcacagacgcagtgcacgcaccgcgaacaagtgaaaaaatcatagtccaaacacacataacgcattagagtcgcagaaggaggaagacgcgatggactcgatgcacttggtcggtcggtggatgggggtgcaatttataggatagacaacgcacagcgggcagtcgcgagccgcgagtcccgaggagcatcatcccagtacttgcctcattgccaattgatttatacaaacggcaaagcaacggaacacaaattggctgcctcgaagatctctcttccatactcctagctattatttggattcttatttttttttttttggatttgttgttcctgcaaactggctatgggaaatgatttgttgcactttggctgcaatcatagaagagacgcttggttgcgtatacgcagaactctttggtgcaactgcttaaccttgtgacctcctcgctgggagggattcgatggtctgaaataaacataaataggaataggaactttgaaaattttgaaactgccagcgcacacgtgtggctctcgttggggatttccttggaaaaccgccgtagatatcatcatcatcatcatcatcctggctttgcatgccgactgcgtagctaattagatccttaaatggccaaagcaaggcaatcccccggcggaaagtgagaccagccagccaggcgttggcaaaaaatgccacacaaatgacgagcggacccgttgaccgtttttggtttggaaatcgaagtggcaacgggacgcgtcggccaacagcaaaacacaccagtttatcgagccgaaacgacccaaaacaataaattacgcaatccaaatgctcaactgcagtccatcaatggcataatgaggcagtctcgagattcagagtcccagtctcagtcccagtcccaatcgcaatcccaatcccaatcccagtcgcagtcgcagcgtggatgcattaccatatcggcataaattccggagcacatcgttaagtgggctgacgacgagtggccggggcatcggagaagacgtgtgctgcagctggaacaggttgtccgtcgtcgtgtgttgcatgttgcaggttgccggctgctgatgctgactgcacacttgccacatgccgcatgccaagctgccgccgccaaactcccacagctaatgagggaattaccggcactgccaatgccatatcgtcatcaccatcgataatggcttgtgcccggcctcaggtgggggttaaatatcagtgggcggtgggcttgacctttggaaggatggcgcccgctgtccagagagccagagaggtggctttaacatgccacgccaagaatttgagctcaggtctttaaagattcaggcaactgcagacacaaggccagcgtttcaatccgtcgagctgatttgtgaacattaataggccggtctataacagcataatgaacttaagccttaacagtatacatacactgattaagtaaaatttttagaaaatttgattaaaataaattatttataattgtataacataacacgctcgaagcatcgagcttactacaaatttctgattgacgatcgcacatggttgaagaagtccgtcttcttagagaaatctgaaacggagtgcatctggaggagcggcggtaagcgcggtggtaagcgtggcggacatgttagcagtagtttcctccgcggtggtttctggtcctccggttgtggtatcaccaccaccccactccgaaatcatgtccttgatggagaagacggtgccttgcaccaatatgagaatgccaacaatcacataaaatatgtccttcacaagtacccatttcagtttgccataattatactccggcggatagtacagacagatctcgatgagtgcgggaaatacgaggttcaacagcgatatggttagcgctccaaccagcgacaatagaggacccagattgggagcaataatcgcagttatgcaaattagaaccacagtacatgcacgaaggatggactcctttaaagccgcgttcgggagatctccatttttgttccaaaagtgattcattataatgtcaatgatcacgaatcccgccaatggataggtcaggaaaatggccgcggcaataaaccctttggcaacttgcgaaagtctggcggttacacaatattgaggaatcatatggatagatgtaggtcgagtttaacttacacttcgtctgtgggaatatttagtgaaatactaccagcagtttcgtcgccataacgccagtatcccattagaccaaaagttacatacgaaataataaccaacaaaattgcccgatctagtataccaaaccagccgaggtagtgccgtggcttggccattgtagcttctacggccagcatctaggaaagcgttaacatttgcagcacttataagaattgtcatatttttggaataatttttaaagaactcaccacgcccaccgatgtgatggagaagagggcaataccaaaaaataaaggtatcttatcgatgcgaccaaataaaatgttacgttccgttatcggaggcaggtcgacgaacagatagtacatcatcagggagaatccggtgtagatgagtatggaggccaaaatgttgaaaggtactaggtactttagtttgcgtatctggaacgggggtataaggcagagtgcgatcacggctatatagattctcaagtctgccactacccagtaaaagtcgacgagttgcttcaaggtggcagccacaaatacattgtacacgacacagactccaaattgggagaatgccaagactccatcgactatatatcttccggcctttgagatatacttaaagaacctgggtccctgatcaaatgagtataccatcgcgactggataagttgcatatccaatttgcattcgacgcgagcactcaatcatgcaaataatcttcaagcataaaaacagcaaaaaatataacttgtttcaaaagtaactaagtaagactcaccagcatctgcattccatggataagcataaagcataccgaaactagaaggattatgccagtgacgatgccagcataattaaaggataatggaatggccataactcccgttccaacgacacatttaagaagcgaaaaaaacgccccaatatcactgtaaaaaaaaaatatgaaatatatgcaccaaatgattgtcaattggtaaactcacgatatcgggtgagccacatttcgattttcataaggatcaaaacctctgtggaagaaaattgttttttcaattgtcaagagtcattattaatcttaccctttgtcgcccatgttcaaatgttacgtctgtatagttaaaaaaacaaaaatgaatagactatatctatcgtaaggacatgacgttctttacaaagtgaacggaatttaggaaaataaacctgattagttggtaaatattcaacaacgcgtttataatacctactttaaatactagaaagagatttgacaaattttaatccatttatgccaatttttatttaattatacatttttttttattattttatacatttttttgaactacttaaaaaatagatagataactatcctcttacaactggatagcgagcgtagagtgtttgtagggttaccactgtaccagcaactccgccagctaagcccatacatataaatagcatggatcggatgagaaagatcttgccaggaccgtagtcctcctcatagcgaaggcagatgtccacaattcccggcagaatcagacccaattgggccaaacaaaaggatcccaccaaggatagcaagaggccaaaatccggatactgaattgccaccagcacggatgcgattaccagcgcaattctcagcagacactccaccgttcgtaaatatctgtcctccaattccggttccaaataatttcgccagataatgtctacagttacgtatccttgcagggcataactaaagaatattgcgagagcaaatatgccagtcgctaattttggtaagcttagaaaaagattcaaaaatgaatcaaaatgattcaaaaatcataaattataaatacccacatatcgttttgaggcatattctgcagaatcgaattggacgtattttcgccatatcgccaatatccaaaaaagccgaagacagcatagaagctaattactacgatcataccttgatttagaactccacaggttcccatcaagctttccggttttcgcatacttcgaccgagggaaaggatctgcagagagtgagattttcaaggagatcttagaagtaacaaacccaccactccaacagattcaatcgaaaaaagtacagtgccaaaaaatatgggaaagtttcttagcggctgaatggcatgaagatgttcaaactcaggaagatcacgaaataggtagtttaaaatcacgcaatagcctacggtgttaataaaataactttagtagataactagcatataaaggggattaaccaacctgttagtagaagaatgttggatattattgaaaacggcacaaggcttttaagattccgaatcaaaaatgttaggatcaatggagaggctatcaatgccatatagagcctctcatcccagacccacaaatacatatcccccagatgctttaaacttttggctatgaaaaccacatagacacaatccacaccaaaatgataggcacatagcaggatatccactaaataccttaaggataaagtttagaaaacatatagtatataatagctgatttacaccgacccaaagggcttgctcagaaaatgaaatattgatggtcctttcctgatagacagttccactgcctttcgataactgatcattggcatattatgttggacacccaaattattaatatgatgaagctgcaaagaaagctttttagctaaggagttatgaaaatatgtgagttagtaacttataccagaatatgcatggcatatagcacaaagaagcccagggcaaaagtgcatattagaccaactaaccaacctgaatttagaaaagcatatggcatggccaagcaaccagtaccaaaaccacattttaaaacattgatgaaggcttccaagtcgctatgagtagcaagtaaagtcttaggatataaggtgcctcaccagcaaagatatttacttacgacatgccattatccttttttgaggacaagcgagcctcattggccagcggtgatctataaaagataacatataacgaacaacaatcactcattaccaagttgacttacccgaaactgttttggacaccgccgaggagtctttgatggaagggtagcttctggtctaagcgtctcctccttgtatttcgcattttgaggaaagggaaatcacttttaaagggaattaatattattattaatcagacggaaagtcagcgccgactttggtctgcaattatgcaaatgtggatcacagcagatccacctcgggttacgatcttttggatatggagtaggtgtgtcttggcaggatgccagcttccacgaagggtggaggtattagcatagccccaagctgatatgctttccaggaaagatccagttcctccgatgtgtgggcgtttttgggcctggccaaggaattcgctacctaaattatgcactcgcctcgggatcttgggcaaactaattagtgtggccagtacggggcatttttcaatatgccccccccccccccacctcaattggcacctggccataaattcaaccggccttgggacggacaatctacagtttctagttaagtctgcccaccttgcaatccccctttcgcattgtgtggggccaattgcccgctgtgagccaccacctcctccaatctttgcggtgccgaatcgaaaatgcaaatgtcccgtccgccaggagaaaactaagtattcccgaggggccagaagtcaactaagcggatttatttattttactttccattcgctattttcccatatcataagtagtctttgttagtctttctttcatttaagtttgactagtgttcactcatatagtgtactcatatagtttcttttaaagaaagttatctcatttatttcggtaaaaacagtagtgtatatgattagtattttttttttacattttagtactaataataaagcagtatataattaaaaaacaaagtcagtgggttatatcaaagtcgagcaacaattcaattcctaattcgaattgcaaggaaacgcaaccattcgttttcattatgcctattgatgccctagatgtctagataatgtcttcaagtagtccgtcttttacttttcatttcgctggtgggtaatggtggtcacgcccacgtcc

SEQ ID NO: 24530 - DNA, 1657 bp, DROSOPHILA
atgcgaaatacaaggaggagacgcttagaccagaagctacccttccatcaaagactcctcggcggtgtccaaaacagtttcggatcaccgctggccaatgaggctcgcttgtcctcaaaaaaggataatggcatgtcttatgccctgcaaggatacgtaactgtagacattatctggcgaaattatttggaaccggaattggaggacagatatttacgaacggtggagtgtctgctgagaattgcgctggtaatcgcatccgtgctggtggcaattcagtatccggattttggcctcttgctatccttggtgggatccttttgtttggcccaattgggtctgattctgccgggaattgtggacatctgccttcgctatgaggaggactacggtcctggcaagatctttctcatccgatccatgctatttatatgtatgggcttagctggcggagttgctggtacagtggtaaccctacaaacactctacgctcgctatccagttggacccaggttctttaagtatatctcaaaggccggaagatatatagtcgatggagtcttggcattctcccaatttggagtctgtgtcgtgtacaatgtatttgtggctgccaccttgaagcaactcgtcgacttttactgggtagtggcagacttgagaatctatatagccgtgatcgcactctgccttatacccccgttccagatacgcaaactaaagtacctagtacctttcaacattttggcctccatactcatctacaccggattctccctgatgatgtactatctgttcgtcgacctgcctccgataacggaacgtaacattttatttggtcgcatcgataagatacctttattttttggtattgccctcttctccatcacatcggtgggcgtgatgctggccgtagaagctacaatggccaagccacggcactacctcggctggtttggtatactagatcgggcaattttactttcgcaagttgccaaagggtttattgccgcggccattttcctgacctatccattggcgggattcgtgatcattgacattataatgaatcacttttggaacaaaaatggagatctcccgaacgcggctttaaaggagtccatccttcgtgcatgtactgtggttctaatttgcataactgcgattattgctcccaatctgggtcctctattgtcgctggttggagcgctaaccatatcgctgttgaacctcgtatttcccgcactcatcgagatctgtctgtactatccgccggagtataattatggcaaactgaaatgggtacttgtgaaggacatattttatgtgattgttggcattctcatattggtgcaaggcaccgtcttctccatcaaggacatgatttcggagtggggtggtggtgataccacaaccggaggaccagaaaccaccgcggaggaaactactgctaacatgtccgccacgcttaccaccgcgcttaccgccgctcctccagatgcactccgtttcagatttctctaagaagacggacttcttcaaccatgtgcgatcgtcaatcagaaatttgtagtaagctcgatgcttcgagcgtgttatgttatacaattataaataatttattttaatcaagaacaacaaatccaaaaaaaaaaaa

SEQ ID NO: 24531 - protein, 507 aa, DROSOPHILA
MRNTRRRRLDQKLPFHQRLLGGVQNSFGSPLANEARLSSKKDNGMSYALQGYVTVDIIWRNYLEPELEDRYLRTVECLLRIALVIASVLVAIQYPDFGLLLSLVGSFCLAQLGLILPGIVDICLRYEEDYGPGKIFLIRSMLFICMGLAGGVAGTVVTLQTLYARYPVGPRFFKYISKAGRYIVDGVLAFSQFGVCVVYNVFVAATLKQLVDFYWVVADLRIYIAVIALCLIPPFQIRKLKYLVPFNILASILIYTGFSLMMYYLFVDLPPITERNILFGRIDKIPLFFGIALFSITSVGVMLAVEATMAKPRHYLGWFGILDRAILLSQVAKGFIAAAIFLTYPLAGFVIIDIIMNHFWNKNGDLPNAALKESILRACTVVLICITAIIAPNLGPLLSLVGALTISLLNLVFPALIEICLYYPPEYNYGKLKWVLVKDIFYVIVGILILVQGTVFSIKDMISEWGGGDTTTGGPETTAEETTANMSATLTTALTAAPPDALRFRFL

SEQ ID NO: 24532 - DNA, 4582 bp, DROSOPHILA
actatatgaatccaggaaatcaaatagaatatttaaataatatgagaaaacacaaaccttcttccatttttacgttgttggcgaaaaaagtaaaattttaaataatgcatatagatacaaacgataaaatgttaaatcgaggaaaacatattaaaatgcaaccgttttacgtgaacaaatttgcaatttgaatatattttcgagggactagagctcttgttatataattaattgttcctctataaatctaaatctaaatctacattgacaatacgccacgtttcctaaagtttttgggtacaaggagaattgtatctgtgagttttaatcgttctattatagcttgaaaacgaaatttgcaccgaaagctgataaaattccgactctgctatctgctggataagtaaaatgctggtagccacttggagtactaccagtacagcaatgaaagtaaagtgaaatgggcatttcattttctactttctatttgcaggcacactggaaacagtttactgcgagattcccacttcattagttggcaatgcacgtggacgacagcaaaaagcactcgtagtacttgtttcgcccttgatttgcatctaagaatcgctcagatacatctggtgagctgaaactcgtttctgagccgcagtgtcgtgcaggtatccgtactcgtttgaatatttgtaagtaatcattgcagcgagacttccaaaaagtaagctcagctaagttctgcggtgttgggcatccaattagttgaccaagttttctggtggcatgcacatgaaacttgtttaatcgatagggtaaatatgcaaatttcgattgaatttgacgataatgcgtcgagatgaaaagaaaacgaattgtgcaggattttggttacgagataagccgaatcagctaataaggcacgtgcttaattgatatatattgtatgtttaagtaacctaaatatgcacgactttaatatcacttttatttcgctttcgtaataaaacgaggttcactctaaagagcacaagcgtggaggtgtatgtgtgttcttacagccccgatcatttgtatttccatttgagtgcgagcgaagacgagggtttacaacttgatgagaatttgatcaagataacattaaaacacaatctgctgcagtcggacggggcacttctgattgaatcgtcgacggaagaggttcggatctcgaaagccaaaaataatcagccttttactggccaattgagatacggaaacttctaccgaccgagtgtagtatggctgaatcagtggatggagcagagactgttgaccagattcgcgatggcctcatggacgactggaagatcctggagaacgtattccaccttctccggaaggaggataccttctgcgtggatccccagaaatgggacaagcagaagatagtcccctttttgcagccagacaaacttaaggtgagtggagcaagtgatagacgattcggcgtctgccgatgtggagataaccagagataacagagaactgattaatggaagagttcattcgaaaattgaccacccgaccgcaaattgtagcaattgtactatggcttgcccgacgaaatgtgagtcaattgatagtagcacttcctgattgagcacactcatgctagtatctgatagttttaattataattgaattgtttgttatttcatagattatggtcggttttttctgggtaaagatattattagttcgaaacagaaaacgttttagaaatatgttgaatctttaatatactttcttattgcaaaagtcgctgttctataacaatcttgagattacatgatttcgcaccatcacttccaggaactgattaacctgaaggttcgagagacggaaaactgctcgctcgcggagatcgaggagctgtgccagcaggtgatccattactctgtgaaaacctcgcacggccgcttccacaatcagctctttggccagctggacccgtttggactggcaggagccctggtcaccgaggccatgaacggcagcacgtaagtctgcgccttattccacacatgtgtcttgtctatatgagtgaccgctgattgcatctcgtgttccaatctacaagtggtgtcggggttcaacgtacagataattgcgctatgtaatggagattgcaaagtactacatgtatgtttcataacccccccccccccctttcgattaatttaaatggggattaagcagagttcatacacaatcattgcaagttattaatcatttagatgagatttcctagataggactaccaaaatcagacttttaaccgaggtatccaacaagacacaataaacttttgtttcagatacacctacgaagttgcgcccgtgtttagcttgatcgaaactgaggtgatcgcgaccatctgcaagttagcgggatacaaggaaggcgatggcatctttgcgcccggtggctccacctccaacatgtacggcatggttctggcccgctataagatcgcgcccgaggtgaagacgtctggaatgtttggaatgcgaccgctggtgctctttacctccgacgagtcgcactacagcttcgtgaaggcggccaactggctgggattgggcagctacaactgtgtgtcggtgaggaccaatgagcggggtcagatgctgttggacgacctggaggcgaagatcgcagaggcaaaggcacgtggcggtgaaccgttctttgtcaactgtactgcaggcaccactgtgttgggtgcctttgatgatatcaatggtgcggcggatgtgacggaacgacatggtctgtggctccatgtggacgcctgtctgggaggcgctgcactactctccgccaagaaccgatcgctcattgccggcctcgagcgggcgaattcgttttcctggaatccgcacaaaaccatcggcgctccattgcagtgttcactctttttgaccagggaatctggccgtctgctggaaagatgcaacagcaccgaggcgcactatttgttccagcaggacaagttctatgatgtatcctacgatacgggaaacaagagtgtccagtgcggccgcaagatcgacgctttcaagttctggctaatgcttaaggctcgcggatatggaaagtatggactcatggtggaccacgccatccacatcgccaggttgctggaaggcaagctgcgccagcgtggagatcgctttagactggtgatcccggagcacgagtactccaatgtctgcttttggttcattccgaaagcaatgagggtgtccagcgaggaggagacgcctgaatggtggagtcgactttacactgtaagtgaataacaatggctttgatagaccatttaagctcacatttttatatgctcctttaaaggtggccccgaaaattaaggagcaaatggcccacagcggcactttgatgattggttactcgcctcttaaagctaaaaatctgggcaacttctttcgcatggtcttcacttgttttcccatcctgaaaagcaaagagttggacttcattttggacgaaattgagagattgggcgagaaaattgtgctttgaattattttctatgtgaattaagctaattaatggaaatcgttcaattgtacatttcattgtagttattactttgtgataaaaaatacgcctttattatgtaaactcggcttaatctctattttgaatatttaaataaaaatctttcaagaaatgaatattaagttttttaaattcattttctaccgctatcaacaaataatattagcctggtcacacgaacatcccccagcagtaactatcgataaaagtgttcacgggtattgttgttataccccagcgcggtcatacctttacgtgagatcaaaacaataagtttttgttgagaaattatttgtaaaaccacgcacataaaaagacgctacgatgggtcgcgccgaggtaggtacgcccaagtacctcgccaacaagatgaaatcgaagggtctgcagaagctgcgctggtactgccagatgtgcgagaagcagtgccgcgatgaaaacggcttcaagtgccacacgatgagcgagtcccaccagcgccagttgctcctctttgcggacaatcctggcaaattcctgcacagcttcagcaaagagttctccgacggctacatggagttgctgcgccggcggttcggcacgaagcgaaccagcgccaacaagatctaccaggagtacattgcccacaaggagcacatccacatgaacgccacccgatggctcaccctgtccgactacgtgaagtggctgggccggactgggcaagtgatagcggatgagacggagaagggctggttcgtcacctacattgatcgcagtccagaggccatggaacgacaggcgaaggctgatcgcaaggagaagatggagaaggacgacgaggagcggatggccgacttcattgagcagcagattaaaaatgccaaggccaaggacggcgaggaggacgaaggccaggagaagttcaccgagctaaagcgcgaagagaacgaaccactcaagcttgatattcgccttgaga

SEQ ID NO: 24533 - DNA, 1619 bp, DROSOPHILA
aaacgaggttcactctaaagagcacaagcgtggaggtgtatgtgtgttcttacagccccgatcatttgtatttccatttgagtgcgagcgaagacgagggtttacaacttgatgagaatttgatcaagataacattaaaacacaatctgctgcagtcggacggggcacttctgattgaatcgtcgacggaagaggttcggatctcgaaagccaaaaataatcagccttttactggccaattgagatacggaaacttctaccgaccgagtgtagtatggctgaatcagtggatggagcagagactgttgaccagattcgcgatggcctcatggacgactggaagatcctggagaacgtattccaccttctccggaaggaggataccttctgcgtggatccccagaaatgggacaagcagaagatagtcccctttttgcagccagacaaacttaagatacacctacgaagttgcgcccgtgtttagcttgatcgaaactgaggtgatcgcgaccatctgcaagttagcgggatacaaggaaggcgatggcatctttgcgcccggtggctccacctccaacatgtacggcatggttctggcccgctataagatcgcgcccgaggtgaagacgtctggaatgtttggaatgcgaccgctggtgctctttacctccgacgagtcgcactacagcttcgtgaaggcggccaactggctgggattgggcagctacaactgtgtgtcggtgaggaccaatgagcggggtcagatgctgttggacgacctggaggcgaagatcgcagaggcaaaggcacgtggcggtgaaccgttctttgtcaactgtactgcaggcaccactgtgttgggtgcctttgatgatatcaatggtgcggcggatgtgacggaacgacatggtctgtggctccatgtggacgcctgtctgggaggcgctgcactactctccgccaagaaccgatcgctcattgccggcctcgagcgggcgaattcgttttcctggaatccgcacaaaaccatcggcgctccattgcagtgttcactctttttgaccagggaatctggccgtctgctggaaagatgcaacagcaccgaggcgcactatttgttccagcaggacaagttctatgatgtatcctacgatacgggaaacaagagtgtccagtgcggccgcaagatcgacgctttcaagttctggctaatgcttaaggctcgcggatatggaaagtatggactcatggtggaccacgccatccacatcgccaggttgctggaaggcaagctgcgccagcgtggagatcgctttagactggtgatcccggagcacgagtactccaatgtctgcttttggttcattccgaaagcaatgagggtgtccagcgaggaggagacgcctgaatggtggagtcgactttacactgtggccccgaaaattaaggagcaaatggcccacagcggcactttgatgattggttactcgcctcttaaagctaaaaatctgggcaacttctttcgcatggtcttcacttgttttcccatcctgaaaagcaaagagttggacttcattttggacgaaattgagagattgggcgagaaaattgtgctttga

SEQ ID NO: 24534 - protein, 69 aa, DROSOPHILA
MAESVDGAETVDQIRDGLMDDWKILENVFHLLRKEDTFCVDPQKWDKQKIVPFLQPDKLKIHLRSCARV

SEQ ID NO: 24535 - DNA, 2815 bp, DROSOPHILA
accagataccaggccaaactgcatctacaccatgactataagaccaatgcgtatccctcgtaatccaaggttcggagcaggactttcgcgtgggcgtgcgtattacattcgacaaatagagccgtgagaattccagacatcagcaggcgggcggccggggacaaaatcgagcgattgcgtgaggagacagacggccactgtataaacaatcccactgacgatagataacattttgaccttctcgggcttggctttgttggaaatatatatagaacgtttgtgaaaatacaatatacccgcataatgttcgctttattgattccattttaatcgccctctccggttttctcgaccgtgaagcggcgcgcaacaaatttcagcttaaaattacaactagaacaacgaatttgcacaacaatgatgaggtggacaggaggagagtatataataaatacaagccatttcttaagtataaatgccattagtcaaagtggtttgcagggtgggggctccaggcatcggggtcacgaaaagtaatctatggtctactttcattggaaacattgggtcaagttcgctggctaagcaattgtttactaacaatattctgctgctgacaaagtatttttcacaatataagcaaagtttgtcctagaattcaaaaatagtctgcttctacataaaactaaaatcttgatattgctcttatatatgcgattattgaatggagagtattatttctattttatttaagaaaactattagttaaaatatgaagtttgatattctgtatcttcggaaagtttttaagtttctcttataagctaaattctttacaatatgcataaagagtacctggttttcctatagcttcctgccgtttccaatgataagttttctataatttacttttcctgtcgtcgatcagttcacaaacaatttctacccccaccccattgaggttaatatcattctacattcgtccgcaaaatgcttcgccttaattcaagttaactgatactccctgcttctgctgctccttgagttcctggacgacaaagttgcggaattcctcgtaggccacatcgatgtccacgttattgatgatcttgtggaagttgccgggcgtcaaaccataatcgagctccacctgagcggcattgaggcgcttgctcagcgactcctccgtttcggagccacgtttgcgaagtcgtcgctccagctccttgatgctcggtggattgttgaatatcagtatgggattgagatccgtacgcttgatctgctccactcccttctgttcgatgtccagtatgcagacccgtccctgtgcctggatctctctaaccgccgccttgctcgttccataaagattgcccgtaaactcggccgtctcgatgaactcgtcgccagcgatggctgcctccatttccggacgttccacaaaatagtagtgcacgccatgctcctcgccctcacgcggcttccgcgtggtgtgcgatatgctgaagccaaaggtgctggggaattcggcgaatagccttttcagcagcgtactctttccggatcccgagggaccgcataggacaagggggcgtggcccgggggcggtcatcttcttgctcgttaaggatgccgctgcactgctactgctgctgctgctgctgagcgcccgatttacaatgaacagaaagcttatcatcgcgtggccttttattcgcacagaacagcaccaacaacacaaatgggggccaaaaaagctggtttagttctttttgctatttggctttggctaaattaagagaagtgggcgtgcttgtgcatgtgtgtgtgcgccagcggtgggcgaaagtcgatacatatcgataggccaagcagtgcgataaatgttcaaaatttgtattgaaaaaatggttcttttgaatttgaacaaataagttgaatatctaattgaatatttaaaattaagttatttaaaagctgtataatctatacaaaatattaattggccgaaatgttaataatgtattatttgcatttacataacaaataagtttaaaattgctggaactgacttaaaaatcaatttattaatttggcgattcaagcctcccaaataaacaatcaaacaccagtcgattttggtttaaaaactgttatattcttatactgttttacatttagcatagaatttcaaacacacatacacactgaaactgatgccgactgaattacaatgcatttgtagttatttttttatttttatttgtatttagcttacaataattgtgaatttctcatctgcttgtttccgtttaattgttttctcattattctcgttttcttacgtttttgtaatttcatatttttttgatcacattttgatttcgcatgcccaaagtgaatttggtttgtgttccgaatgattcgcctgaatgtaaacctactttactgccgtccgataaatcaaaaatatatatatgtatatatatatatattattttacctcgtatgtttagggatttatgcaagcctctgcttctgctagattcctactaatctgtgtatatgctaatattcagtcaatattatattcatatcttcaatggaggatcgaaaacctgaagttctgctctgttctgttcggttctaatgggaagagtatatagatttcggtttaccgaagatgaatacctcatctgtcaaatatatgtacaaattatcatatctttttagctttaagttttcgatgtttctctgttatttttgcatttaaagtggaacaaaatgaaagaaacagtcctaggcgacgatc

SEQ ID NO: 24536 - DNA, 815 bp, DROSOPHILA
cacgcccacttctcttaatttagccaaagccaaatagcaaaaagaactaaaccagcttttttggcccccatttgtgttgttggtgctgttctgtgcgaataaaaggccacgcgatgataagctttctgttcattgtaaatcgggcgctcagcagcagcagcagcagtagcagtgcagcggcatccttaacgagcaagaagatgaccgcccccgggccacgcccccttgtcctatgcggtccctcgggatccggaaagagtacgctgctgaaaaggctattcgccgaattccccagcacctttggcttcagcatatcgcacaccacgcggaagccgcgtgagggcgaggagcatggcgtgcactactattttgtggaacgtccggaaatggaggcagccatcgctggcgacgagttcatcgagacggccgagtttacgggcaatctttatggaacgagcaaggcggcggttagagagatccaggcacagggacgggtctgcatactggacatcgaacagaagggagtggagcagatcaagcgtacggatctcaatcccatactgatattcaacaatccaccgagcatcaaggagctggagcgacgacttcgcaaacgtggctccgaaacggaggagtcgctgagcaagcgcctcaatgccgctcaggtggagctcgattatggtttgacgcccggcaacttccacaagatcatcaataacgtggacatcgatgtggcctacgaggaattccgcaactttgtcgtccaggaactcaaggagcagcagaagcagggagtatcagttaacttgaattaa

SEQ ID NO: 24537 - protein, 233 aa, DROSOPHILA
MISFLFIVNRALSSSSSSSSAAASLTSKKMTAPGPRPLVLCGPSGSGKSTLLKRLFAEFPSTFGFSISHTTRKPREGEEHGVHYYFVERPEMEAAIAGDEFIETAEFTGNLYGTSKAAVREIQAQGRVCILDIEQKGVEQIKRTDLNPILIFNNPPSIKELERRLRKRGSETEESLSKRLNAAQVELDYGLTPGNFHKIINNVDIDVAYEEFRNFVVQELKEQQKQGVSVNLN

SEQ ID NO: 24538 - DNA, 7819 bp, DROSOPHILA
gtaccaccgtccatcgctccacccaaccaccgaaaatccttgtttttcgccgtaagcagaccatcatttggcattcctttgtagtttccctttgtatctatattataaggcgaacagttgttaccggattcaaagtagcatctgaagatcactccaggctcggagatgtttcgctgagcttccaaactggaattggcacgaggagctgccaccataatactgtgaatttatgaaaacgaagacatttattttttaaatttgttttctgccagataactaaatatatgtaattactcagaaatcttaaatatcgctaagttatgaataataaaagattcttaattaatcatcaaatgaattcgaaaggaatttaatttatcggaacaaatatcgaaatactattaattatattgataattcaagaggaagcacagaaatcttcttcaaattaattcgagtaaaatttttattaatgtaatcaacaattttgatcaacttcgttcaaaatacatatcatgaattaatcttgagatatatttattataatgaccagtttttgatttttaacttaccttttctcccggatgactaaagaaaatccaaaataggagctgcgtctatttccttcaagttccggaaagttaagtactgaattgggatacggcgaaatattataggcattgatttcggattgaagggccaacaacacaataacaagcaaacaaaacatgttaaataacattaagaaatgtaattcaataaacgcacatatagaaaaatataaatattaatttttttacgagactatatataaagtcctgcaaccgaactcgttgagctttcgaatttaaatgaaaccaagtggcatgaaatgactaccaacgtaataaaacagacgcatatgttgactaatttttcggacataccaaaatgtatctaaaaaatatgtaggaaaatttataaaaacttaaattaaatcaaatgacacattcaaaaataatctctgaaacttgttttttaacttttattatatttcattgttttaatactctaatataatacaggaatacttgttataccagctgttaagtccttaaatatcctagtttcgtttttacaatttatacattaataaagtctttcacgtcgccctgtaaagctacctttacaaatttattacacttatcgtttattaacaaggggaccgttaaaatcgagtgtctcgactataagatacccgttactcatctaagaatcttttaaataaaagtggatttatatatatatatatgtaaatggggtcaggttaactgctaccttatatatctccgtcatatctgttttccatccgtgcggatgaagagacggaactcggaaaataatcctgatcaaaaacatatatatatatattctgcggtccatttacttgttgcatactattctagtaacatattgcatactatttaggtaacgggtataaaaatatttaataaatatatacaacaaatggcaatatggctggtacagcacacatgggactctcgtgtaaattagaggtaacctaaaaactaaaaggcacttttctgctgccactacagatcaaaccaaaaggaacattgaatgtcctgtagttcgtgactttctcctgctgctttcgttcctttcttaaatgcacgagaacacatttagtggatagtcttcgcgttgtgaaaataggatttggtaactggttcatccattttgaatgtgatgtgtacggctagaaaatcgcagggcaaaatttagttgtttccgccgctgttcaggttctcggcctcaggctcgacgggattctgctgcaccagtcggtccagctcgtccttcttggtccggttgaagaagccaaactgatggaaaggtatttttaagttagacatgaaggcttgctagtatgattactcaaaaacgaaccttgtatagcaaatagcttatcgcagagagaagcagcaagccaccgattacggacacaataatgatccagatgggtagtcccgtctcctgatgtttggatataatattcggttcgattcttcgattgattgaaaatgaagtagaggtcggatcgcccttcttctgcagcttcaagtcggtcaggatgacaaagtactcccagggatccactaatatggcgttaacttcattcagatcgacactgtagcgcatattcaggttaatggatttttctggcctaaagtgcactcgcatctcggctcggacacatatggtcatttcgggatcccggcagttgaacacaatggtgcgatttacgggaagcttgcccttaaagtcatcgctcagaagatcgtgtgccttgacattcgagattcgagcatattgctcccgattggcggtcaaggccttgagatcccgtcgctttcgggacatggaagctgttgccaccatactggtatcgagaacctccatggtctggtgcacatggccactggtgtggatgtcgtagctctgtctgttttgggttatcacagtccgctccaagcctccactcagggtggtggtcacctcaacggggtccacgacgagcatggtattgttctggtcgtacagatcgatgctcaagagctgggaatcgtaggaggcctgcatcttcaagctagtcacgttgatgatcggtataatggcagtggagccagccaccttataggcaatgggtatgtagaatgacaccgtcaactgctcgattacactgggcccattgctcttgatctcgtagttgtttacgatttccgcggagttactgtagtgctccaaatcgatttgactgttcgtttggccactgaaaattagaagtggatttcagtcagatctacatacagtatttatcaatgatttattgcttctcacccgctggcatcgatttcggtgaactccttcagaccaatcacgttggtctgccggttgtccgtgggattctgctcgtatcccgtactgaatacttcggcatggataatcagcgactgtccgcttagttggctcacatcgaagctgatggtcacggagtcggtgtcaccttttgccagggggcggccgcggtttagatcgcataccatgaccgcatcgaccaccttgcagtttccaggcacctgagcgaaagccaggcgggaagtgctggtcacgttgaattggggcaggtaggcggtctcccctatgttcgtgatctcgtaattcaggcgcagtgtatcggcactgcccaaaatgtaagtggggctgtggagatgaacaatttaacactgtatatagttgtgatgtaaaattgtgtgctaataatgtaaataaaaacgtgtaaaatatttatatatatctttaaaattcttacaattagttcaaaatccatttgcgaacaagaggttctttttaatagacaaatattgacgtacctcacatccttgctcctcaactgcagatctgcagtgcaaacatccgtggcacagccagtgctgaagattatgttctgtgtggaaaccttcggttccgttggatcgacgatcgcacatgtttcgcaaaattctgtgaataattaatgcgttgcaggcttaacagatcaagcagacgaaatagatcaaacttaccctccgagtcgggaactttcttagtcaattcgtagtgcatctccagatcgatgggagtgaatatgtccttctcgctgtagcgcacctgtgtctcaaagtcgcggcactgctcgccgaaattcgcgtttaccttaaagcttatctcattggtctgagtctgagtgaacttaacccgcttcagctgtttatccatggcgatacggatggctagttcctgttcttgtaccagcttgtcggtggatgttgtactcagtctgtagcaggccgtgatctttaccttttcctgctctggtttgatctcccgggactctgattttacagtggcgtgcacctttacgactggataggcacggtacagatacaccgcctccgcatttggagctccaatggcaaagtcgttgaatccgttgccatctatgtcggatccacgggacagcccgtggccgaacatgtgcgatccgtacttggagggttgctgggaaggagcatccaggcgctgactcggctgatctcgtaatccattttcgctgcctaggtagataaacaccgttccatttccagcaaaaggagctccaactgccacatctgtagattggaaaattatatttgatttatagatcgaaagcatatcactttggcaactcaccattatacccatcgtgattaatatctccaagacgcgatagagcagtgccgaaacgcgccatagtctccactggcgaacgcaaaatctgccgttcaaagttgaactgcaatgttaagaaaatatcagtcatcaatttgcttcacggaagcccctcattccaaaggcgtgttcggaaatgcattactcacaaagcctttgttgatgaacacgtagatggcaccgttgtcgtgggaatcctccagagcgtgctgtggcgctgatacgataacatccgttttcccgtctccatttagatcttccgccagaacggagtacccaaagtattcgccaaactgctcccctcgaaacacgtgatacttatgtatgctcttgccccggacatcgaaaatgtacgcctcaccggactgtttgttggcttggggagcggtggccacatagaggagcttggtcggattagaactgtcaaagaagccagagctcacggcatagccgaaataagagtcttcttcctggccccaaagcccaggagtaggtatctcaggtgcatagtgttccggcgtataatcgttggagtccacatcacggtacgttcgtcggagcgccttgctggtgtcacgtcggctggcggttgggttgtccactggatccacttgccggtacagaatcactgaccccctccatgtattgatccctggggctccaattaggaacttggtattatcgtccgccacatgggcactcaagcccagttcgcccattatgtagaagaagcttgccttgttgccgttatcctcttccttcacctgttctgatttcaggcggagtggagagatgcgggtaacgtgctgcggagtgctggccaccgtattattcacccagtagcagactccatgcaggtggttgtcccgggaactgggagcgtagaaccgaggagcacacacgaggagcttgtccgtgtccttggtgccgccgtccatcgatccgcccagccattgaaagtccttgcgttccgaatcaaatgtgtactcactatagggcgcatccacattgccccgggaatccaggacatatggactgcacacaccgtttgtcagggagcatctgtagatcgctcccgtttcgttgatggtgcgttgcgattccaaggtggattgagctctaggggctcccacaatgatgctgcaataagggaaacgattttgattttagttatattctaaagtttagccataattttttgaaaatgctgtttattatttaaatattatattttatattcttctatttatttaatttctttcgaaatctatagcttttacaagttttccctgtaatttagaggtaatacttcaacttcctattatttatcttaaactggatatttcatattcaaaatgtaaggaaaactgttttgctctgtttgctccgtattagtcatacattgaattcaattgatattgtcggttattagtcgactatttcccagaacctgcatgtacatctatacatatacatatctactagagtaaattgacgaaggaaattcgataagatgtgaacgaacgaatcaacccgaagtcataatctttgcaacatagttcccatgcagcacatattttgtatgtcggcttatcagcgttgtggccgtcttagcagaatttcactgtgacatcggcaatcttatcgaaaatcgttaaatacgaagctggcaacgttggctgataacaaattggcattgacgaatctaaacgctatagacatatagtcgaactccgccctaaaaaactgacttattgagtcaacaaaggttcggacgtgcagcgttgcagatatttgcgtaacatttcgctcggacaaaacacaaatgaacttgatatctccataaaaagccgcatacttatgtgctttgtgtgcatacatatatgtatatatgtacatatatgcttgagtacacctccccggcatcgtagataattgatattaagagtatgacttcatcgtttgcacaaggcattaagtgtacggaatttcgttcttcgacacttttatttttttccaactgcttgagagttttcaaaaaagttcattcaattttacagctacagctattcgattggcacccgccggcgtgaatcatcatcgcacaacctgtttactccgcggccagggagtgggtaagatgaagatgcgggagctggtatattggagtcttacccattgggtcgcaggctcatcgtgaatccgaagtatgacgcacgcactttgggcacattggtggcgaactggggatccaatatctgccggttgggtagtggcgataggttgaatgcattgcagtggctggacaagcaccacagccccaacactagcagcgcccagaaatcacgatcttgccccaccatttcggcagttttgcagaccgcgattattcaacagattaatgctacgccacgcgttcgtcgcctgaactatctgcactacgatgtattatcactttcgctttaagcgatgccgaaatccgccgccggatatagattgctgccgttccgatcgaaggtctgttagctactaaccaagcgcactactccccagagacctcaccgctcggcggtgatagcgagagagaaaacgggttacggttatgctcattcctcgacatttgctatctcaaaaggtgcgagagagcgccgctctgttttgaccaggcttactcgcggtaccgttggggctctcgtgggagtggcgtgaataacatcttcaaaacgattgccataccatatttgcgctttttataaaattgtttgttttcttaagcagcaaaagctgactaataggacaagatggagcggaaaatgtaagataagtcttaactgtaaaagaatttatttttccagctctaacactgcaacctttgcactttttaaatttaactgatttcattttttatcgaaacttcgaataataattcaaaccaaggaaactaacttactgcatttttttatgaaaacgccagtaagattgcacatataatgtgaagcaaacaatcgtttttaatcagctgcattgactgactcatttcaaacccacttcacaggatatgaggttcaatttgagattagacagttcaaaaaatgtattgatttctttgttaaaacagtcagtaaaagtaaactatggatgacacctttgttattggcaaaatacgaatacataatacatttcataattctctagccttagtttcacctcgattgactttttgatttacttatctatacaagttttcccccgttcgagtcggtggcttagtcagtcggatgagtcaccatgcatgcacttatttcccggcctgatttcaggcgtaactttatccgcatctcggcgcgagtcaaatggttggagcttaattgcatgcgagaaaaaaaaaacgacagtctcaaaaaaagagtcaacatatttaaataggcgaataacaagcacatgccactttggctacctgatccagaaattgtttatgctgaatataaagtggtgtgaggcctaaaaa

SEQ ID NO: 24539 - DNA, 4274 bp, DROSOPHILA
gaacggcagcaatctatatccggcggcggatttcggcatcgcttaaagcgaaagtgataatacatcgtagtgcagatagttcaggcgacgaacgcgtggcgtagcattaatctgttgaataatcgcggtctgcaaaactgccgaaatggtggggcaagatcgtgatttctgggcgctgctagtgttggggctgtggtgcttgtccagccactgcaatgcattcaacctatcgccactacccaaccggcagatattggatccccagttcgccaccaatgtgcccaaagtgcgtgcgtcatacttcggattcacgatgagcctgcgacccaatggcatcattgtgggagcccctagagctcaatccaccttggaatcgcaacgcaccatcaacgaaacgggagcgatctacagatgctccctgacaaacggtgtgtgcagtccatatgtcctggattcccggggcaatgtggatgcgccctatagtgagtacacatttgattcggaacgcaaggactttcaatggctgggcggatcgatggacggcggcaccaaggacacggacaagctcctcgtgtgtgctcctcggttctacgctcccagttcccgggacaaccacctgcatggagtctgctactgggtgaataatacggtggccagcactccgcagcacgttacccgcatctctccactccgcctgaaatcagaacaggtgaaggaagaggataacggcaacaaggcaagcttcttctacataatgggcgaactgggcttgagtgcccatgtggcggacgataataccaagttcctaattggagccccagggatcaatacatggagggggtcagtgattctgtaccggcaagtggatccagtggacaacccaaccgccagccgacgtgacaccagcaaggcgctccgacgaacgtaccgtgatgtggactccaacgattatacgccggaacactatgcacctgagatacctactcctgggctttggggccaggaagaagactcttatttcggctatgccgtgagctctggcttctttgacagttctaatccgaccaagctcctctatgtggccaccgctccccaagccaacaaacagtccggtgaggcgtacattttcgatgtccggggcaagagcatacataagtatcacgtgtttcgaggggagcagtttggcgaatactttgggtactccgttctggcggaagatctaaatggagacgggaaaacggatgttatcgtatcagcgccacagcacgctctggaggattcccacgacaacggtgccatctacgtgttcatcaacaaaggctttttcaactttgaacggcagattttgcgttcgccagtggagactatggcgcgtttcggcactgctctatcgcgtcttggagatattaatcacgatgggtataatgatgtggcagttggagctccttttgctggaaatggaacggtgtttatctacctaggcagcgaaaatggattacgagatcagccgagtcagcgcctggatgctccttcccagcaaccctccaagtacggatcgcacatgttcggccacgggctgtcccgtggatccgacatagatggcaacggattcaacgactttgccattggagctccaaatgcggaggcggtgtatctgtaccgtgcctatccagtcgtaaaggtgcacgccactgtaaaatcagagtcccgggagatcaaaccagagcaggaaaaggtaaagatcacggcctgctacagactgagtacaacatccaccgacaagctggtacaagaacaggaactagccatccgtatcgccatggataaacagctgaagcgggttaagttcactcagactcagaccaatgagataagctttaaggtaaacgcgaatttcggcgagcagtgccgcgactttgagacacaggtgcgctacagcgagaaggacatattcactcccatcgatctggagatgcactacgaattgactaagaaagttcccgactcggaggaattttgcgaaacatgtgcgatcgtcgatccaacggaaccgaaggtttccacacagaacataatcttcagcactggctgtgccacggatgtttgcactgcagatctgcagttgaggagcaaggatgtgagccccacttacattttgggcagtgccgatacactgcgcctgaattacgagatcacgaacataggggagaccgcctacctgccccaattcaacgtgaccagcacttcccgcctggctttcgctcaggtgcctggaaactgcaaggtggtcgatgcggtcatggtatgcgatctaaaccgcggccgccccctggcaaaaggtgacaccgactccgtgaccatcagcttcgatgtgagccaactaagcggacagtcgctgattatccatgccgaagtattcagtacgggatacgagcagaatcccacggacaaccggcagaccaacgtgattggtctgaaggagttcaccgaaatcgatgccagcggtggccaaacgaacagtcaaatcgatttggagcactacagtaactccgcggaaatcgtaaacaactacgagatcaagagcaatgggcccagtgtaatcgagcagttgacggtgtcattctacatacccattgcctataaggtggctggctccactgccattataccgatcatcaacgtgactagcttgaagatgcaggcctcctacgattcccagctcttgagcatcgatctgtacgaccagaacaataccatgctcgtcgtggaccccgttgaggtgaccaccaccctgagtggaggcttggagcggactgtgataacccaaaacagacagagctacgacatccacaccagtggccatgtgcaccagaccatggaggttctcgataccagtatggtggcaacagcttccatgtcccgaaagcgacgggatctcaaggccttgaccgccaatcgggagcaatatgctcgaatctcgaatgtcaaggcacacgatcttctgagcgatgactttaagggcaagcttcccgtaaatcgcaccattgtgttcaactgccgggatcccgaaatgaccatatgtgtccgagccgagatgcgagtgcactttaggccagaaaaatccattaacctgaatatgcgctacagtgtcgatctgaatgaagttaacgccatattagtggatccctgggagtactttgtcatcctgaccgacttgaagctgcagaagaagggcgatccgacctctacttcattttcaatcaatcgaagaatcgaaccgaatattatatccaaacatcaggagacgggactacccatctggatcattattgtgtccgtaatcggtggcttgctgcttctctctgcgataagctatttgctatacaagtttggcttcttcaaccggaccaagaaggacgagctggaccgactggtgcagcagaatcccgtcgagcctgaggccgagaacctgaacagcggcggaaacaactaaattttgccctgcgattttctagccgtacacatcacattcaaaatggatgaaccagttaccaaatcctattttcacaacgcgaagactatccactaaatgtgttctcgtgcatttaagaaaggaacgaaagcagcaggagaaagtcacgaactacaggacattcaatgttccttttggtttgatctgtagtggcagcagaaaagtgccttttagtttttaggttacctctaatttacacgagagtcccatgtgtgctgtaccagccatattgccatttgttgtatatatttattaaatatttttatacccgttacctaaatagtatgcaatatgttactagaatagtatgcaacaagtaaatggaccgcagaatatatatatatatgtttttgatcaggattattttccgagttccgtctcttcatccgcacggatggaaaacagatatgacggagatatataaggtagcagttaacctgaccccatttacatatatatatatataaatccacttttatttaaaagattcttagatgagtaacgggtatcttatagtcgagacactcgattttaacggtccccttgttaataaacgataagtgtaataaatttgtaaaggtagctttacagggcgacgtgaaagactttattaatgtataaattgtaaaaacgaaactaggatatttaaggacttaacagctggtataacaagtattcctgtattatattagagtattaaaacaatgaaatataataaaagttaaaaaacaagtttcagaga

SEQ ID NO: 24540 - protein, 1115 aa, DROSOPHILA
MVGQDRDFWALLVLGLWCLSSHCNAFNLSPLPNRQILDPQFATNVPKVRASYFGFTMSLRPNGIIVGAPRAQSTLESQRTINETGAIYRCSLTNGVCSPYVLDSRGNVDAPYSEYTFDSERKDFQWLGGSMDGGTKDTDKLLVCAPRFYAPSSRDNHLHGVCYWVNNTVASTPQHVTRISPLRLKSEQVKEEDNGNKASFFYIMGELGLSAHVADDNTKFLIGAPGINTWRGSVILYRQVDPVDNPTASRRDTSKALRRTYRDVDSNDYTPEHYAPEIPTPGLWGQEEDSYFGYAVSSGFFDSSNPTKLLYVATAPQANKQSGEAYIFDVRGKSIHKYHVFRGEQFGEYFGYSVLAEDLNGDGKTDVIVSAPQHALEDSHDNGAIYVFINKGFFNFERQILRSPVETMARFGTALSRLGDINHDGYNDVAVGAPFAGNGTVFIYLGSENGLRDQPSQRLDAPSQQPSKYGSHMFGHGLSRGSDIDGNGFNDFAIGAPNAEAVYLYRAYPVVKVHATVKSESREIKPEQEKVKITACYRLSTTSTDKLVQEQELAIRIAMDKQLKRVKFTQTQTNEISFKVNANFGEQCRDFETQVRYSEKDIFTPIDLEMHYELTKKVPDSEEFCETCAIVDPTEPKVSTQNIIFSTGCATDVCTADLQLRSKDVSPTYILGSADTLRLNYEITNIGETAYLPQFNVTSTSRLAFAQVPGNCKVVDAVMVCDLNRGRPLAKGDTDSVTISFDVSQLSGQSLIIHAEVFSTGYEQNPTDNRQTNVIGLKEFTEIDASGGQTNSQIDLEHYSNSAEIVNNYEIKSNGPSVIEQLTVSFYIPIAYKVAGSTAIIPIINVTSLKMQASYDSQLLSIDLYDQNNTMLVVDPVEVTTTLSGGLERTVITQNRQSYDIHTSGHVHQTMEVLDTSMVATASMSRKRRDLKALTANREQYARISNVKAHDLLSDDFKGKLPVNRTIVFNCRDPEMTICVRAEMRVHFRPEKSINLNMRYSVDLNEVNAILVDPWEYFVILTDLKLQKKGDPTSTSFSINRRIEPNIISKHQETGLPIWIIIVSVIGGLLLLSAISYLLYKFGFFNRTKKDELDRLVQQNPVEPEAENLNSGGNN

SEQ ID NO: 24541 - DNA, 8588 bp, DROSOPHILA
aaattcattgctttttaatttataatttcagcaaaaacaagagatacgatttgtttgttgttattgccgtgggtttgttatgattatcggactgcagggctgccattcgtaagttatcgaaatacggtattcggtagattcatttatgttggtatatcttacataccaaattaataaacaaaactgatctaatctaatctttgtttattttaaaagatataaataaagttttaaagggtgcgaaaaaaacaaacggagacgttaattcgaattgaaattaaggaaattcctaatggatttgcaaatcctcttagcctaattcaatctggcattctgaccttgcaaaggacttaatcatgttaaaaagttacttccggcgctcggaattaaggatatttgaaaaaataaggtatgtttttaaagtagttaaatagttgcgcacataatttagcttggcatctgaaaatgtgccttaaagtgcgtagtttgaccatggaagcaccagtctgcaaaggtagttacaagaataccaacacctagcccttcaagagtatatgtacataaacaggtgtgcgtgaggcttaccaccattagaaccattgatgattggtaacttcttaatggattttcattcaacaatttcaagagttacaaactataagtttttaaaatcattagcatgagagctagaaaaaacgtccgatcaccatggcaacaggtgtctgtctgtatgtatcatcccgttccttcccatttccccactttcgcccaatgttagatactacaaacatccatagctcattataatgtgtttgcgatagtgtagggaagagcgtgtgaataccactgagaaaaatctacgtcggagagcagctttggcaatgaatcacatcgtttgttcgtttcggtttcggtgcaaataagccgttagtatgtttctacactccggtgacacttgttggattccgatttcgattcagtgcctctgaagctaaaaacgcaacatcacaatggacgaggagcagatgtggaagggcttcttcttcaagttgcaggagctcaaaatgaatccacccacggagcatgaacaccagtaagttggatgaataaaatacagactcacgcatacctgtagaaaacttgaaaactcaccgatagacaaacatttgttcgccagacgagccgaaatgtgtgtttctatttctctagacaaatatgaacattttggagaactggaactgtgtcatcagataaattaaagattatcaagtgaaattaacgtgtgtgcgtgaggaatggcaagtgatgtaagggagtgggggaagccacagatcgattttaccacccactcgcaactaaaacatgactcagttttagggtatttttcactgggctttcaaatacatctacataagcttgctcatagtacgagtatccctaatcgaaatgaaatccccattaagtgatgactagccagtgcagataatatttaatgacttttttcgaattatttactaattgcactttttccgcagactgcaagacggagatgatggatttttcgaaaagtttggatccctactgcggcagaagtcccaaatcgatgagggcgtcctcaaaagttcactggctcccttggaggaaaatggcagcggcggagaagaagattcggacgagagtcccgatggcactttgcaactcagccaggattcggagtgcaccagcatcgatacctttgccaccgagagtacactggcgtccagttcggacaaggatatcagcacttcagttctggactcggcgccagtgatgaatgtaagttttgtaattgagaaatcagtgctgtgaatcaggttgacaaagccattaaaaggtcacaacgaatcagacaatcaaactgcattccaactggtgcaactaatagagctccagcttatactaaacgtaacctatagtttaatcataagattactaaattatttatttaatttagtatcttacatactcccaaatgcgtacgttaagagatttttcatatttatacatgtgattcatacgagctcttgtgaattcgtaaaactcagtttaaggatgatttatggtttaatccgccctaatatatatatacatatatattcatgatagagtattgataatcgccgctttacgaactcgttttgaattgttgggttagtatgcactgtagcttttaggattcgagtgaaagtacatcaagataaagctccgtcattcagtttgggttttaccaggtcgactcccaaactagctatccaccatggtgggtattggtgaatatggatggcttttgagcctggtcacattcacgtcatgtgtaattcctaggcccgactaccgaggaagttgcgacataggtcagttttccagtttgcagcgcggcgtaacgatcgcctacgagttaattcaatgttttatcttgtgccaacattttgctgttcgcatgtttgccgtctgggcaggtgtagtttaattgaacagaaaccgaaaatgaagtcgtgtccatagaaacgaaacgcttgcacaataaacaaaagaacttgcctatatagtcggactgtataaacaaaccgaataatgtatactgacagcataaacaagcactgcagaacatgcaaacattgaagaaccctagagcggccaattgaagggaggcggggagaaagcttaatgtactttagaaaatacatttttcattaccaccttgagcttttcctttttgtatccgaaaatagaccattttctcttaagattgctttattattgctcacaaacacttggccatcatcgtgtacatacgagtatgcacaaatacaccaagcaatctgaatcgaattgagcgcatacactttttatctcatggtcaacgtcaagatatttcggatatcgcaaagatttcccacaccggacgctattgtacttagctacagactcttctccgaagcggttgtgtccagtcggtgttcctgagtccgtgggtgtccacgatctgtccaccagcgcatccgatcgtgctcgataatatgtgcgtctatatcgaattgtatatttgccagagagtatttgccaaaaatttcaatttcgcttgcacctagagaaaaacattgaaaaagtggagtgatcggttagtggctgggttcgatcatgagctacctatcgctaccacgtgttctgagcaagttcggctcccaaaaccacagttcgtctaaccaaagttcgaaaaccaatagcctaactagatccagtacgcgcaccggatgcgacgaaatcagactgccgcggaaggcatcctccacccagtcgctcaacaaaccattcgagcgacggatgagcatactgaatcggaatggaagcatttccagtcgacacttccgtggtgtccacaagcatttacttgattcccatgccaaggcggtctgccactcgatgaccgtaagtagagaacgaagtttggatgctatatctagatatggatatatctgtaatccataatgaactgatcttaagaatatccgagggaatcggttcatcagtgcctcggtaaacaaaagcgattgtataagttcattgatttggcataattgttgagtcactcgagttaagtgcacagagtatttcagtgcttaaatacatatatttatgtacttgttttttttttgccaaaatcataattgaaaattatgtaaagtgtagctagaagataccaaaaaaaaaatcagcgaaaatgtgaacattctaagaagtttattgattcgaatttggagctaagtcaatatttatgttagtggatagtttatgggaatgataaaacatttcactgtagcgagcatccagtagatacttatatagaatgtatctaagcaaacatgacctcagctgggtctgtttttccaatttccctgcgaagatttgtttatatttccgtattctggaatttgtcgatatttacttaggctttgacctttagagaagtgacttatttctatttttgctcaaagaaattaaaatacttcaccgattagatggtttataaatgtcgcctgcgttttgggattaaactaattgttgcctttgcttttgcaggtcacagatctctatgaagagatattatttgaaattttcaacaacattggctgtgaaaacaacgaagagtgcacaaacagtttggtcgaattcgtgcaggatgcattcaaaattccgaacgccactcatgaggaaatttatgaggcggcgcgactgaaagaaccgcccaatgttagactaaatgtcgagattataaaggccgagaacctcatgtccaaggactcaaacggcttgtccgatccgtttgttaccctgtacttggaatcgaatggctcccatcgatacaactcatcggtcaagcctgccacattgaatcccatatgggaggagcacttttcactgtgagtcttgattatttcgtataaaaactgatatatatttgttaatgtttattttcttgctaggccaattactgaaaatgctcgagacgaagttcttatcgttgaagtgtggtaagtgtgactttgtttgcatattgaactcatataacgcactcataaaacctacgttatctggctgataacgtttcttgaactctaaattgcacttatcgcggatcaataggtttatggtctgaaactaactaactcgaaggtatggcatcttaaaaactcatcattctttttgaaatatgtttgagtagttaaagtaaagtacgttgtgttagttttataacattagaatttcatgctagaatcccatttatctattttaacgcatgattcccatttaatattttaccttttttcagggactttgatgctgcggaaaccgtcaaggaaaaagtcaacaaaatcctggatgttaagggtgtgaaaggacttagcaagctgatgaaggaaattgctgtaacagcttcctcgggaaaacatgataatgaactgattgggagagctgcaattacattgaaggtaggaaaagatctaatattatcaaagatcttaacactaaaaaaaaaacacacatatccttcagtctattcccgtttccggcctcaccgtatggtataacctggaaaagggaagcaagggacgcagtcgaggatcacttctggttaatctggccttgagtgcggagaagaacaaaagtgtcgccgttcaggagcacaagaacctactgaaactgctcctgatgtacgagctggaaacctcgcaggtggccaactactggtggagcggcaagttcagtcccaatgccgaactcattcgatcccagcatgctgcccagagtgggctaactcctttcgactgtgcgctcagccagtggcacgcgtacagcaccatccatgagacgcacaaactcaatttcacactattcaattcaattctggacgtggtggtgccagtgattacttacatgcagaacgactccgaggatgtgaaaacattctgggatggcgtgaaacgactgcttccctcgtgcttcgcagtgctaaggaaactaagatccaaaaacaccagtgataaaaacataattagagctctgaacgaagttctggatattctaaagaagattaaggagctggaagtgccggagagtgtagacatattccccaaatcggtgtatggttggctacacacaaacgacactgatgaaacgtgcaatattgatactgccattgaggatgctatcaacacggggacaagggaatggctggagcacatagtggagggcagcaggcaatctaagaacaccgaaaccgatgacgaaaagctgcagtacgtcattaaactgatacaaatggtgcggtctgacctgcaacgtgcaatggaatacttcgataaaatcttttaccagtaagttttacaattgtgcatcgatgaatcaatcaatcatttattatttaccttgttcatttccagcaaaattcagcttaactattccgctgtactttatttattttatgactccaagcttgctgaaatctgtaaatcgattataatagaagtgtgcaataatattaagagattggatgtgccagacgatcaattcgaatatttacccaaccttgagaatgtaaatatgggcacgactttgtttgaagtctatttaatactcaaacgttacgttcaattaggtaaagtactgaagtcctcactcttagcaaatcactaattgatttttctgtttacaggagaatctctttgctccgagcccctggaactgtccaacttttacccgtggttcgagaggggagttacccactggctggatatttcaataattaaggcattgagtcgcatccagaaagcaattgatttggatcagctgaaagcggtcgatgaaacagtgaaatacagctcctcggcagtggacacactttccatattctaccaaatcaagatattttggcaacaacttgactggccagaggtcgagggttcctacatcttcgtagccaaaatcgtcaatgtgagattgaatacaaatatagttatgttatctttactaattattataattttacaggatctttgtcgctgctgcatattttatgcccaacagatgtcccgcagagttgagaatatttttattgctgatgataacaataaaaatttcagtaagttctattggaaaccattttttatcatatattgtttgtattgaatttatttattttatagttttgtcggaggagtggtgcatagcgataaacaacatggattacatccggcagagcttaccttcattcataaaggtagaggttttatttacctaaatcaaacaaatttattgaaaacaaataatttatttcaggaacttagcattgatgacattatcaagagattgggggagtatcgaactaacttagaggctgagagatgcgcaagcaccatcaaaactgtcattgaaaatgcattggacaccgaacgcaatcagattgttgagctcatagagattgtggccaggaaaatggcaccgccaattagacgatacttggccgaaggtgctgaggtgctcgccaaggactccaactccatggaccagttaatgatgtacctggaatcctcattggccacactctacgatactctcaatgagattaatttccagaggatactggatggcatttggtcagagttatccattataatgtatgatctaattcaatcaaatcttgacgtaagttctgacctatcaagtatgaaacaatataaaaagaaattgattatctttttagaaacgccgaccaccagctttcttccaaaatttgaacaatactcttcagacaatgatggactgctttaaaatgggcaaccttcaaacttcagacataaaaatattgtcttcaattcaaagtcgactaaggctttattccctggagacatcggatcttattcatcagtattacttggagcgtctagaaaaccaaaagagccaagagtcatctccatatggacaacttaccatcacggctcagttaactgataccggcttattggtaggacttcaatcatttgaaacataaaatccgcttaatgagttaaatatcttatagttaaatatcttaaatgctcgcaatctgctgccaatggattcaaatggttcggtggactcatttgttaaggccagtttcatgcccacaagtcgattcaacgacgtacccactgtgaagaccaacgtgcacaacaaaagttgttttccgctttacgatcaggagtttcgtatgtaagtagttactttttaatttatgcatccatatataaatataccttcattcggcagaaacttgagtgaccaccagcgaagtgaaaagaatagtcttattgtatttagcatcaaagataaagatttattcggcatgtcgagccagtatatagcagagagctatatatctttcgcagatctggaagcgacaccaccgggcgagcaaataatgatgaatctatccagaccagagtatacaggtacctaatcatacttttggcagattaaaactggaaacttatacatgttatgtgctttcagattccgaatcactgcgtgccttggaatacagactaggtgataagcaggccaaggatttccttaaaaagctgaagaaccgatccttctcctaaattgtgaaaagttatacgttgtaaagaaaagcaataaaactgtatttttatattttctacggcaatcgtactaaaatttacaaagttgcgttttgaaatgggccccatttatggactgaaacttatgaagaaaagatttgcattgtctgacagttttaattacatttattggaacaaaaaccaacgcggtaattagttacaaatacataacactcactttttacgattaaagagtaattttccagagtttctttgtaataaataatatataaatggtatttgtgttaaattatattattcgtaaagggcttgatacgtgcatatcagcatggtctaatggcaaaaactactatggcacaagtttttgccgatgtgccttattggcgacgacgtgtgttgcgttgctta

SEQ ID NO: 24542 - DNA, 2933 bp, DROSOPHILA
caacatcacaatggacgaggagcagatgtggaagggcttcttcttcaagttgcaggagctcaaaatgaatccacccacggagcatgaacaccaactgcaagacggagatgatggatttttcgaaaagtttggatccctactgcggcagaagtcccaaatcgatgagggcgtcctcaaaagttcactggctcccttggaggaaaatggcagcggcggagaagaagattcggacgagagtcccgatggcactttgcaactcagccaggattcggagtgcaccagcatcgatacctttgccaccgagagtacactggcgtccagttcggacaaggatatcagcacttcagttctggactcggcgccagtgatgaatgtcacagatctctatgaagagatattatttgaaattttcaacaacattggctgtgaaaacaacgaagagtgcacaaacagtttggtcgaattcgtgcaggatgcattcaaaattccgaacgccactcatgaggaaatttatgaggcggcgcgactgaaagaaccgcccaatgttagactaaatgtcgagattataaaggccgagaacctcatgtccaaggactcaaacggcttgtccgatccgtttgttaccctgtacttggaatcgaatggctcccatcgatacaactcatcggtcaagcctgccacattgaatcccatatgggaggagcacttttcactggactttgatgctgcggaaaccgtcaaggaaaaagtcaacaaaatcctggatgttaagggtgtgaaaggacttagcaagctgatgaaggaaattgctgtaacagcttcctcgggaaaacatgataatgaactgattgggagagctgcaattacattgaagtctattcccgtttccggcctcaccgtatggtataacctggaaaagggaagcaagggacgcagtcgaggatcacttctggttaatctggccttgagtgcggagaagaacaaaagtgtcgccgttcaggagcacaagaacctactgaaactgctcctgatgtacgagctggaaacctcgcaggtggccaactactggtggagcggcaagttcagtcccaatgccgaactcattcgatcccagcatgctgcccagagtgggctaactcctttcgactgtgcgctcagccagtggcacgcgtacagcaccatccatgagacgcacaaactcaatttcacactattcaattcaattctggacgtggtggtgccagtgattacttacatgcagaacgactccgaggatgtgaaaacattctgggatggcgtgaaacgactgcttccctcgtgcttcgcagtgctaaggaaactaagatccaaaaacaccagtgataaaaacataattagagctctgaacgaagttctggatattctaaagaagattaaggagctggaagtgccggagagtgtagacatattccccaaatcggtgtatggttggctacacacaaacgacactgatgaaacgtgcaatattgatactgccattgaggatgctatcaacacggggacaagggaatggctggagcacatagtggagggcagcaggcaatctaagaacaccgaaaccgatgacgaaaagctgcagtacgtcattaaactgatacaaatggtgcggtctgacctgcaacgtgcaatggaatacttcgataaaatcttttaccacaaaattcagcttaactattccgctgtactttatttattttatgactccaagcttgctgaaatctgtaaatcgattataatagaagtgtgcaataatattaagagattggatgtgccagacgatcaattcgaatatttacccaaccttgagaatgtaaatatgggcacgactttgtttgaagtctatttaatactcaaacgttacgttcaattaggagaatctctttgctccgagcccctggaactgtccaacttttacccgtggttcgagaggggagttacccactggctggatatttcaataattaaggcattgagtcgcatccagaaagcaattgatttggatcagctgaaagcggtcgatgaaacagtgaaatacagctcctcggcagtggacacactttccatattctaccaaatcaagatattttggcaacaacttgactggccagaggtcgagggttcctacatcttcgtagccaaaatcgtcaatgatctttgtcgctgctgcatattttatgcccaacagatgtcccgcagagttgagaatatttttattgctgatgataacaataaaaatttcagaacttagcattgatgacattatcaagagattgggggagtatcgaactaacttagaggctgagagatgcgcaagcaccatcaaaactgtcattgaaaatgcattggacaccgaacgcaatcagattgttgagctcatagagattgtggccaggaaaatggcaccgccaattagacgatacttggccgaaggtgctgaggtgctcgccaaggactccaactccatggaccagttaatgatgtacctggaatcctcattggccacactctacgatactctcaatgagattaatttccagaggatactggatggcatttggtcagagttatccattataatgtatgatctaattcaatcaaatcttgacaaacgccgaccaccagctttcttccaaaatttgaacaatactcttcagacaatgatggactgctttaaaatgggcaaccttcaaacttcagacataaaaatattgtcttcaattcaaagtcgactaaggctttattccctggagacatcggatcttattcatcagtattacttggagcgtctagaaaaccaaaagagccaagagtcatctccatatggacaacttaccatcacggctcagttaactgataccggcttattggtaggacttcaatcatttgaaacataa

SEQ ID NO: 24543 - protein, 753 aa, DROSOPHILA
MWKGFFFKLQELKMNPPTEHEHQLQDGDDGFFEKFGSLLRQKSQIDEGVLKSSLAPLEENGSGGEEDSDESPDGTLQLSQDSECTSIDTFATESTLASSSDKDISTSVLDSAPVMNVTDLYEEILFEIFNNIGCENNEECTNSLVEFVQDAFKIPNATHEEIYEAARLKEPPNVRLNVEIIKAENLMSKDSNGLSDPFVTLYLESNGSHRYNSSVKPATLNPIWEEHFSLDFDAAETVKEKVNKILDVKGVKGLSKLMKEIAVTASSGKHDNELIGRAAITLKSIPVSGLTVWYNLEKGSKGRSRGSLLVNLALSAEKNKSVAVQEHKNLLKLLLMYELETSQVANYWWSGKFSPNAELIRSQHAAQSGLTPFDCALSQWHAYSTIHETHKLNFTLFNSILDVVVPVITYMQNDSEDVKTFWDGVKRLLPSCFAVLRKLRSKNTSDKNIIRALNEVLDILKKIKELEVPESVDIFPKSVYGWLHTNDTDETCNIDTAIEDAINTGTREWLEHIVEGSRQSKNTETDDEKLQYVIKLIQMVRSDLQRAMEYFDKIFYHKIQLNYSAVLYLFYDSKLAEICKSIIIEVCNNIKRLDVPDDQFEYLPNLENVNMGTTLFEVYLILKRYVQLGESLCSEPLELSNFYPWFERGVTHWLDISIIKALSRIQKAIDLDQLKAVDETVKYSSSAVDTLSIFYQIKIFWQQLDWPEVEGSYIFVAKIVNDLCRCCIFYAQQMSRRVENIFIADDNNKNFRT

SEQ ID NO: 24544 - DNA, 10205 bp, DROSOPHILA
ctagcgaatgcctcgaagaagatcgatgaaatggatctcaagctcagctgttacaaaacaaagcggtaagatatgagagccttatttgttttctggtttaaatagaaatggtttttttttccattccagtgctgatattgcggagaaactgcatggggtaatggaggcccagtggcagcaggcccttgctatcctcaccactcctagtcaaaactccattatccaatccagtgacactgaagccagtgaatctccggagctaaataatgcacgcatgtatccagaaacgcccaaatcgagcaaatcgcagcgcagcaacaacactgagaagaataacctggatgtggtgggcaaacgggatcccccctcgccgatggacaagctgcaggcctacattgaactgctgctcagcaagtcgcccagtgatttcgacaggctcgacgagatcttggccatgacatccaaacagggtagcaaacaaagcaaaccaaagagcggaagtggcaacagtaagcctccaccttggaagtgctgacaacgagagatgctttcgacaagtaatattctatctagtaatacctgtagttttttaagaatgactgcctctttgaatggccgctacaatggacattgtagttgtatatttttctatggaattctgaaagtaaatagtttagtttttgcaaaatatgattgtttatttgataatatcaacaattgaaggcagcgtggcatttgtatgcagcacgggaaaaacaaaggtgaaaattttaaatgtaataataatataaagttttggtacaaaaggtgtattttacagctctatgagacctaagcctaggaatcttgtgatatattaattttgtggctgtcgccagcgaatgttgtattttatatcttttaaaaggatttattctttgattcagctgtttcttagatcgtttatgtgtctgtcattgatatgctttgagttgaattattgagtattttcccattaacattatttgtagacgatttgagggaatttcggggcatttccatagagcccctctgattcccagacttggatatgggactctcgcgttagcaccaccaaatgctgatgggttgagtagcaaatgctgcaagttaagcagggattagattgtattttattcgaatatggagccacttctctcttacctacgaatgggcgatgtacccgtggtcagctcactgacgaagctcaggttccagctggaccagaagcgcacgaatcctccctccacagcagtggctatcacgttgacacccactccttccttgatgtaggagtagcacacggccaggatacgatcctcgtgcaccaggtgctgcacataccgcgcgttcactgagtgcagcctcaaaatggacttgccattgggattcacattcacattgacgaagtcgtctaggttctcctccgttacctcaaagcattcgtcggccacgttcagcgaattaggtctggtcgcaactgccgtgggctttggatccgtactggtgttgcaggattggggcaaagtgtgtaccgtgacaatgtcccccagcgtaggactaatggccacatgtgttattggagactgatgaatctctgccgggcgggcaatcgtgcgtacatagctccagctgtgggaaaatcatggatgatttttcttaaggcaagattcatgtgtgtacttactcattgagatcccatatgacggcaatgccatcgcgacccgcggtcaccgcgatcttaaactccacggaaagggtaatacaggtaatctcgtcggtgtggcgtaccagcaacgtgggtcccagccaattaagatcggcaccgtcccgctggaaagcatccccgccggaggaaatgctggacgagttaactgaggaggcagaactggttggatgcaggttgcctgcttcatctacccgctccgatccacctccgccgattcccttgttagtcatcttccggaaggctgagttgtaggacaagctgaatccgcgggcatagctctgcctgctcttcgccgaggctcgctgctgggaatccagtcctccggtgcacttgtaaacactaatccttccagatttatggccaaaccaaagttgattcgagttcacatcgcatccacaggcggtaatgtcgtcaaaggtcccattgtgtagaagattctttggcttggcctgtggcttgttgagtggctggattctcacaatgcgatcatcatagccccaggagatcacgttgtatgtatccggctcagctccctgcattacacttgctcttccaggaagagcatagaccacattggtgttgcagaagctaaccaggtgctcggtgcctggtatcttgtgaatgtttgcccatgaaggagctttcagctgtggcgatcccacatagacgccccagcgcagaccgcgtacggtagacactatgggtttgcccaccagtgagtagtctagcggcttggacgccggatgtggcgacttaaaaagctgcctgggcatttgaccatatgtcttcaccattgtcttgactgcttccctttcgatgggatcgctgatctcggagtccagaaaaacggcgtaagtctgtggataaattcaaaagaagataagcatctattgcatacatttcacaggacatcatcactcactgctgggtgaaacacattgatggcctccacggcactctccccgctctgtttgtagccgaagatcaggtctatccagttatgaatctgattccgtaccaattccgactccaaagcctggcggtggataaggacaaatagccgggagtctcgctgactccatggtggtagtgagacatcctccacacgctccccattttgtcggcaaccgaatttaaagcgttcgaagttttcaaacatctccggcaggcagaagaattccggaatgagttccttcacatccgtgggactatcccggctagccaacaaccaagtggtgttcagggcatggaacgtgcgatccggtaaatcaaagtcgttgtcctggtaacgcagaaagtagctggtaaacggaggaacccgtaccaggaagtgcagcacagtgccggaattcgagtaatgggagctgtaatgatagggcttaaggatcagcgagcccatggtggtgttggtactgtcaatgtactggaaggggagaagagagattattttccaatggattgctgaataagatcgttacatactgtatagttgctgatgtagtgcttctcgttctcctccacctgcacggcaatgggtcgtccaagtcgcctgaagttgtgtccctcccgcagatccaaaacctccgagttgtagttggccagcacccagggaaacactgggtactgcatgagatcgttgtaagtacgtccggagatctggttgagggtcattagatactcccagttggtcaaaagaccctcgcgccactgctgggtgatggcaattaccttggactggtcgggcgtggctacgattttatcacagaatacctcgcgcataatcttccagtcgtcggcgttctgcagcgagaagaacagcgacttgttcgtatcgagtagaatctcgaacgccgtctcctggtgctggtatcgcttcagccagatctcggttatgttggcgatatcacagtttacgttgaagtaccgacaccggtaggtggccaggaagtagagcttcagatcggtaatgatgatctcgccctcgatctccccgtccactggcaaaaatttggctgcaaagttgtacagaatttgggagttcagcgatatgttcagttgttgatcatagctggctattaggtaatccagtgggcgcacatatggctctagatcctcacgatgtccttgtcccggcctgtactcgttcatgaagaagcgccgatcgatgtccaggtggcagcgacgcagacgagtgtgcactcgagagggtccctcggtatcgtccagctcccaagagctaggaaatggggttttagttagttacattccgtaaagattcttgcagcttactcaccattcagctcgttcagcagagtgccaaggagcaccttcgtgggtcatgcggcgtataatttccagccatttggtgtaggtataggtatcatcgtagactttcatgtggcacattagagccttgcgctcagcattctagaggagatcaagaattattataaaatggcagtgtctagaatctctaaatcactcacctgaagttctgctacctttctagtggtcaccattgaggactccacgcattgctggaccagtggctcaaatctgtacacggtcttttccagcagagtcttttgcttggccgccatattattacgattctgatctaggcgatctagctcatggacgagattccatgaggagtcattctccttgattcccaatgcatcacaaagaggcttcaggttttcaatgggctccggcatgtcctccagcagggagagccagagtaaggccttgatcatcttagcatcacagataatagcccgctggaactcatcctgttgggatcgccacagggcatccacaatgtaggagcgcagatcgcgtggacgcgaaggttgaagtccccaggcaatgaagttgttgcatcgctgattgctcgagatcccgtacgaaacgagcagctggaagagggccagctcctgggaactggccacgtagttgggtccggtcgtctgtcccacgccaacggtgaagaactgagtgcagcgatctatgagcagctccactcgggttcgcagctcggagtgactcagggaggaatcgttggtcactgcaacgcggaaactatttggctcaaagaacttggtaagccactccagttgaagttgtgcctgggctgttcgaaaactgcgcataatcaactgtggttgcttgtcctggtaaaaggatagcaagttgaggatgtcccaaacgagctaggaaggataaaaaaggatgttaacgggattccaatttgctcattctgtatatactcacatttatctgaccaacagaacgcattgcccgctctccaatagtggccagtagttccacaacggactcatcggcattggattgacccacgcgtaaggagtagatcttgtagagggccttcaccgagcactgcagtagtcctgcttcaatcagacacgtctgatcatccggattctaaaaggagaatatgaccattgaaactcaaaagaattgtgtcggattggattgtttacctgcagatacagacgtaagagcgctttgaatacccactggggttccgttccttccgcgatggccagcagggatgggagtccaaagcgctggcgaatccttacaggtgcatcgcaactttgaatatccgtcaggctgcaatgcatcccgttgatccaagctagacaggcctcaaacatgccgacatcacatccgtggatggttaactgattggccagatgcagtggatgcatcaacttggtagcggcattgagttccccactaggtagacgctttgtcaggacgtccaccaactgaatgatggcctggcgcacggcgcagctgcgctggttggccagaaccaaaagcagttccagtttcacgtagtggcgagtgaccacatccaccgatgaatccggcagaaggcaaaggaagtcctttagcaggatgaggaggcgctgctgcagtcggatgatccccagttgatcataaaagtccgtcttcctattcggcaatgatgactgacccgagctgggagtgctgtgacccgatggctgccagatcttgccgagatgcagatgcgggtggatgcgccttcgagcgatctttagcgggctcctcttcggactgttagcactggtgggatgacgtcgcttgaacttcaggcgccaccgagtggcttccaccggacttagcagtctcaaagcggacttgttgaggttcgagcagtcggccatctggtccagatgttcctcaaactcgttgacagctttcctgtaaccagatgtgctagcatgaagtcgtcgcagtttcttaatcctttccgctcgctcgggatccagttcctgcggctgaggatgcaactgccgccgcagcgatgtggtcaccctgctcaaattggctgccaccagggagcgttcctttgtcggctgttgagccgttaggaggaagtagaaatgcgtgcgatcgtgggtcacataacaatcgctgggcttgtgaagcagcaacagaagtttcatgatctcatccagcatggaggagtcaggaggcgatcctgaaaacacggccagtatctggacaaagcactcggcggcatagggtgaaatctgaaccggactgggtgactctatcacatagaccttgcagagattgaggagtgctccaagcaaaccacacttttgaagttgctccatgttgaagtccctttgcggatgcttatccctggtgagagccagaatgcagcggaaaagcatgtccaggacatcggagtgggttgctccggaacggtgccagtcggagtagcgctgtagcacggtcagcatcaggcggggatataccagagtggccatcgtgttgtcatttacattaatggaatcccccttcctggtgatcagcacctgggaacaggcattgttcacaatgcttcggagcaactggacatccttcgagcacttctccgacttgatgacgtagccgattagagacaggtaatcctgtcgttggaactccgtgtacagctgagcatccgagtgcgccacctgcaacagcagatccagagccaaggcctgggtacttgcattgcctgtgagctcaacaatctgtaaaaagtgactgttataaaaggattctcgaggagattagtttcagactcaccctggcgaacagatacagcagggtggagagtccaccgctgagggacgtggccgcctgaagggtctgggcttggtgctgctgcagttccccgtacagcatgtgtccgtggggctgtccatagcaggccatgtccagttcctggctagcatcgtagctcatcaccagatccggctgctgggcggtgtacacgaggactctagcctgtctcaactgacgcatgcagtccaggtggttgccgaaattcgaggacgacagcttgcccaggcttacgaagccatagtttggcttccaattggccacttggcactgtgtgaattcggtgaagtccggccccatggccgtgagattcatcatcagcaagggatccaccaggcggcgcttgaaaaggatcacgttcgagagggcataccgaggggtcgaaccatccagcgtggatcgcgaggaggagctgcttccgggactcctgccggtcggctgtccttcacccagagccagcaactggaaactgtgcacccgggtgagctggcggagattgcggaaaggcaaccgcatggtgtgttgctccaggccatcaaggaatatgctgatttccacagaatctgcttgctgctgcagaccgaataccaaatgcatccacttgtggcgtggtaatctcaaatgctggagctgtacggctgagctctcaaaatagccacctgttgaatccgcggaggcttggtggccattgagcaggtgcatctggccgaagctgttgagcagcgctagcttggtctgtttgagagcctgtcgaatggttcctccattggccgcctgagtgttggccgagatcacggatgccgtatctgcattggcttctatttgctcctccacacgaaccggagctagttgctcgttcggtttgaccagctcgaagataagctgcatgttgttgctgatgtatatgctgaccatggcttggttagttcccaaagaaagcagatggagtttctatagaagattggcgtaagttatgccggattaaagtgggttattctctagcttactgttagatcctctccggagtagcgtgtttcatcgtcgttaaactgcatggaactgcgatgcatctgctgccctctcaattccagccacagtgatagggtcaagccatccggttgccaaagacgcgtctgtgtcaccggaaaaatgcaggcagcccgagtgaagagcgtgttcgtttgacattgctggtggtgcaggcgcactctctctatctgctcgctgaccagtggctccgaggtgactactatcttgccatcagtgatgatgggaaagtccagctccatacatggctgagcctttcgaagcgatccggaggaaatgtggtgcatgtgccgcattaacagatccacggggggttgtttggaggccaggatggagtagtaacactgcagcacctctggtgtgttcagatgggtaaccaactctaggatcgattgctgtaactctaaatgttaaccagatcagatatagaagatcattatagggtacaacacaactcacccctcaatctcggatcgctgcagctcaaaatcggcgcgaatcccttaagcaagcatagaggaccaccgaggtagtccctgatgacgaacagccggttcgccagttgggtaagactctctgtccatccgtttggctgcttgatgcagagcagagatagttccgccagcatttgcaccaccagctggctgaggccctggtgcatgatgtggcttcgatagcgggaggatggctgaaacggggtccacgtcgattcgttggctgccaagacgcccccattgagctcgcactcggattcactgaggtcagcgatttcgccatctgcctcgtaaccctcgtcggcggtgaggtaaaactcgtgctcgttctcgctcagttccagttcactgtcggcggcgcagctcaatgaggcccgggtggagaagtaatccgcatccacgccagcatttgcctcgctggaattgggtctccgacgcggcgtgggcggtgtggccagggagttcttggccggcagtttaacagtttgcaatctgggcagctccacgctgccgctgttgaaggatctggcacgtggtcgtggctgctgggaatcgccggaggggctgttgaccacgcccgtcggctcctggtgggtgctcgatagctcggcaattttgagcagggtctgcagagtctggatgaccgcattgtcccgggcatgctgttccccgtgctccgaccagttgtccgtggcatggctcaaaatgatggctcgcagcttgcgcaggtgcttctgcatcttctccactgtgaagaaagtgagataagccgcagattagtggtagatatgatctgatgacaagactgataaccggcgtctatcttctatcatccgcaaactggagcaagtcgtcagcgctggacgagcgccaaagcaaaagtgtcggctcttgtctggaatgtatctcgtttcggtgcctatctctgtatctgtttgtaaatgtatctctgtgcttttaagtgtatctgtctcagcgatgttgtaacttgtgtacccagaaattcaatcccagcgggcagagccttgtaaatgccgcgtattatactccagccgaccaaacgactgactaactgtctgcctagctggcttataattaactctcctagtccgcagccacaatcacaaccacaacgccccgttattagccagggtctagaatctacaatccggagctggattggaggtgaatgtgggtgccttgttcttgtcccacttctagggcttcccagagagtgctcggctgttgtgccttgtctattttctatcgcctattgcttattggcaacgcattagccgcggaatgccgtggaacccaccagatgggcggctaaccaggaggaacatggcaggcaagtaatgctctttctttttaaataccctactaaatgggttctcaatgattatcttattaaattaaaaccgaattaaggaactagctaagtaagctatcaaagttacagaatgctccacatgttcaatatacccacttccctcatctcaagaggtactcaaccgaacaatctttgacacttaccttcttcgttttggaaacccttgatgcagatggccatggtcgcctcgaagagtttgagcaagagtttcttgcattcgccgttgggttcgtataagcagaagaaatccgcatcaatattagcacgtgtcggtgagttggcacttccgccgcttcctggactgccgccgaacagggatcccacaatgctaaagagcttgttgatgatgccatcg

SEQ ID NO: 24545 - DNA, 7562 bp, DROSOPHILA
tggagaagatgcagaagcacctgcgcaagctgcgagccatcattttgagccatgccacggacaactggtcggagcacggggaacagcatgcccgggacaatgcggtcatccagactctgcagaccctgctcaaaattgccgagctatcgagcacccaccaggagccgacgggcgtggtcaacagcccctccggcgattcccagcagccacgaccacgtgccagatccttcaacagcggcagcgtggagctgcccagattgcaaactgttaaactgccggccaagaactccctggccacaccgcccacgccgcgtcggagacccaattccagcgaggcaaatgctggcgtggatgcggattacttctccacccgggcctcattgagctgcgccgccgacagtgaactggaactgagcgagaacgagcacgagttttacctcaccgccgacgagggttacgaggcagatggcgaaatcgctgacctcagtgaatccgagtgcgagctcaatgggggcgtcttggcagccaacgaatcgacgtggaccccgtttcagccatcctcccgctatcgaagccacatcatgcaccagggcctcagccagctggtggtgcaaatgctggcggaactatctctgctctgcatcaagcagccaaacggatggacagagagtcttacccaactggcgaaccggctgttcgtcatcagggactacctcggtggtcctctatgcttgcttaagggattcgcgccgattttgagctgcagcgatccgagattgagggagttacagcaatcgatcctagagttggttacccatctgaacacaccagaggtgctgcagtgttactactccatcctggcctccaaacaaccccccgtggatctgttaatgcggcacatgcaccacatttcctccggatcgcttcgaaaggctcagccatgtatggagctggactttcccatcatcactgatggcaagatagtagtcacctcggagccactggtcagcgagcagatagagagagtgcgcctgcaccaccagcaatgtcaaacgaacacgctcttcactcgggctgcctgcatttttccggtgacacagacgcgtctttggcaaccggatggcttgaccctatcactgtggctggaattgagagggcagcagatgcatcgcagttccatgcagtttaacgacgatgaaacacgctactccggagaggatctaacaaaactccatctgctttctttgggaactaaccaagccatggtcagcatatacatcagcaacaacatgcagcttatcttcgagctggtcaaaccgaacgagcaactagctccggttcgtgtggaggagcaaatagaagccaatgcagatacggcatccgtgatctcggccaacactcaggcggccaatggaggaaccattcgacaggctctcaaacagaccaagctagcgctgctcaacagcttcggccagatgcacctgctcaatggccaccaagcctccgcggattcaacaggtggctattttgagagctcagccgtacagctccagcatttgagattaccacgccacaagtggatgcatttggtattcggtctgcagcagcaagcagattctgtggaaatcagcatattccttgatggcctggagcaacacaccatgcggttgcctttccgcaatctccgccagctcacccgggtgcacagtttccagttgctggctctgggtgaaggacagccgaccggcaggagtcccggaagcagctcctcctcgcgatccacgctggatggttcgacccctcggtatgccctctcgaacgtgatccttttcaagcgccgcctggtggatcccttgctgatgatgaatctcacggccatggggccggacttcaccgaattcacacagtgccaagtggccaattggaagccaaactatggcttcgtaagcctgggcaagctgtcgtcctcgaatttcggcaaccacctggactgcatgcgtcagttgagacaggctagagtcctcgtgtacaccgcccagcagccggatctggtgatgagctacgatgctagccaggaactggacatggcctgctatggacagccccacggacacatgctgtacggggaactgcagcagcaccaagcccagacccttcaggcggccacgtccctcagcggtggactctccaccctgctgtatctgttcgccaggattgttgagctcacaggcaatgcaagtacccaggccttggctctggatctgctgttgcaggtggcgcactcggatgctcagctgtacacggagttccaacgacaggattacctgtctctaatcggctacgtcatcaagtcggagaagtgctcgaaggatgtccagttgctccgaagcattgtgaacaatgcctgttcccaggtgctgatcaccaggaagggggattccattaatgtaaatgacaacacgatggccactctggtatatccccgcctgatgctgaccgtgctacagcgctactccgactggcaccgttccggagcaacccactccgatgtcctggacatgcttttccgctgcattctggctctcaccagggataagcatccgcaaagggacttcaacatggagcaacttcaaaagtgtggtttgcttggagcactcctcaatctctgcaaggtctatgtgatagagtcacccagtccggttcagatttcaccctatgccgccgagtgctttgtccagatactggccgtgttttcaggatcgcctcctgactcctccatgctggatgagatcatgaaacttctgttgctgcttcacaagcccagcgattgttatgtgacccacgatcgcacgcatttctacttcctcctaacggctcaacagccgacaaaggaacgctccctggtggcagccaatttgagcagggtgaccacatcgctgcggcggcagttgcatcctcagccgcaggaactggatcccgagcgagcggaaaggattaagaaactgcgacgacttcatgctagcacatctggttacaggaaagctgtcaacgagtttgaggaacatctggaccagatggccgactgctcgaacctcaacaagtccgctttgagactgctaagtccggtggaagccactcggtggcgcctgaagttcaagcgacgtcatcccaccagtgctaacagtccgaagaggagcccgctaaagatcgctcgaaggcgcatccacccgcatctgcatctcggcaagatctggcagccatcgggtcacagcactcccagctcgggtcagtcatcattgccgaataggaagacggacttttatgatcaactggggatcatccgactgcagcagcgcctcctcatcctgctaaaggacttcctttgccttctgccggattcatcggtggatgtggtcactcgccactacgtgaaactggaactgcttttggttctggccaaccagcgcagctgcgccgtgcgccaggccatcattcagttggtggacgtcctgacaaagcgtctacctagtggggaactcaatgccgctaccaagttgatgcatccactgcatctggccaatcagttaaccatccacggatgtgatgtcggcatgtttgaggcctgtctagcttggatcaacgggatgcattgcagcctgacggatattcaaagttgcgatgcacctgtaaggattcgccagcgctttggactcccatccctgctggccatcgcggaaggaacggaaccccagtgggtattcaaagcgctcttacgtctgtatctgcagaatccggatgatcagacgtgtctgattgaagcaggactactgcagtgctcggtgaaggccctctacaagatctactccttacgcgtgggtcaatccaatgccgatgagtccgttgtggaactactggccactattggagagcgggcaatgcgttctgttggtcagataaatctcgtttgggacatcctcaacttgctatccttttaccaggacaagcaaccacagttgattatgcgcagttttcgaacagcccaggcacaacttcaactggagtggcttaccaagttctttgagccaaatagtttccgcgttgcagtgaccaacgattcctccctgagtcactccgagctgcgaacccgagtggagctgctcatagatcgctgcactcagttcttcaccgttggcgtgggacagacgaccggacccaactacgtggccagttcccaggagctggccctcttccagctgctcgtttcgtacgggatctcgagcaatcagcgatgcaacaacttcattgcctggggacttcaaccttcgcgtccacgcgatctgcgctcctacattgtggatgccctgtggcgatcccaacaggatgagttccagcgggctattatctgtgatgctaagatgatcaaggccttactctggctctccctgctggaggacatgccggagcccattgaaaacctgaagcctctttgtgatgcattgggaatcaaggagaatgactcctcatggaatctcgtccatgagctagatcgcctagatcagaatcgtaataatatggcggccaagcaaaagactctgctggaaaagaccgtgtacagatttgagccactggtccagcaatgcgtggagtcctcaatggtgaccactagaaaggtagcagaacttcagaatgctgagcgcaaggctctaatgtgccacatgaaagtctacgatgatacctatacctacaccaaatggctggaaattatacgccgcatgacccacgaaggtgctccttggcactctgctgaacgagctgaatgctcttgggagctggacgataccgagggaccctctcgagtgcacactcgtctgcgtcgctgccacctggacatcgatcggcgcttcttcatgaacgagtacaggccgggacaaggacatcgtgaggatctagagccatatgtgcgcccactggattacctaatagccagctatgatcaacaactgaacatatcgctgaactcccaaattctgtacaactttgcagccaaatttttgccagtggacggggagatcgagggcgagatcatcattaccgatctgaagctctacttcctggccacctaccggtgtcggtacttcaacgtaaactgtgatatcgccaacataaccgagatctggctgaagcgataccagcaccaggagacggcgttcgagattctactcgatacgaacaagtcgctgttcttctcgctgcagaacgccgacgactggaagattatgcgcgaggtattctgtgataaaatcgtagccacgcccgaccagtccaaggtaattgccatcacccagcagtggcgcgagggtcttttgaccaactgggagtatctaatgaccctcaaccagatctccggacgtacttacaacgatctcatgcagtacccagtgtttccctgggtgctggccaactacaactcggaggttttggatctgcgggagggacacaacttcaggcgacttggacgacccattgccgtgcaggtggaggagaacgagaagcactacatcagcaactatacatacattgacagtaccaacaccaccatgggctcgctgatccttaagccctatcattacagctcccattactcgaattccggcactgtgctgcacttcctggtacgggttcctccgtttaccagctactttctgcgttaccaggacaacgactttgatttaccggatcgcacgttccatgccctgaacaccacttggttgttggctagccgggatagtcccacggatgtgaaggaactcattccggaattcttctgcctgccggagatgtttgaaaacttcgaacgctttaaattcggttgccgacaaaatggggagcgtgtggaggatgtctcactaccaccatggagtcagcgagactcccggctatttgtccttatccaccgccaggctttggagtcggaattggtacggaatcagattcataactggatagacctgatcttcggctacaaacagagcggggagagtgccgtggaggccatcaatgtgtttcacccagcaacttacgccgtttttctggactccgagatcagcgatcccatcgaaagggaagcagtcaagacaatggtgaagacatatggtcaaatgcccaggcagctttttaagtcgccacatccggcgtccaagccgctagactactcactggtgggcaaacccatagtgtctaccgtacgcggtctgcgctggggcgtctatgtgggatcgccacagctgaaagctccttcatgggcaaacattcacaagataccaggcaccgagcacctggttagcttctgcaacaccaatgtggtctatgctcttcctggaagagcaagtgtaatgcagggagctgagccggatacatacaacgtgatctcctggggctatgatgatcgcattgtgagaatccagccactcaacaagccacaggccaagccaaagaatcttctacacaatgggacctttgacgacattaccgcctgtggatgcgatgtgaactcgaatcaactttggtttggccataaatctggaaggattagtgtttacaagtgcaccggaggactggattcccagcagcgagcctcggcgaagagcaggcagagctatgcccgcggattcagcttgtcctacaactcagccttccggaagatgactaacaagggaatcggcggaggtggatcggagcgggtagatgaagcaggcaacctgcatccaaccagttctgcctcctcagttaactcgtccagcatttcctccggcggggatgctttccagcgggacggtgccgatcttaattggctgggacccacgttgctggtacgccacaccgacgagattacctgtattaccctttccgtggagtttaagatcgcggtgaccgcgggtcgcgatggcattgccgtcatatgggatctcaatgactggagctatgtacgcacgattgcccgcccggcagagattcatcagtctccaataacacatgtggccattagtcctacgctgggggacattgtcacggtacacactttgccccaatcctgcaacaccagtacggatccaaagcccacggcagttgcgaccagacctaattcgctgaacgtggccgacgaatgctttgaggtaacggaggagaacctagacgacttcgtcaatgtgaatgtgaatcccaatggcaagtccattttgaggctgcactcagtgaacgcgcggtatgtgcagcacctggtgcacgaggatcgtatcctggccgtgtgctactcctacatcaaggaaggagtgggtgtcaacgtgatagccactgctgtggagggaggattcgtgcgcttctggtccagctggaacctgagcttcgtcagtgagctgaccacgggtacatcgcccattcgtagcatttgctactcaacccatcagcatttggtggtgctaacgcgagagtcccatatccaagtctgggaatcagaggggctctatggaaatgccccgaaattccctcaaatcgtctacaaataa

SEQ ID NO: 24546 - protein, 2517 aa, DROSOPHILA
MQKHLRKLRAIILSHATDNWSEHGEQHARDNAVIQTLQTLLKIAELSSTHQEPTGVVNSPSGDSQQPRPRARSFNSGSVELPRLQTVKLPAKNSLATPPTPRRRPNSSEANAGVDADYFSTRASLSCAADSELELSENEHEFYLTADEGYEADGEIADLSESECELNGGVLAANESTWTPFQPSSRYRSHIMHQGLSQLVVQMLAELSLLCIKQPNGWTESLTQLANRLFVIRDYLGGPLCLLKGFAPILSCSDPRLRELQQSILELVTHLNTPEVLQCYYSILASKQPPVDLLMRHMHHISSGSLRKAQPCMELDFPIITDGKIVVTSEPLVSEQIERVRLHHQQCQTNTLFTRAACIFPVTQTRLWQPDGLTLSLWLELRGQQMHRSSMQFNDDETRYSGEDLTKLHLLSLGTNQAMVSIYISNNMQLIFELVKPNEQLAPVRVEEQIEANADTASVISANTQAANGGTIRQALKQTKLALLNSFGQMHLLNGHQASADSTGGYFESSAVQLQHLRLPRHKWMHLVFGLQQQADSVEISIFLDGLEQHTMRLPFRNLRQLTRVHSFQLLALGEGQPTGRSPGSSSSSRSTLDGSTPRYALSNVILFKRRLVDPLLMMNLTAMGPDFTEFTQCQVANWKPNYGFVSLGKLSSSNFGNHLDCMRQLRQARVLVYTAQQPDLVMSYDASQELDMACYGQPHGHMLYGELQQHQAQTLQAATSLSGGLSTLLYLFARIVELTGNASTQALALDLLLQVAHSDAQLYTEFQRQDYLSLIGYVIKSEKCSKDVQLLRSIVNNACSQVLITRKGDSINVNDNTMATLVYPRLMLTVLQRYSDWHRSGATHSDVLDMLFRCILALTRDKHPQRDFNMEQLQKCGLLGALLNLCKVYVIESPSPVQISPYAAECFVQILAVFSGSPPDSSMLDEIMKLLLLLHKPSDCYVTHDRTHFYFLLTAQQPTKERSLVAANLSRVTTSLRRQLHPQPQELDPERAERIKKLRRLHASTSGYRKAVNEFEEHLDQMADCSNLNKSALRLLSPVEATRWRLKFKRRHPTSANSPKRSPLKIARRRIHPHLHLGKIWQPSGHSTPSSGQSSLPNRKTDFYDQLGIIRLQQRLLILLKDFLCLLPDSSVDVVTRHYVKLELLLVLANQRSCAVRQAIIQLVDVLTKRLPSGELNAATKLMHPLHLANQLTIHGCDVGMFEACLAWINGMHCSLTDIQSCDAPVRIRQRFGLPSLLAIAEGTEPQWVFKALLRLYLQNPDDQTCLIEAGLLQCSVKALYKIYSLRVGQSNADESVVELLATIGERAMRSVGQINLVWDILNLLSFYQDKQPQLIMRSFRTAQAQLQLEWLTKFFEPNSFRVAVTNDSSLSHSELRTRVELLIDRCTQFFTVGVGQTTGPNYVASSQELALFQLLVSYGISSNQRCNNFIAWGLQPSRPRDLRSYIVDALWRSQQDEFQRAIICDAKMIKALLWLSLLEDMPEPIENLKPLCDALGIKENDSSWNLVHELDRLDQNRNNMAAKQKTLLEKTVYRFEPLVQQCVESSMVTTRKVAELQNAERKALMCHMKVYDDTYTYTKWLEIIRRMTHEGAPWHSAERAECSWELDDTEGPSRVHTRLRRCHLDIDRRFFMNEYRPGQGHREDLEPYVRPLDYLIASYDQQLNISLNSQILYNFAAKFLPVDGEIEGEIIITDLKLYFLATYRCRYFNVNCDIANITEIWLKRYQHQETAFEILLDTNKSLFFSLQNADDWKIMREVFCDKIVATPDQSKVIAITQQWREGLLTNWEYLMTLNQISGRTYNDLMQYPVFPWVLANYNSEVLDLREGHNFRRLGRPIAVQVEENEKHYISNYTYIDSTNTTMGSLILKPYHYSSHYSNSGTVLHFLVRVPPFTSYFLRYQDNDFDLPDRTFHALNTTWLLASRDSPTDVKELIPEFFCLPEMFENFERFKFGCRQNGERVEDVSLPPWSQRDSRLFVLIHRQALESELVRNQIHNWIDLIFGYKQSGESAVEAINVFHPATYAVFLDSEISDPIEREAVKTMVKTYGQMPRQLFKSPHPASKPLDYSLVGKPIVSTVRGLRWGVYVGSPQLKAPSWANIHKIPGTEHLVSFCNTNVVYALPGRASVMQGAEPDTYNVISWGYDDRIVRIQPLNKPQAKPKNLLHNGTFDDITACGCDVNSNQLWFGHKSGRISVYKCTGGLDSQQRASAKSRQSYARGFSLSYNSAFRKMTNKGIGGGGSERVDEAGNLHPTSSASSVNSSSISSGGDAFQRDGADLNWLGPTLLVRHTDEITCITLSVEFKIAVTAGRDGIAVIWDLNDWSYVRTIARPAEIHQSPITHVAISPTLGDIVTVHTLPQSCNTSTDPKPTAVATRPNSLNVADECFEVTEENLDDFVNVNVNPNGKSILRLHSVNARYVQHLVHEDRILAVCYSYIKEGVGVNVIATAVEGGFVRFWSSWNLSFVSELTTGTSPIRSICYSTHQHLVVLTRESHIQVWESEGLYGNAPKFPQIVYK

SEQ ID NO: 24547 - DNA, 6740 bp, DROSOPHILA
gacctctacaagaacggcggcatatcgcatggggcacaccaaaagtcggttgtcatttcggggatcgaactgtactttcagcacaggcgatggaaacctatacttgtgttccagttcgccggttagcacatcccaaatgcacacattgttgtccgtggaagctgaaagtaactggagtggattggaaaatgtagatgatcaggtgtacggcgagcgagggcctaccttgtgaccattcctggtccaactgagactgcaaacgggatgcacatgggccgaaataatcttggcaatgcccctcgtcagaaaatcccagattacaatgcggccatcattgcatcccacggccaaaagggttccgtatttgttaaaggcacacgtcacggccaacgaaatgcaatccagcgagccgtcgaactcctctgggtagttttgtccgaaagattcttaataaagctggagttatttactacataagcataaaaaatgggcggcaatctcacctagtagctccaaattcatttttgtttactatcttcttcttttaaaatggcaactgacactcacaccgaacggcaataacatattatgttataaatgataagcataacagaagacgagtttttcgatagttaaggttatattctgtacaactactgaacatcaattattatattataatacgaatttaaaaatctacgtatctacgttggtgttttttgtggttttattaatagaataagtttagttaattttagaggtgaaattaaatattgaaatagttaaacatataaaatagataaatttggtgaagcgtaagtaaattttaaactgcattagttatatcttaattcaagttccccactaatttatgagcgttagatgcgatagtgttatgtctggcgcaagcgattgtctcgacgtttcttcgatattttaagatatcgataatgtcatcggagatttgccacccctattttttgagctctgtgcacgttgtatgagaaaaatttatgcagatgtattcgccaattgtaaccaagtccggattgtgaaattgcacgcagacagcgagcatcataataagcgctctaattggagaaggcagaagtttcgaattaagccatttcggagacgtttcgtccgtggcacgcgattgtgtcaacgtcacctttggagcactcgccctctctcgctcgctcccgctttcgttgccaattttttgcttgccctctctcggtcactcccttcgaaagcttaacggttagagtgtaataatgaaataacccagtttcgaatttcgttcacaacaaaagtgcgggcctttcatgccaaaataacatttggtttcgaattgtttttcaaattcgaatcgaggttttccagctttccagtttgacagcgagagaacgagagagagcgagggcgaattacggtgttcgcgctctgcttgtgctttccactccactccccttcttaacttcccccctcccagcctatttactctgtgtgcatgtgtaaatgaatactttaaaacgtttttaatcgttgcagtgtattcatcgccagccacgttaaaaggaagaacgtgtatgtgaatacgaccatcagaggatcttagcgaaggattcaggagcccaaattcttaatccccatcccacacacacacatatactcgcacgtaggcacgctctctgtgagaggaagggtaaataaaagaagcaacgagcaaaatgtctggcgaggaaacgtctgccgatcgcaatgtcgagatctggaaaatcaagaagctcatcaagagcctggaaatggcccgcgggtgagtcttatcaatgatatacatgtcctttaacgtcccccccaacgactgttttgcgtacgtgtgtggggtatacacaatgcatggcacgaaaacaacaacactggggtggaagtgggcgtactggacgtgggtgtgggtggggacttgagggagcggcgagtacaaccacctttccttgttgtcgccgtgtgaatctcctttgcattgtttccaatcttggcaagatcccccgcctcactctatctctcttttttgcatacgagcaacacgtttttgtcgagtttttatcagttcaaactagactgattgagagacggagagagagagagagagagaggagtgagtgagtgagtgagtaatcgcctcgtggctgttgtgcgtatgcgtgcatgtgtgtgtgtgtttttcccccaaaatgggccaagctttgtggacccctcgctctcactcatcctgcctcgctcactcccttgacccggtccttaccgcttcacaccgctttagagtgggtaacaaggtcagcaaatcgagtgacccccacaggagcatatctgctatgtatatacatatatatgtatattgttgtcaatatgctccacaattggagctaacattacacctcttccaattggagttggccactgttgccaattgggattcgctttgacagatatcttcctattggttttcagccatatgcgaaatatatacacacatatgtatttgtttttctttttttaagttctgtgctattttttgttgtattttgcattccaacattttgtacaaattacgattggcactcctctgtattataacgaacgagaaaatgatttgcatcagagaaacaaacgtttggaagttacagaaacgtatttgtttcaataaattaatcaaagtttaaatttagtccaataaccgaatgtcaagtttaaaagacatatgccacgaaatttcacggctaattaaataactttaaagtaggttgctattatgtgcatctgacgcgcaaatatacgattgaatagcactgttgctatgggagaaagagccatttccgcgacttatgttctcccttgtttgggtttcttgcagcaatggaaccagcatgatttctttgattattccgccaaaggatcaaatctcgcgcgtcagcaagatgttggccgatgagtttggaacggcgtcgaacatcaagtcgcgtgtaaatcggttgtccgtcctcggtgccattacgtcggtacagcacagactcaaattatacaccaaaggtaagctgagctaagaaattgttcataaacaatcgaacaaacgaactctaaaccgtatcaccaaccgcttcaattcagtgcctcccaacggtttggtcatctactgcggcacaatagtcacagaggagggcaaggagaagaaggtgaacatagactttgagccattcaagcccataaacacgtcgctctacctctgcgacaacaagttccacacggaggccctcactgccctgctcgccgacgacaacaaatttggattcatcgtgatggatggtaacggagcgctattcggtacccttcagggcaacacgcgcgaggtgctccacaagttcaccgtcgatctgccgaagaagcacggtcgtggtggtcagtccgcccttcgtttcgcccgtctgcgtatggagaagcgccacaactacgtgcggaaggtcgccgaggtggccacccagctcttcatcacgaacgacaagcccaacattgccggactcatcctggctggtagtgcggatttcaagactgagcttagtcagtctgatatgttcgatcctgtaagtgggagttaacctatttccatcgatgccatattaagccttacacttgaatcttttttcagcgtttgcaatcaaaagtcatcaagctggtggacgtgtcgtatggtggggaaaacggttttaaccaggccattgaactggcggccgaatcattgcagaacgttaaattcatacaggagaagaaactcattggtcgctactttgatgaaatttctcaggtgagttgccggatacgagttctgaggcatttcgaaattaaaaaccacatccgtatgctttctatatttaaaaggatactggcaaatactgttttggagtggaggacactttgcgggcactggaacttggctctgtagagactctcatttgttgggagaacctggatattcaacgttatgttctcaagaatcatgccaactcgacgtcaacgacagtattacatttgacgcccgagcaggaaaaggacaagtcgcacttcactgacaaggaggtgagagctaaactgagtaatgatactaatccgcacgctaactgggaattcaatcgtatagagcggggtagaaatggagctgattgagtctcagccgctgctggaatggctggcaaacaactacaaaatgttcggcgccacactggagattatcacggataagtcccaggaaggaagtcagttcgtgcgaggtttcggtggaatcggcggtaagtttgagcggccaaacagcacggctggctagttgtagattggttatgtactaaacaaatgctgcaactatatccattcctcttccctcatgctgctttcacacggtcgtcaacgctataatgtaaatgttaatttgcaaactggtacctcaattcgatatgtaggcattttgcgctataaagtagatttccaatccctacaggccgatgagccgctggaggatgtcgatctcgatgactattaagcctgttaagggtgggctgcgaatgggtctcgattatgcgttacatacataataaaccagtactttttgggaaacctcgtaaagcaaaacgttcaaattgattaggaaccaatttacttgccacatagttttacctatgttcagcgtagccgttcaatatttatcaccaatagggtccctctcatcagtcggatggtgcattcccttgtcgatcagatcagcgtgcatctagatatgtacctatacgttttaccaaattttttaattagtcgtgcaccaggcggaatcgcgtacttttaagcagcatattaaattcgtatttcgtactcgtaattcgtaatttgtatttcaatggtcatgtaaaagcgatgcgatagatattagcgcattctccgttcatctggttcgatttcgactgcggtattaggagcaaaagatcttcggttaactgccacatgccactttcgaacgtatctgcatttcccctattcaaattatagccgagtgttataagaaagtatacaaatctaatccataaaattgtaataaaaattaaaccagaataaaaacaccacacaatgaggatggggtatccgtttatattcagtcgcgaagtacaacaaatattttatttagtgtatgaaaagttaaatgtggatacaaaggaggtgagaatctgagtttcggttgaactatcctgtgtgttgatccttttgttttttcctcttcatttatttttcaattttcaatcagcttctgttcttctattttttttttttttttgtttcttattttaatttaattcaattgctgggtgtgcctctgcaggtatcttacgctacaaggtggatttccagagtatgcagctcgatgaattggacaatgatggcttcgatctagatgattactaggaaatgtatctgtagaaatgaatttgccactacgttcgaccgcaaactgaactgcaactacaactatatgaatccaggaaatcaaatagaatatttaaataatatgagaaaacacaaaccttcttccatttttacgttgttggcgaaaaaagtaaaattttaaataatgcatatagatacaaacgataaaatgttaaatcgaggaaaacatattaaaatgcaaccgttttacgtgaacaaatttgcaatttgaatatattttcgagggactagagctcttgttatataattaattgttcctctataaatctaaatctaaatctacattgacaatacgccacgtttcctaaagtttttgggtacaaggagaattgtatctgtgagttttaatcgttctattatagcttgaaaacgaaatttgcaccgaaagctgataaaattccgactctgctatctgctggataagtaaaatgctggtagccacttggagtactaccagtacagcaatgaaagtaaagtgaaatgggcatttcattttctactttctatttgcaggcacactggaaacagtttactgcgagattcccacttcattagttggcaatgcacgtggacgacagcaaaaagcactcgtagtacttgtttcgcccttgatttgcatctaagaatcgctcagatacatctggtgagctgaaactcgtttctgagccgcagtgtcgtgcaggtatccgtactcgtttgaatatttgtaagtaatcattgcagcgagacttccaaaaagtaagctcagctaagttctgcggtgttgggcatccaattagttgaccaagttttctggtggcatgcacatgaaacttgtttaatcgatagggtaaatatgcaaatttcgattgaatttgacgataatgcgtcgagatgaaaagaaaacgaattgtgcaggattttggttacgagataagccgaatcagctaataaggcacgtgcttaattgatatatattgtatgtttaagtaacctaaatatgcacgactttaatatcacttttatttcgctttcgtaataaaacgaggttcactctaaagagcacaagcgtggaggtgtatgtgtgttcttacagccccgatcatttgtatttccatttgagtgcgagcgaagacgagggtttacaacttgatgagaatttgatcaagataacattaaaacacaatctgctgcagtcggacggggcacttctgatt

SEQ ID NO: 24548 - DNA, 1846 bp, DROSOPHILA
atgagaaaaatttatgcagatgtattcgccaatttgtattcatcgccagccacgttaaaaggaagaacgtgtatgtgaatacgaccatcagaggatcttagcgaaggattcaggagcccaaattcttaatccccatcccacacacacacatatactcgcacgtaggcacgctctctgtgagaggaagggtaaataaaagaagcaacgagcaaaatgtctggcgaggaaacgtctgccgatcgcaatgtcgagatctggaaaatcaagaagctcatcaagagcctggaaatggcccgcggcaatggaaccagcatgatttctttgattattccgccaaaggatcaaatctcgcgcgtcagcaagatgttggccgatgagtttggaacggcgtcgaacatcaagtcgcgtgtaaatcggttgtccgtcctcggtgccattacgtcggtacagcacagactcaaattatacaccaaagtgcctcccaacggtttggtcatctactgcggcacaatagtcacagaggagggcaaggagaagaaggtgaacatagactttgagccattcaagcccataaacacgtcgctctacctctgcgacaacaagttccacacggaggccctcactgccctgctcgccgacgacaacaaatttggattcatcgtgatggatggtaacggagcgctattcggtacccttcagggcaacacgcgcgaggtgctccacaagttcaccgtcgatctgccgaagaagcacggtcgtggtggtcagtccgcccttcgtttcgcccgtctgcgtatggagaagcgccacaactacgtgcggaaggtcgccgaggtggccacccagctcttcatcacgaacgacaagcccaacattgccggactcatcctggctggtagtgcggatttcaagactgagcttagtcagtctgatatgttcgatcctcgtttgcaatcaaaagtcatcaagctggtggacgtgtcgtatggtggggaaaacggttttaaccaggccattgaactggcggccgaatcattgcagaacgttaaattcatacaggagaagaaactcattggtcgctactttgatgaaatttctcaggatactggcaaatactgttttggagtggaggacactttgcgggcactggaacttggctctgtagagactctcatttgttgggagaacctggatattcaacgttatgttctcaagaatcatgccaactcgacgtcaacgacagtattacatttgacgcccgagcaggaaaaggacaagtcgcacttcactgacaaggagagcggggtagaaatggagctgattgagtctcagccgctgctggaatggctggcaaacaactacaaaatgttcggcgccacactggagattatcacggataagtcccaggaaggaagtcagttcgtgcgaggtttcggtggaatcggcggcattttgcgctataaagtagatttccaatccctacaggccgatgagccgctggaggatgtcgatctcgatgactattgtatcttacgctacaaggtggatttccagagtatgcagctcgatgaattggacaatgatggcttcgatctagatgattactaggaaatgtatctgtagaaatgaatttgccactacgttcgaccgcaaactgaactgcaactacaactatatgaatccaggaaatcaaatagaatatttaaataatatgagaaaacacaaaccttcttccatttttacgttgttggcgaaaaaagtaaaattttaaataatgcatatagatacaaacgataaaatgttaaatcgaggaaaacatattaaaatgcaaccgttttacgtgaac

SEQ ID NO: 24549 - protein, 464 aa, DROSOPHILA
MSGEETSADRNVEIWKIKKLIKSLEMARGNGTSMISLIIPPKDQISRVSKMLADEFGTASNIKSRVNRLSVLGAITSVQHRLKLYTKVPPNGLVIYCGTIVTEEGKEKKVNIDFEPFKPINTSLYLCDNKFHTEALTALLADDNKFGFIVMDGNGALFGTLQGNTREVLHKFTVDLPKKHGRGGQSALRFARLRMEKRHNYVRKVAEVATQLFITNDKPNIAGLILAGSADFKTELSQSDMFDPRLQSKVIKLVDVSYGGENGFNQAIELAAESLQNVKFIQEKKLIGRYFDEISQDTGKYCFGVEDTLRALELGSVETLICWENLDIQRYVLKNHANSTSTTVLHLTPEQEKDKSHFTDKESGVEMELIESQPLLEWLANNYKMFGATLEIITDKSQEGSQFVRGFGGIGGILRYKVDFQSLQADEPLEDVDLDDYCILRYKVDFQSMQLDELDNDGFDLDDY

SEQ ID NO: 24550 - DNA, 4225 bp, DROSOPHILA
gtgcactccgctggccatgccttccgccagatcgtgcagcgtggcggaattaagggcctgtggaagggcagcatcccgaatgtgcagcgagcggcgttggtcaatctgggcgacctaaccacatacgacaccatcaagcacctgatcatgaatcgcctgcagatgcccgactgtcacacagtgcacgtgctggcctccgtttgtgccggattcgtggcagcgatcatgggcacgccagctgatgtggtgaagacgcgcatcatgaaccagcccaccgacgagaatggccggtaagtgaccaatggccgcatttaactattggaacgcttaatcacctatgttattctcgcaggggcctgctctatcgcggatccgtggactgcctgcgacagacggtttcgaaggagggctttgtggcgctgtacaaaggctttctgccctgctggatacgaatggcgccgtggtcgctcaccttctggctgtccttcgaacagatccgcaagatgatcggagcctccggctactgagcggtggctcaatttaagtttaggtgtagatgtacatacaagcacatgtataacgcagttcgttcatgttaccccgcctttaagtcggtcataatcctattttccgtgcctgaatgcccaaatgtcaggaggatgttgtgcggctcctggccaagcttagcagcatatactctgtccattttagtctgttatgccaatcagatctttcaggtttctttctcttaccttttgttattgttgttgccttaagattaaaatcaaaacttacaataaagcgagaaacttgttatttcaacggatattacttaggcgattacttaagaatttcccaagagtcgagcgaaatcgaaagagacagcaatgctggtggtcaatggaacttgtataatcctggcaaataaattattaataggatttttcccttccttcagtgaaagtgaaacagttttaagtattttatcaatagattttttttggtatatgtatattcctaaccagctcgagtgcaattaagtaaaatcaagaaaataaaattggtaataatacctaggaggcatacacacaggcacacatatgtacataaatacatagctacgtataatatatagatatagatacatatatccaaaattgcatttacgtttcgattaaagactccaatggaaaaggaaaatttgggtgcccaaaagcaaaccacacacagaactggaaacccgcaaacagattggatggcaatggcattcgtctacagatctttcatccgtcatcgtcatcatggttcaggttcatgtaatggagtcgtggaggggagcgggggaatgaacggcgacggtactagtggtgcgggtgtttcgcagcccctccaggttggtctgtcgttgtttctccatcgtcgtgttttccgtgtggtttcatgtgcaggacttaatccgaagtgtgtgtgcttgactagacgccgaggaaagctagtgccggtatcaggatctactccagtcccagcatccagttgatgccttgtactatgaaaaagatgagcggctgccaggccaccagccaacgaatccaatccagcaggcgaccgtacaaaacgtgcggcttctcccagctagaggagaaacaatattaagtaggccagtcaaacggatggctctgaatggcttacggattgcggaacatcttctggagatcgaccttttccttgcagtagggacacgtctgcttcttgcccacaatgcaccaaccacgtatacagaactcgtggaatacgtggttacaagacaacttgtaggtgttctcaatgacgccctcttccttctccgagaccagcaactgattgccacacactgcgcagacattctgatcaagatgtcgtgttggaataccctgaggtgtgtagtactgtgggacaaacgggagggttagaagattccaactgggtatctggccaatggtcaactcacgccaatagctgccgccatcttatccgaacatatctcggatatatcacgccccaggacgccgatgtacaggccgtagaagcagaacatcaggcccacatccatccatgtgtttggtggctgtgagaacatgtaattcatgcccagaaaggcggctatgatcaccagatagcccaccaggccaaggccatagctgagcttgtagatgaagtagaaccacttgtagaccagcctgaaattggattttatgggttattatctggccttcgtcggtcgccgttcttatctacgttgactcacctaggcgttgtgccctggatgggcttgctgatggcccgtcgcataaccagtgccgtgatgcaggtgaacaccagccagatgattatgaagcgcagccagccgaagctgcaggagatgatcagcggaatgagccacatggccagcagggtgacgaaagcgtaggatctgtagtgccgcttcttccactcgaccaggatgatctgggcaataaccagggtgacgaacagaatgatcaccatctcggagtgcatggcatcgtggccgcgatgtttctccaccatcagttgatgctgcgctctgttcgattggatagccgaaaatttgttatgatttaaaggattttctaaggccacttcacttaccgcattcgctcctccggcgtcatttcgtccagggactgatggacatccgcattagcagggaattgcagggaagagggaaaatttggcagtagagtggggcttcctattcgattcccattagaaaagactcaccttgttcaagtccacgggctcatgcaggtccatgtgctcctggtgcatcttattgccgttgtatccgccgtatcccgctgccgccaatccgccggacagtcccactcgtcgtctgcgtcgctgcgttatcttgcccaccacgtattgcgatcggtttttacctttgaaattcgtgaaacgaaaacaaataattacattttatgcctgtgtgcttgtccagctgcagtggcgttgccatttgtcacagcggccgaaaaaacgaatacatgtatgtgtgacgtgagccacaaaaatacaagcgcgacctgattgttagaaccagctgtcctgagtatggggtttttcccaaattgttgctattttatcataacctttatttactttagctacgacagcgctttctgattatcgaaaacgaaacgttcgaggccaacgttgccagatgccgctgcaggccgtgccgatgtttaccgacaatcagctgtttggttcaatgagttgagtatttcgttcccagcgcaagcaaacttatcgatagtcccgataaccaaccatgttattttagggcccgataagtaaacaacaatatattgttaagtaaatgttgtacgtaggtttttaagcgaaataaacatgcaaacagagcactggggctcgctgcccgcagaggatgacggcggtcaactgacgccggacaaatacgtgcccacggcggccaagaaacttaagctggacgagattcgccagcgcggagatccgcaaccgcaagaaaagcagtaaataaatctaaagaaaagctttaacgcagccggtaaactaaccatatattccatgtagccacaagttggagctgaggagtgcgctggtcacccagaccatcgaggtgatgaagcaaaccgaggtgctgcagtccctcattgaaacgtactccaacaaaaatgcaagttcttggttcttgtttaaccgtagtatttacctaatttacccaatgaattcatagggaagttccaattacctcttgaatccgtgcctaatgataccggaagtggactttccgccggagaacgcagccgaactggtgggcagccaaaagtttcagaagcccatttggttcacaccaaccgtggacacagcctactctcgcggggatccggaggcatatccggagatccccagctctgcttgccgccaggcgatgcgcaaggtgatgtgcggcatgctgcgcctggccggcttcaccgactgttccgagtcggcggtgcaactgctgacggacgccaccgaggagttcctgcgcagctttatcggcgagtatcgcggctactatgacagtcagccgcggctgcagaattccacggtgctgcagctggtcccactggagcgcgcccatttcgcccaaacgggcacctcgctcacccaggtgcacaactactacaagcacaaggtg

SEQ ID NO: 24551 - DNA, 1876 bp, DROSOPHILA
ggcatctggcaacgttggcctcgaacgtttcgttttcgataatcagaaagcgctgtcgtagctaaagtaaataaaggttatgataaaatagcaacaatttgggaaaaaccccatactcaggacagctggttctaacaatcaggtcgcgcttgtatttttgtggctcacgtcacacatacatgtattcgttttttcggccgctgtgacaaatggcaacgccactgcagctggacaagcacacaggcataaaatgtaattatttgttttcgtttcacgaatttcaaaggtaaaaaccgatcgcaatacgtggtgggcaagataacgcagcgacgcagacgacgagtgggactgtccggcggattggcggcagcgggatacggcggatacaacggcaataagatgcaccaggagcacatggacctgcatgagcccgtggacttgaacaagtccctggacgaaatgacgccggaggagcgaatgcgagcgcagcatcaactgatggtggagaaacatcgcggccacgatgccatgcactccgagatggtgatcattctgttcgtcaccctggttattgcccagatcatcctggtcgagtggaagaagcggcactacagatcctacgctttcgtcaccctgctggccatgtggctcattccgctgatcatctcctgcagcttcggctggctgcgcttcataatcatctggctggtgttcacctgcatcacggcactggttatgcgacgggccatcagcaagcccatccagggcacaacgcctaggctggtctacaagtggttctacttcatctacaagctcagctatggccttggcctggtgggctatctggtgatcatagccgcctttctgggcatgaattacatgttctcacagccaccaaacacatggatggatgtgggcctgatgttctgcttctacggcctgtacatcggcgtcctggggcgtgatatatccgagatatgttcggataagatggcggcagctattggctactacacacctcagggtattccaacacgacatcttgatcagaatgtctgcgcagtgtgtggcaatcagttgctggtctcggagaaggaagagggcgtcattgagaacacctacaagttgtcttgtaaccacgtattccacgagttctgtatacgtggttggtgcattgtgggcaagaagcagacgtgtccctactgcaaggaaaaggtcgatctccagaagatgttccgcaatccctgggagaagccgcacgttttgtacggtcgcctgctggattggattcgttggctggtggcctggcagccgctcatctttttcatagtacaaggcatcaactggatgctgggactggagtagatcctgataccggcactagctttcctcggcgtctagtcaagcacacacacttcggattaagtcctgcacatgaaaccacacggaaaacacgacgatggagaaacaacgacagaccaacctggaggggctgcgaaacacccgcaccactagtaccgtcgccgttcattcccccgctcccctccacgactccattacatgaacctgaaccatgatgacgatgacggatgaaagatctgtagacgaatgccattgccatccaatctgtttgcgggtttccagttctgtgtgtggtttgcttttgggcacccaaattttccttttccattggagtctttaatcgaaacgtaaatgcaattttggatatatgtatctatatctatatattatacgtagctatgtatttatgtacatatgtgtgcctgtgtgtatgcctcctaggtattattaccaattttattttcttgattttacttaattgcactcgagctggttaggaatatacatataccaa

SEQ ID NO: 24552 - protein, 321 aa, DROSOPHILA
MHQEHMDLHEPVDLNKSLDEMTPEERMRAQHQLMVEKHRGHDAMHSEMVIILFVTLVIAQIILVEWKKRHYRSYAFVTLLAMWLIPLIISCSFGWLRFIIIWLVFTCITALVMRRAISKPIQGTTPRLVYKWFYFIYKLSYGLGLVGYLVIIAAFLGMNYMFSQPPNTWMDVGLMFCFYGLYIGVLGRDISEICSDKMAAAIGYYTPQGIPTRHLDQNVCAVCGNQLLVSEKEEGVIENTYKLSCNHVFHEFCIRGWCIVGKKQTCPYCKEKVDLQKMFRNPWEKPHVLYGRLLDWIRWLVAWQPLIFFIVQGINWMLGLE

SEQ ID NO: 24553 - DNA, 2785 bp, DROSOPHILA
ttaatgacttaccacaccattcacagacaaaagttgatctccccttttcagaccaccatgcctgtcagccacgcctccaggtattattcgggatatatagatgggcgagttttgctccttgccccccattacattgaaacccaagcctgaaaaacaaaaattaaagattgataaagctttccatataagatgtataatagaaacatatattctcggtctatagacctttacaatcaaggtattggttttatgatataggggaatcccctcgattcttagctcataggggcgtgtcttaccctcctccgttttcgggagctcgacgactctgggatgagcgtgcccctcgctggctgcgaaggctgccacagtggccttggcagtggcggatgccctcacgtcgtgggagccctggatgtccaccgtctcgtagacgtgctcgtacacctcccgcacggaggtcatgaagtccgagttgagcaccttctgcagggcggccagttttgtcgtggggaagtcgccactcgcttgcagcttttccaagagctctatcgatcttttgacatctgaaagttagagcattgggtgtgagtttcctccaactgggaatggttagcatgcacccttacctctggacaaagtcagtggttctgcgttatcggccatattgctgttcaatttaataataatcagtcaaattgagctgacctgaaatattattcgagcagctgaaaataatatgaccatacgtctcaggggcacaaaataccattccgtgaaattatattctctatttgaaataatttggtttaataaaatagtaacaaaagttatattttttatatttaacaatatatcatatacttataatctaatctcagtacttttcgtttaaaaaattatcttttgaaacaaacaagtttcttgaaagtgtggtattttatgcacgtacatccatggtcatattattttatattgatattatttccgcaccgtatttatttaaactaacaatagaataatagcaaaatgagcctgccagctgcactattgcagcgcctgaagaagcgcggacttgtgaccaaacagtcgggtaaatacaaagaccagtatagaatccaaaaagaggataaccaacttcagctttccacaggagcagcaccgatttcagaagctatagaagagattatagccgagaactacgatgacgatgacaagagcggcccttacccgtacaaggaggacacatcgccggagcccaagcgcaggagcgtcgaggagaagttctggtcgcaccgcatcaaggagcggatcggcgtgaacgagtcctaccatggctacaagctgtgtcccaacaaatacaacatataccacaagtgctcgctgtactgcgtaaacaagttcaacagctcgccgctttcgcagcccagccataggtatctcaagcgctacaagagattgctgcggaagtatccactggaggcgggctggaaggatgtctacgataagggctgcaaggcgttttacttctataactcgaccacacagactgtttcgtggctacctccttcgcatcccaaagcacggatcaccaacagcgccgcagtgtttcgcagacaactggccaactccaacgatgagttcaacttcgataccaacatggttcagcccaagtcttctaaccaaaatgaacccgacgagcccgacgtattcgttcccgccaagaagcaaaagtccagggacctggaacgaaaaatccaacgacgtcgccgtaatgataactagcactactaactagccatttgacttatgagctgtagatcgctactgttcaaataaaaatgaataactatgatagatattaaggtttaaaaatgtacactctgctttattgaattgctagcttaagacaatgaatggtggagccgcgaacagatttaaatcgaaggaaccggaaattttacgaaagcagcaactcgataaaattgtgtcgcacgagtcgggaagtatgtgaaagttgaatttgaggcggcgattaaagccctcaacatgaggatgcggtggacacactttcaccaaactatgtgctatgtgtaaagtgttttaaccaagttatatatattggtgaaagatcaatacaattattttttttttgggtttatttcaaggttcgttttcccttaacaacaaccggtcggtttcgtatgtagcccttgcgacgcttagagttctgcaaagaatcagattgttaatgaagttcattgggagctgcagggtacactacctttctcgaaatgaagtttgctggaggaatcgttctctccttggtcttcagtgatggtctattgaactcatgcggcttcttcaccctatagatgcgaacaagccagtgttctgtggtgtaggcctcctccaggtaggtcagatcgaagtccttattcccaatgacggcgttacgtgtgcgatcatatccagatggacctctgaaacaggcagttagtgtgcatcgctacctgagagaaatgtttccgcttacctgtagtccaacttcaattccccgaatctgtagtagcttaatttgtacataaggcagttgagcagggccggagcaccttcggcatctaccctgaattcaccgcggtcggtaaagtaatcgctttccttaatgtccttgggatgctctccctcagcaattcggaccatccacaggaacttgttgatatcatcgccagaatagccgatcacaccgccaaagatcaccaaaacgtagtccacgtcaagagat

SEQ ID NO: 24554 - DNA, 725 bp, DROSOPHILA
atttaaactaacaatagaataatagcaaaatgagcctgccagctgcactattgcagcgcctgaagaagcgcggacttgtgaccaaacagtcgggagcagcaccgatttcagaagctatagaagagattatagccgagaactacgatgacgatgacaagagcggcccttacccgtacaaggaggacacatcgccggagcccaagcgcaggagcgtcgaggagaagttctggtcgcaccgcatcaaggagcggatcggcgtgaacgagtcctaccatggctacaagctgtgtcccaacaaatacaacatataccacaagtgctcgctgtactgcgtaaacaagttcaacagctcgccgctttcgcagcccagccataggtatctcaagcgctacaagagattgctgcggaagtatccactggaggcgggctggaaggatgtctacgataagggctgcaaggcgttttacttctataactcgaccacacagactgtttcgtggctacctccttcgcatcccaaagcacggatcaccaacagcgccgcagtgtttcgcagacaactggccaactccaacgatgagttcaacttcgataccaacatggttcagcccaagtcttctaaccaaaatgaacccgacgagcccgacgtattcgttcccgccaagaagcaaaagtccagggacctggaacgaaaaatccaacgacgtcgccgtaatgataactag

SEQ ID NO: 24555 - protein, 231 aa, DROSOPHILA
MSLPAALLQRLKKRGLVTKQSGAAPISEAIEEIIAENYDDDDKSGPYPYKEDTSPEPKRRSVEEKFWSHRIKERIGVNESYHGYKLCPNKYNIYHKCSLYCVNKFNSSPLSQPSHRYLKRYKRLLRKYPLEAGWKDVYDKGCKAFYFYNSTTQTVSWLPPSHPKARITNSAAVFRRQLANSNDEFNFDTNMVQPKSSNQNEPDEPDVFVPAKKQKSRDLERKIQRRRRNDN

SEQ ID NO: 24556 - DNA, 16687 bp, DROSOPHILA; identical to SEQ ID NO: 15943

SEQ ID NO: 24557 - DNA, 5897 bp, DROSOPHILA
cagtaccagtttgctcttcgtgcacagcacatcgaatatttgtgaagacggtattcaacgacgacgacgacgacaacaacaaattgtcttttttcgcgaacgaatagaaaaaagtggcaaagaatttgtttactagtgtgaaagcgagtgagtgcagtgcccacgggagaaaagtgaaaacaacacaaatacaggagtaaaaatcagccaaccgccaaactaacggtaactgcgtgtccttgctgtggattaaaaaggattctagaggcgtcttaaaaggctcgctggaaatcattgccggagaaattctagagctctttggaaccaactccaagctgtcgctggcgtagccaagtcccccaatccaagatgccggcggaaattaaaccatccgcgcccgctgagccggaaacgccgaccaagagcaaacccaagtccagctcatcctcgcacggaaagcctgccctagcacgagtcaccctgctggatggctcccttctggacgtgtccattgatcgcaaagccattggccgtgatgtgatcaactcaatctgcgccggtctgaacctcatcgaaaaggactactttggtctgacctatgagacgcccacagatccgcgcacttggctggatctggagaagccggtatccaagttcttccgcacggacacttggcctctcaccttcgccgtcaagttctatccgccggagccatcgcagctgaaggaggacatcacgcgctaccatttgtgcctgcaggtgcgcaatgacatcctggagggtcgactgccctgcacattcgtcacccacgctctgctcggatcctacttggtgcagtcggagatgggcgactacgatgcagaggaaatgcccaccagggcctacctgaaggacttcaagatcgctccaaatcagacggctgagttggaggataaggtcatggatcttcacaagacccacaagggacaatcgcccgccgaggctgagctacactacctggagaatgccaagaagctggccatgtacggcgtggacttgcatcccgctaaggattctgagggcgtggacatcatgctgggcgtttgtgcctccggtttgctcgtctaccgcgataaattgcgcatcaaccgctttgcctggcccaagattctgaagatctcctacaagcgccaccatttctacatcaagatccgaccgggtgaattcgagcagtacgaatccaccattggctttaagctggccaaccatcgtgccgccaagaaactgtggaaatcctgcgtggagcaccacaccttcttccgcctgatgacccccgaaccggtcagcaagtccaagatgttcccagtcttcgggtccacctatcgctacaagggtcgcactcaggccgagagcacgaacacacccgtggatcgtactcctccgaagttcaataggactctgtccggagctcgtctcacttccaggagcatggatgctctggccttggccgaaaaggaaaaggtggctaggaagagcagcaccctggatcatcggggagatcgcaatgccgatggcgatgcccacagccgcagtcccatcaagaacaagaaggagaaggatgctgataaggaggctaagttgcgtgagaagaaacaaaaggagaaggaggagaaggagcgaaaggagcgggagaagcgggagttggaggagaagaagaaggccgaaaaggctgccaaggcagcacttgccgctggtgccgctgcaggagcggctgttaatggcaatgacgagctgaatgattccaacaagtctgacaagtcctcaggcagacgtggcgttggcatattctcctcgggtcgcaagagcaagagcggttccccatccaaggatggcaaggataagtccggaaaggataaggacaaggaggtgggtcgacttggtctggtcgttacgtctggtctgggcgataatcagcaggatcaaaacctggacgaggcggctaggaatgcggctaagaaccgaggatccaccactcccggtgtcactaggcagtatgagtatgccgtggataatgatggcaataccagtcccacaaggaaatcatacacccctggtggcttccgttacgatcaggatcctaactctaggaaatccggtgccgatggccaggagcagctgtctcctacctcgcagcaaaaaaagattggtttggcctttaactatgctcctggtaacgagaacgccttgaaggaaacggctgagaagctgaaggcaggacagctgtctccacgcacccaagataagctgaaccgcggtcaattgtcgcccaagtcgcgggctaagctactccaggatccactcctctcgcccaccactcgtgctaagctccagggcagcgctgtggatgcggctgctgttcctctgagcgattcccagaagcgatcctactcgcccaccaagggaccccaaggctactcctctggagctccaggaagctacaagcccatctcagatcccacggctgatttcctggaatcacagcgctacaacaaagagcccggttacgttggtccctccaaagctgatgttgctgctggtcttgcaggtgctgctggctctaagaagcctggttctcccaccaagacaggaaagggagctccaggagctgctgctgcggcagcagctggagccgcaggagctgcagcagcagcggccaagccgaaaaagaggcgagtcaagatcatggtcatcacctccaaattcgatccttccaccaaacgcattgatgcggagaacggaagtattgagcactccaccggcattctagaccccgccaccggactcattgacaccaaatatggcgtgattgatcccaagaagggaacattggaggctctgaataccaagaccggaaagaaggaagtgttccagggcgatgttgatggcaagaccggcaatcttcatttggtatccggtgtggcggatccaaagaccggacgccttgacgacacccttggtcagatcgtttgcatcacaccccaggataatcctgtggtggagctaacagtgatcaccagtcgcattgatcctgcaaccggaaagattgacacagttaacggagatgttgagcgttccttgggcgtcctgaacttggataccggcctgctggataccaagtatggagagattaacacacgcaccggcgaacttaaggccattgatcccaagtctggcaagattgtagtcagcaagaacgtgaaagtggatccgggtactggccagatcactatcctgggcattgtggatcccaaaacgaacaagatcgatccgaaccaaggtcgcctcattgaggtgggccaacagattgacccaattgtggaggtcacttccttggcaggcaagttcgattccaagaggaacatcatcgatcccaagacggcgcaggtggagacctctggaggtcagttcgatccgaaggccggcaagattgataccaaatatggacagattgatctggttaagcatacgatcacgttcaatgacccgaaatcaggtaagacggttactagggacattaagattgaaccaaccaccggacagattgtgctgaagaaccaggtcaatccgaagaacaacaagcccgacaaggattatgccaggattatctctttgaggatcgtgcaacagcgcgtggatccggccactaaggcgcccatcactgaagtaagtgcctccaaggacaaggacatcgtggtggatcccaagtccaaccagatttgggtgcccactggagccaccgatcctgccaccaaggagcagcagtacatctccagcagcgtggaccccaagacgggatacgtcatcaccatctatggctacctggaccccaagaccaacgagatcaagaaacagaccaagctcgaccccaacacaatcaaaatcgaacccacgtccggaaagatatacactgccaccggggaggtggatcaggccaccggggagccgttgtatgcggccacccaggtggatcccgaatccggcgaggtctacaccaagctggcccgcgtcgatcccaagacgggcaagatcgtgatcgtgcgcatcctgcttatctcgaagaccgacgaacgtggtcgaccggaggagatcgatccctccacatgcgaaatcgatcccgtctccggccgcgttcttaagttcttcaataagaccgtttatgtttacaatatgattgatcctgtgaccggtgaaattgttcaggtggaccccaatgacccgcgtttcgctggcgcccgcaccacggtcacccacacgatgacgctgacaggagagattgatcccgtgaccggcaggattaagagcgagtatggcgacattgatccgaacacgggagatattgatcccgccacggctgtcacggatcccgtgaccggaaaactgatcctgaactatgcccagatcgatccctcccacttcggcaaacaggcgcaggtgcaaaccaccacggaaacggtacccatcacccgccagcagttcttcgacggagtcaagcacataagcaagggtgctctgcggcgggattccgagggcagctccgatgacgacatgaccgcacagtatggcgccgaccaggtcaatgagatcttgatcggcagtccggcgggacaggcgggtggcaagctgggcaagccagtgagcacgcccacggtggtgaagaccaccaccaaacaggtgctgaccaagaacatcgatggcgtgacccacaatgtggaagaggaggtgcgcaatctgggcaccggcgaggtcacctactctacgcaggaacacaaggctgatgctacacccaccgacctgagtggcgcctatgtcacggccaccgcagtcaccacccgcaccgccaccacgcacgaggatctgggcaagaacgccaagacggagcagctggaggagaagacggtggccaccacccgcacccacgatcccaacaagcagcagcagcgcgtcgttacccaggaggtgaagacgacggcgacggtcaccagtggggatcagtatcagaggagggatagcgtttcctcgaccagttccggcgattcgggcacgcccatcgacggaccctacgatggtgccagtgtggtgcgcacagataaccagaaatctccgctgtttacgacctccgccaccactggaccccatgtggaaagcacccgagtggttctcggtgaggacacacccggattctccggacatggcgaaatcatctccacccaaaccgtgagcagcaaaacccgcactgtggaaaccattacctacaaaaccgaacgcgatggcattgtggagacccgagtggaacagaagataaccattcagtccgatggagatccgatcgatcatgacaaagccttggccgaggcaatacaagaagcgacggccatgaatccggacatgacagtcgagaagattgaaattcagcagcaaacgcagtagattttataattatttttaaaccattcggatgattttctaagtaaacccgcacacacactcacacacatgaacaccagcccacgcatacgcagcacttgcagtacaccttttatacaacctatatctaaatataatttaaacaaatatatatatatatacacacgagtgtatatttgagctcgagctgatgacccacatgacataacactaagaaacataaaaagataaattcccaattatccgttaccgcaaccgtctacgagaaaatgcatctacatgtttattatttttattacaactgttgtttataattactttttattacgtatattatatattgaatgtgcaaggcaacgttgaaatgaaaactctatatattgtaaaccacgattgcattcaaatacaagaataaaacctaaatgtacacacac

SEQ ID NO: 24558 - protein, 1698 aa, DROSOPHILA
MPAEIKPSAPAEPETPTKSKPKSSSSSHGKPALARVTLLDGSLLDVSIDRKAIGRDVINSICAGLNLIEKDYFGLTYETPTDPRTWLDLEKPVSKFFRTDTWPLTFAVKFYPPEPSQLKEDITRYHLCLQVRNDILEGRLPCTFVTHALLGSYLVQSEMGDYDAEEMPTRAYLKDFKIAPNQTAELEDKVMDLHKTHKGQSPAEAELHYLENAKKLAMYGVDLHPAKDSEGVDIMLGVCASGLLVYRDKLRINRFAWPKILKISYKRHHFYIKIRPGEFEQYESTIGFKLANHRAAKKLWKSCVEHHTFFRLMTPEPVSKSKMFPVFGSTYRYKGRTQAESTNTPVDRTPPKFNRTLSGARLTSRSMDALALAEKEKVARKSSTLDHRGDRNADGDAHSRSPIKNKKEKDADKEAKLREKKQKEKEEKERKEREKRELEEKKKAEKAAKAALAAGAAAGAAVNGNDELNDSNKSDKSSGRRGVGIFSSGRKSKSGSPSKDGKDKSGKDKDKEVGRLGLVVTSGLGDNQQDQNLDEAARNAAKNRGSTTPGVTRQYEYAVDNDGNTSPTRKSYTPGGFRYDQDPNSRKSGADGQEQLSPTSQQKKIGLAFNYAPGNENALKETAEKLKAGQLSPRTQDKLNRGQLSPKSRAKLLQDPLLSPTTRAKLQGSAVDAAAVPLSDSQKRSYSPTKGPQGYSSGAPGSYKPISDPTADFLESQRYNKEPGYVGPSKADVAAGLAGAAGSKKPGSPTKTGKGAPGAAAAAAAGAAGAAAAAAKPKKRRVKIMVITSKFDPSTKRIDAENGSIEHSTGILDPATGLIDTKYGVIDPKKGTLEALNTKTGKKEVFQGDVDGKTGNLHLVSGVADPKTGRLDDTLGQIVCITPQDNPVVELTVITSRIDPATGKIDTVNGDVERSLGVLNLDTGLLDTKYGEINTRTGELKAIDPKSGKIVVSKNVKVDPGTGQITILGIVDPKTNKIDPNQGRLIEVGQQIDPIVEVTSLAGKFDSKRNIIDPKTAQVETSGGQFDPKAGKIDTKYGQIDLVKHTITFNDPKSGKTVTRDIKIEPTTGQIVLKNQVNPKNNKPDKDYARIISLRIVQQRVDPATKAPITEVSASKDKDIVVDPKSNQIWVPTGATDPATKEQQYISSSVDPKTGYVITIYGYLDPKTNEIKKQTKLDPNTIKIEPTSGKIYTATGEVDQATGEPLYAATQVDPESGEVYTKLARVDPKTGKIVIVRILLISKTDERGRPEEIDPSTCEIDPVSGRVLKFFNKTVYVYNMIDPVTGEIVQVDPNDPRFAGARTTVTHTMTLTGEIDPVTGRIKSEYGDIDPNTGDIDPATAVTDPVTGKLILNYAQIDPSHFGKQAQVQTTTETVPITRQQFFDGVKHISKGALRRDSEGSSDDDMTAQYGADQVNEILIGSPAGQAGGKLGKPVSTPTVVKTTTKQVLTKNIDGVTHNVEEEVRNLGTGEVTYSTQEHKADATPTDLSGAYVTATAVTTRTATTHEDLGKNAKTEQLEEKTVATTRTHDPNKQQQRVVTQEVKTTATVTSGDQYQRRDSVSSTSSGDSGTPIDGPYDGASVVRTDNQKSPLFTTSATTGPHVESTRVVLGEDTPGFSGHGEIISTQTVSSKTRTVETITYKTERDGIVETRVEQKITIQSDGDPIDHDKALAEAIQEATAMNPDMTVEKIEIQQQTQ

SEQ ID NO: 24559 - DNA, 2934 bp, DROSOPHILA
gctgactttggccataagacaaagccaacgtgcgtggccattaaattcaatttgaaggctaaacgctggccttgagccagcatcatcggactgaagaccaagaagcggagacatcttccgagatgtccgaggtgctgtcctgggccagctagctcataaatgattacacaggaagaaagcacagaccaaatcaattgaatagatcaagggaatctatatccagaggttatagtgagctctaaatatctagagtgattttctaatatgggcaaacaaaagtatctaagacttatttgccttcgaagttattagaaaatcaaaatacaatataatcgcttaattaagtgattaaatttaaacccgctcttatagatagttgtatgcgaagagttcttattcttttagatagggtttataccaccaccatgagtgatcaatttcctcagtgcaagaacactcctaagcaggacttttgctagacgcagtcggcaacaatttttacagcaatcatttacaataatgactgcatcgtgcatgggatcgcggcggtcattgtgccgcatgggtcacgttgtcggtcgtcggtcgtcggccaaagcccaccaaaaacgagccaatccgagccagaacccctgctccctgcgtcccgttgaccgatttgcggcggcaaaagcaatcttgatgcacgaatcgaaacaagtcgcgctgcagcggctcggctcggatctcgcttcggatgggatcggttcgagccaagtcgagtttgtggccataaagtaggccgttgactgcctgccttcgggcaggccaaagtcaaggactgagcctccttggccaaagcacattacatttgggcccaaatgactgagtgccaggcggagtgattaaaatgtttaaggccctggcgggcccattactttaattgtgacctgacgcaggcctattaaccaagatcccattctgaatccttcctcttcttgtatcagtttgcggtcgtcgcatgttccccgagccccgaatcgttggtggagctaatgcggcctttggacgctggccctggcagatctcgctgcgccagtggcgcacctccacctacctgcacaagtgcggagctgccctgctgaacgagaactgggcgatcacggcggcccattgcgtggataagtgagtaatccatggactaacccatagacccagtgctcatgagtgttactttcagtgtgccaccttccgatctcctgctgcgcctgggagagtatgatctggcggaggaggaggagccctacggctaccaggagcgacgagtgcagatcgtcgcctcgcatccgcagttcgatccgcgcaccttcgagtacgatctggccctgctcaggtgagttgtttgcccccctgtggtagttccaattaactacaacttccgactccgttctctggcaggttctacgagcccgtcatcttccagccgaacatcattcccgtttgcgttcccgacaacgatgagaacttcattggccagaccgccttcgtcaccggctggggccggctctatgaggatggacccctgcccagtgtgctgcaggaggttgccgtccccgtgatcaacaacaccatatgcgagtccatgtaccgatccgcgggctacatcgagcacataccgcacatattcatctgcgccggctggaagaagggcgggtacgactcctgcgaaggtgagtaaaagggccagatgctgtggacacctcggtaaaccaatgctgttgtcttccccaggcgattccggtggccccatggtgctgcagcgtgagtccgacaagcgtttccacctcggcggtgtcatatcgtggggcattggatgtgcggaggccaaccagcctggcgtttatacccgcatctcggaattccgggactggatcaaccagatcctgcagttctaggtcccgccccggcccgactcttagtgaatgcctagcacgtcttccccacacggcatcggaatccaactcagactcggactcgtgctccggttatggagggatcccatggagcatcagatcggccataacccgagcaacgattccagttgctacatttacctccacctgcccgcacagcaaccactgaccagacacttccattgtcgtaatcgtaatcttacacttagcgttgcctagcctagcctagcctaaactagttagtgaatgtgattaagcagagatcactgtgcagtcacggctcatgtaacgtattaaccgattggacggactcctaatttattcccatttgctgtacataattttctaaattattgcataacatttacacttagctttagtcctatacaacattaatttagggcactcgacgtcggtcgggtccttcggtagggcatcattatcacgtaagtcgcttccaaccgaatcgaaccatgcggcagaagctattgtaattttattttataacgtactgtaattatttatttatagcagctcatgcacaacaaaattaattctaataaaatgtttaaaacaaacaagttgtcgtgcgttttactaactgggggtttgatactaaatgaggcccttcaaggggctaaccacgaatttttatacatttaagtgaaagaatataatgtttattggcgtcattaaatgagaatattttttaggcctaacttgcaattagaatatctcttatatccccgacaagcgaatggcgatgttatatttagtttgccacgttatcgcagttttttaaaatcgtatatatatattttatggtttccgtattaaaaaataatctctatttatttagtcgctgcatgtaaacgatgccggttaagtcgttaaaaaatatattggaattggaggtacttcttcgaggtaagaacattttggatatattgacaaaatgagaaaatttataataatgaaatgt

SEQ ID NO: 24560 - DNA, 753 bp, DROSOPHILA
atgttccccgagccccgaatcgttggtggagctaatgcggcctttggacgctggccctggcagatctcgctgcgccagtggcgcacctccacctacctgcacaagtgcggagctgccctgctgaacgagaactgggcgatcacggcggcccattgcgtggataatgtgccaccttccgatctcctgctgcgcctgggagagtatgatctggcggaggaggaggagccctacggctaccaggagcgacgagtgcagatcgtcgcctcgcatccgcagttcgatccgcgcaccttcgagtacgatctggccctgctcaggttctacgagcccgtcatcttccagccgaacatcattcccgtttgcgttcccgacaacgatgagaacttcattggccagaccgccttcgtcaccggctggggccggctctatgaggatggacccctgcccagtgtgctgcaggaggttgccgtccccgtgatcaacaacaccatatgcgagtccatgtaccgatccgcgggctacatcgagcacataccgcacatattcatctgcgccggctggaagaagggcgggtacgactcctgcgaaggcgattccggtggccccatggtgctgcagcgtgagtccgacaagcgtttccacctcggcggtgtcatatcgtggggcattggatgtgcggaggccaaccagcctggcgtttatacccgcatctcggaattccgggactggatcaaccagatcctgcagttctag

SEQ ID NO: 24561 - protein, 250 aa, DROSOPHILA
MFPEPRIVGGANAAFGRWPWQISLRQWRTSTYLHKCGAALLNENWAITAAHCVDNVPPSDLLLRLGEYDLAEEEEPYGYQERRVQIVASHPQFDPRTFEYDLALLRFYEPVIFQPNIIPVCVPDNDENFIGQTAFVTGWGRLYEDGPLPSVLQEVAVPVINNTICESMYRSAGYIEHIPHIFICAGWKKGGYDSCEGDSGGPMVLQRESDKRFHLGGVISWGIGCAEANQPGVYTRISEFRDWINQILQF

SEQ ID NO: 24562 - DNA, 34712 bp, DROSOPHILA
tatcaacaaaacatcgataagagtcgcccaatcacatgcttctcacatcactaaccaagtgcaattcaatttaatccgttgcaaatacccgcgtattaatcatatttgttggactgcaggctgctgaaaagagctgctaaaaagagcagcccagccaaacgggcaccgccatgcggtaattttatcgcagacgagctgctagaggcgaactgcgcgcggtaagcgaaaaagagcgccaaaaggtgaacattcccatgcaaacactcgcacctaagcagaaacaacagtacaaaacccatgcaactaccctcgctgaaggacaagctcatgcccagcggcagcgtgcagcaagcgaaagcgaatttctcctggcaatcgctaacgcaactcttgagcggcctgtggcagcgcctctatttgccgcgttcgccgtttttggctctgccagcgccgcccctcgccacgcccccagctaatactacgcagcgccgcgcgaagaaagaggtaagacggctgaaaagccccaaacaagatatgaaaatgctcggcaaaacagatatctcgaaaatacggaaaacaagatatccaacaaaactgctacccgtctatgggatttgtggcacccatacagacgcagactcgagcgtgcgggtgcacagctgactacgcagcacgccgcgtcgcaagggctgtcgacctgctagcggacgaagaagtagaaaccaattcttggtttttacaccaataaactatttagccagcgctcaatacataccaatacctcataagaacgattttagatcttatataaaagtagaaaagttactttccaattcttgcttccagaagcaaggttttgtggaattttatcccttttattggttgtaggccattattattgagctgttttagtttttcctaagtgttttgtttggtactgttgttgtgcactcggcagctcttttccgccagattttttcaacactgtttagttggcgtgcacaacactgtctcccagacgtggtgaataaaataccaagtgacgtgaattgaaggaaaaaaagacgattttcaacgtaaacgcacactatttttcggtgtgtgtgaaaaggccaacaagcgttttcaacaacaagcagaagccaggatttacaggacaacaattgtggatatagcggcagcagcagctgctcaaaaggcaacaacaacggcagcgacagcgacgcttcggccaagcaacaacaacagtagcaaagcaaagccagcggagcgcatagcacaaaaatcaattttcgcgctcgtgaaaaatatcagcagcaaattgcaaggtatatgtgctaatggttagctaattaaaatgcgaaagtttgtggactctttcgttgcttttatttgtagtccgtttttccaatgcactcacacagagccacaatattgcaattagcttgagcgcccgcgtgtgcgagtgtgtatatgtgtatgtgggtgtgaatgtgtgcgtgtgcgtgccagctgtattccgtactgtactcacctctagatgggaacagctgaaaggggtggtgggtgatacagggctgttcccagtgctcacaccacccgttgacttacagttcataagtacatatgtgcatgcatatatgcgcatataggcagtagtatatagcctatagttaaaacttataggtctcctaatggtaccacagacccactgacaatgtgtgtacgttttcagatgcccagaacaaggagactccaccactcaagggatcgctcctcggcgggcacacgagacaagcgccgacgacacgatactgccgatcattcgccacccctagctgaggccccatcgccgtaagttcgccatcatctttgcattctccgatattcccatattctcggaattctctgcgagctatgtgaggaactactcagctacccattgtactcatggtctccattatttcactgcaggccgcgcatcaccaacacacatcacacaagatcggcggccaagcgaaggcgacacgagctcgatgccaagaaggcccagatatccaaggaacccacgtaagtaactcgcattatttgtcacttggcagactattctatcagagggtctaaaatagattcaagcgaagttgacatcgctttggaatcacatacccttcgggtaaaccctacaaggcgaatagtgctcagtcctcgtacaatcttgtacaataactgctttgaatgccaaagcgtttttgtggacaaatattcatctgacaacacgacgaaaccctctgcctggttacaaaaatcgattgcgacattcccaacgcatcgaaaatattttaagccctcaaaaaatttctctgattttgtgacagcattttcaaaagaatacaaattgttctttattgcgaaatcgatcgagtcaatcgatttcatactacagtatatggaagtgtctttgatcgtaatgcgtttggctgcataaaacgttgaactaatggtaccgttgctaatttttaattttatacaaaagacataacataaaagcagccttgaacaaggggaaaccttaagattgttggctctaaatttacttatctatttcgcactttccttgcatttaggagtgtaacttgcctgagtgcttaagagatggagggcatgacttaacatctgcctccacaacatggagtgaataaacaaacttccccggtgtgaaacctttcgaaaagtctcggctcgtaaactggctctgcctactgcaccacgggtatttcccccagctatcggagatgtggcaacaagagtgtcctgcccacgcagcgctccgcgctccttgggactcgctttctttgaatggcttgtaaacggccgtgtttttaatggtgtatggctccataaaaaagtgccgctcgggcagcaggagcagccagagagacaaattaacatttggccatatatggcaagtgaaatctgcgcgggttcctgccagctaagagtcatcctcttcagtcggcttactgtaaattaatgcggactcagcgatttctttgtgctgacccccttcgggaggacggtagacgtgggcgttgggtctccaccagatctggcggatcctggcgcattgtccgctgcatttcctcgccttaatttatgcgcctgcgtatttaaagcgtatttgcatattactcaaaacaacggataacttgaggcgcgacgttgtcgcatttattattgtttaatacacttggcgtggcctttttaggtagttgcaccaagagcatcttggggagttggcttaatcagagtcgcatttcgtaatttatacgccactagcagcgaccgctttctttgtcgataaagtgacgttttcatgcccgccagggtgctgccgttgctgtcattgtttattaaccttttgcatttgccataaaacacgctggctaagtgttcatgaaccacggcagcggcagattaatcgacctgtcccggctcattactcagaagttggtgacatcttgcaacgcggaagtggccgaaaaacgcagcccaaatatgaaaatcaaactcaacgatatggaatactattctcaaatgtgtattgcccacatttccgccatgctcttgttttattgtcgatcattttcgatttcaatcattttttatttaaattacaagccatcaattgggtgcacgcatggtgcggcgaattcgccgctgcctcgactgcgtcccgatcgtctgtccgtaagctggtaaactggaaatgcgagcagcgaagtcgagcggtagaggcggcagcgccggaggcagcggcggtacaaccgacacttgttcgctaccaacttgtcgctcggctgctcagtcgcaacgacaactcgaaagcgaatggaggtgctggcttcttcgctcgtcgccgtcgccgccgtgcaaccgccaccaagtgttttttgagagaaatgtataagcagctctatattgtttataagttttaacgaaatgcagtgtgtgcttctgaagcactgagctccccgtgtgttttgtgtgattttcgcgaattgtttatgcatcctggccaaaaataatacctcgcgcgcctacggaatttcaaatcagctcgaaaacagccccccaattattccaagaagtttcaatgctgtgcatacagagcttttagaggacagaagaaaatcagtggccagtgggaacaaaccttagccaacacgcgttaactaagccaagataagataactccgactgcgactgcgacgatgacgcctacgacttatcaagacgggctgcaccgaactgaacgaatgacttggaggaaccggacgtgccgatagtgcttttattgggcaagggatttcgcatttatttccgattccattactcatagcgtcacaaccagttgccgttcgtcggctgctgcctgctgttgacccgcttggctgtttgcctgtttggctgtttgactgtttggccgatcggggacccaagacttgcgtttccttttgcgaatcaggttaaaaaagtaaaaattgtgaaaactggtcggcggaggacctgttcgcagccgggtctttgagctcggcgcatgcgcagacactttctactaactacgaacaacgtgtatttggctcgttcagcaaattgcataaagccttaactggttgggatttgggggtcttatcaatgaacttgccagtggccggtagcctagtagctggggaccaattggatttgccacaggctaaatcgcagtcaaggttcagggttattttagtggctaattcaattgtggccctcgccgtgctgacaggccaaaagtggcttgctaaaacaaaaacgaaatgcggccagcaagaagtcgcacaaatgcagggggttttctgggtgatggatactgccgttggggtagcccactcataaaccatcgagaacgtgttaattacacgcgtttcgaacagccaaatcagcagcagaagcaacaacagcagctagcgccagcagacaagggaaaagtgttcgataaattattgaaactaaaggctgggccaaggtgttccatggaatctggctgactggtagccgtagcttacgtagtagtccgctcgcgacaagcgaagtgtgtgcacagcattgaaaattaattctcaaaattcaaacagctagcgatatacaaatgataacgataaagctaaagataagcgatcttccaagtgcacgcgtttaaagtaaacgttcagcggtttaaatttcaacgccaattctaaacgagatcacttgcaacaacaaggaaacaacagcattgccccgcagcaacatcagcaattacgaataattaaccaacgagcgagtctatttaacaacgaaataaaaatcataaaaagctaacaaaatgccagtcgttagtcaacaatatggaaatggctttcggccatacagctcctttcgagtgccgcgcggcagttgtggctacggcaacaacaacagcgttagcagcagcaacaacaaccccagcagcaacatgagcaacagtggccaaaaaggagcagcagctgcccaacccctgagcagtaatggagccaacagatcgatggtgaaatcgatgccgggcagaaacaacaacccggcagctggatcctcctccacatccgcagcctcgtcgacttcctccatccatcagcagggtgttgtgacgagtggcaattttgtacgccagcagccctggcggagcagttactgcagcagcaaccgccacaagttgcagcccgaacagcatccccaccatcagcagcagagactggtaagcggtggcagtgtgaagccactgacgcctaaactgatccgtcgcatcgagagcacttgctccaccgcagcgcccacacgccattgcaaggcgagggcgccactaccgtccactcaggctgcacgcccggtgaccacgcccagcactgccaggaaacagtatcagccagcaggctccgtatcagtatcatcacagcaaccgatgggaacccccaccagccagaagcgcacgtatcaggcgggacgaatggcagccaaggagaactgcccagctcgcgtgggtcagcgctccaccaagaactatccggcaccgcagccaccgctgcccccgcggaggcaggctgccaccaatgatctcaccaatgcaggaggagccggaaaggccactcctctggcccagcgtcgccagctgccggccacgcccaagctgagcatcaagcagcgcagcaacgggtgcacacacaatggagagggagctggctcctcgacgggctccagtgattcgcacgactctccgcgcctcaagaaggccttctcgaataagtttccgcagggattgccctttgaggaggagttttacggacgcaatcgctcctactcgcaatcgtccagcaactatagtttctacagttccgtgggtgcgcccacaacgcctcatgatgaagacgatgttggagatatggatgaaaaagtccatcgtgttcactgtgacgacgatgacgagttccagcgcaaaccgtccactgatgagtctctctatgtggacttctcgaaactagtgcagacccaccagcaacggcagtacgtgcctgccagctcctggataagggcctctccagatgaatgcgaattgctccgaagcaagcaaactagtcagctaacacctgcccagcagaggaggaagaacagcaagtacgcacgctcaatgcacgagtatctgtacagcgatgaccctggacaggccaggatcaagcatcggttgtccgtggtcgatgagccagaggatggatactacagctatgcggctggaacaccggatccgctgccctcaccgccgcccacgccccgaacggacatctatgtggccgctgcttcgtgggcacccaagccgctctaccccgaccgcgtgctgttgccaccagcggatggcaacaacaatcaccagaagcaacagccgcgtcgacggtccgagcacttggggtccacgacgtgtgagtataagtgagtgtctcttcagcatgcggaaactcgaatcagaaaactggagttagccttgagtggcagcacagcttgctgactaagcgttctgtccgcacttcatttaaaggcaccgagcacctcctcctcgcactgctctttgtttcatctccatcttgagctcaacccaactcaatctcgttctcgctgatttttgttttttgtttttattttgattttttttttttctgtatatttgttattgttggcgttgtgccgctacgattcggttcaagatctccccgccaaatttggtcaagcacaccgcccctacttatgagctgagccgccagttgcggcgttcaaatggcgagctccgtccagctcattaggcaacctaagcgccgggccgggccaactgcaaagcttttagcgttctaccctcaagtacgggacacacttaatttggttgagcgcctcactctagtccctttttcgtcgctttgttgacttttggggcccaagagttccgacctggttgttggccactttcccgtgttatatgattgtgttgtgcccattcgaaagaccagctgatgctcagattccaatgaaatctaagctctcatcaattaacacgttttagggaactaatttaatgtgaacctatgacgtttcagtcagtcgttcattttagaagatcgaatttcgtttaatcgtattcaaatgtatttaatagatttttatttagctagcaattagcaaatcaaatcagttcatactgctactaagacacatatttattttgagtaaagtagcaaaacggcggtaaactaagctttaacgactggccgttgaagttcttccttttttgaattcctgatgacttaattgccgcaaatagctcttcctgttgaaatatttttaggcaattatgtcagcagctggccaaatggaatcctcactttgtcaatgtaggtctccgcaccctgggacttttgattcgaaagggagttttgtgtattctgggcttctgtttcttgctcgggttcatttatctgacgtttatcacaatcggaacaaaccggacctgtctccgcagacccatatacgatcgcaatcgatgctgctaccgccggcggctggggtagccaactaaagctgacaacaaagcttagatcttgagcgtacagttctcgatcgatttccgacagcgcaaggcaggcctaatcgaaaaaaaaaaataacgccaacgatctgaaaacaaaagtgaataatggatgcaactctcagcgccgatttatatgtttgtttttgttttgtatttttaatgttttttattgacttcctataaagagtccgtcgaaaggtgattgactacgcaccgcaaaaacaaatacaaataacaaaaactcgcacccaaacaatgcagtatggggagatcttctagactcgatttaaattgcacacaaatttccatcgcttcctttttcgcagcgagtgtgtgtctgtgtgtacgtttgcgagcgggccgaaagcagggagacatttggcatatttaatttggcttgttgctgaattcgcttaactgttgtttgtttttgttaacagtaatggccggctcaatccgttcgagactgatggatggggttactgcgaggaaaacgcggcggcggcggcgatctcagtgcaaaatttcattacgttcattgaaccgggctatctctccctctttgccaacagattgaactgactcagacccagaccccgacactgggctgcctgcttgaacccgcccggcgtagcacttcctcccccggtggaggcagctgctctgctcctcctctttaactgacgcacaaaggcctgtccattgcttgcattccccatctcacttactgcccgaagtgccaattgatgttgttcgctgtttgcgcagacgcaaccagtgaccttgcaattggccaacgtcacctcgtcacttggccctcggcctgccggctcctccatgccctccgagatccgagatctgccacccaaatggatttgcataatcccgcagctgtgtttgggctgctaacatacttggcctcttactcattctttgttcataatatttctgtttttcatcagttatactcggcaatactcgtaacggcacttcttttgtcatttaaggctcgcgacagtcatttgcatttcacccagtggtcgaaaccccctacttttgccctcttggtagcttttagactctggggacaggtcgaaaattccggtttctcattatgtttcatttgaggacagagatacatgagtatagtaatggtttctgctttaatcaatgagcagccaaacgaaaccagagatacgccatatatatatttaatcatattcaagttctgtcgaccagggatggagttgaagtgtcaagtcgataaataggaagaaaagatagatgggtatttaaacatgccaaattaatgaattttaaatcacaattattccatatagggagtcgactttaagtgacggataaattgataaaaattttctgtttccggaagtgtcgagggaaaaatggtatacgttggcataaaacacgaaagatttgagctgtgtaaccttaaagtcatcaataccaaccattaaatagttcatgaaccaagaaagttcgccttggtctattgacataaacatgtgctacaagtcttcggtttattgatccgagttgttgaaattgttttggaaatgttttgattttatctcatctgatgaactgtctatcacaaagttgaatatttattgagctggcatgccataaatagttcacgaaccatgatggcaaaccttgaaccatccctagcatttcttggtctattcaactgctttcgggtattttgcgtgtgtaagcgcataaagccaaaatgacgcataacttctgcagttcattggaagcgggcattggaatccaattgttaacgcttttttattatatttatatttgtataatttgtttgagcgcaggagggggcggagggcagatcgcatatgtgcgctacgttttgcctaatgtatttatggcattttcagggtcagctcaaaaaataagctaaatacaacaaaacgaagaaaaatctctcgagccgcaacaaatgtttgtcggcggttggcggtgcaggcagatctggttggtgggtttaaagtgtctcagctgctctatgtaaatcatgacaaaaaaactggttttcgaatgattaatttcataattcaataacacggctggcttataagaaactattttcatgaggtttttattctcgttctcggaatggcaagcgagttgaagacttgcactcgcagtaggttattgttcttagcggatttcgtttcgactaatcttgcctactgaatctaaatgctaattgttgtcgcagattctttatcatcttggaagtggtaaggtgtacatgattcgtacaaattgctggccattaaggaagttggtcaagacaatggtgtttaatcgtagtcaattgcggtattcattgcgtgaatgggtgattttattacttgcgaacatgcatacaaatccaagttggcagaaagaatcggtcaaggtcgtcacagtcactccaggaactggtgtccacatgttgggaatgataaggccacaaatgggattggcttggccataaaactgttgcctcatctgtgtgcctgcgaaaagtcgaggccaacagagaaaaataacaatatatagaacccccgatgcgtctgagctggcaaaatcctcaagggcagatcgctgaatgaggaactctataaatatgggcgcgattgttcaattacctcacataaagcagtttagaataaagatatttccatccttgaaataatcagcaattcccgttgaagttctttgaagtgtgaatagcctcttttaacccctaccggcaaagcaactttgtttcagttcccctaatcatatcttatctcgattcccacaggctgtcgtaacttattggcacaccgggcaatatatcggtcgaattccgacgattacccgcagatcaacccctaagatacttcgtttcagagcttggctaccacaatgccatattttaaataactatttctcaagatatcttatcttgtggtcgcccatatcggagcttttctcgtttgacaactatcaaaccctttgtttacatctaccttaagcatgttcattgtagtcccgttgaacccattactcgtgttcttttaggtcagcgataatattttacgaggccttttattagtcaagctttcgacctgttcgactgccttgagtgaaatattaagccaattaccttacacaacgccgatctgaaatgctccagtccaaattgggaatctattatgaacttgctttgccattcgcttcctaccctcctacccctcccactctcttttgtttctcgaactcgaaatcggattctggatctgaatctgaatcggaatcggaatcaacgaatcattaatatccaattacagttggccataaaagctggtctaatttgcacgcagcgcgtcattaatcataaatcaaaatgccgaaagagctgggctaccatggagctgtattccttttattaactgccgcgaggccgtaagcggcttttccgcgacagacgccagtcagagatcacagatctcagataggttcaattcagttcgtgtattggccaagagtctttccagcctacagagctatccatcccagatgtacagagcgtgtgcgctcaagtagttttcttggcgggtgcgcaggcgttgagcttttgtcatatgcgatactaccacactatatgctatatacgtatggatgcaggtcggaactaacgaacgaacgaatcgtacttgtagcagccaatgttactttcagcttcatttcggttctgtgtttttcataatttgtgcccaaatttagacgctttttgggggccacgtgggcgagaagcagtgagcgcgcaaccgacaaaaattttcgtaatcgctcaatgagagctggttttgccttattagcatatgtggcggctggttgacttcttggatcttggatttggtagtagcttgcttgataggtcagttatctctcggcaatcagctgattcatgccaagatcgctgcccacccgcacttgtgcagctcgtcatctgtctgggccccttggcttcttgttttcttggggtgggtgtggtgagttgatgtaacatgagcatgaacatgagctctgcccgccaagctaccgatgttattgacacagtttctgggctcgatcgccgagtctagggtgctatgtcgctgggttcactcagaaactggcgattgcctcacattgtgtcattcctcgaaccatgaagtactctcaaaggcatttggccgacggtagaggtgggccgctgccaaccagatagccaacagtaacagtaccagctgaggtagccatccggccgagttgattaacttgattggtaacgcaaaaccgattcgccaacacacgtctcgcactaggtgccggctgcctggcttaagaatccggcggcaaggcgagcgtggagcggcttactcgctaagtagctgagaatctgagtggctggctggctgggtagctaagtagctttccatgttgtccacgccgctgggcgttgctccaaggacggccattcatctgctgtcgccgggtggttggttaggtaatacctcaagagatcgaactaaccggacacctttctttttgcagtttcgatgacagcatctcaacccgccgacgcaaggagcgttcgaagcgttcgcaccgcaagtcgcccgccgccagtcgacggcagcacaaataccgctacagggacgagacgtcccattcgagctcccgccggcggcaccgtgatcgcgccaaggacgaacgcgacagcggacgcaacaaccgccagtcgcaggctaaggtaaaaactttttattttatacacaccacaagtagcaaacaagtgaaaattgtaggcagggcaacgaaaaaaaaaggaaaccccaaagaaaattcacaaactgaaaacgaaagctaaaagcaaaacaaaatggtaaaagaacaaactaggcggacagatagataatacgaacacaccggaccgatctcatttaaccaccacctgcgttttccaatccttgtgctgccattgccaaaatctgtgccgtccgtctgatcagtgctagaagatcgcttccatcgactcctcccccatcatgctgttcttcaagcggtatcttgagaagtcccagcaggtggccgatcacttcgagagctcccagatcccgtgctacatcaagatgcgtgatctgccggcgccaccggtcgtggatcactgtcgcgatctgatcctgtccagctgttcactgcgttttatgccgtacacggatgattggatagtcgttgagtactttgtcgatcacgacagcgattatctagtaagcatgtatgttgtgctatcaatcgaacccacccacctccccttccccttctcctccttttgactaacctatcgttccttacttttgtgtgcgtcttgcagtacaccctattctcgagtggatcggtgaagtgatcagcgcgctatcatgatcgttcgccgctgcactcgatccctctctactttcttatctatgcggcgttgagttgagctaaatttgtcattagatgtgtcacattgctctggttcttggtcttctggtacagtgattacatgggaaagtcactgtaatcagtgtaactgaatatggaaataaatgcttcagggcttcaagaggcggagcacttgagtgagcagcatgagttgataagatagtacttgaaacaaagtaacttggttgggcaaggcctttaaactgtgtcgaaattcagaaacttagatgttacataattacaaataactattggttttgttattcaagtgtaggtttgaaaaaaaacagtagccactttaaatataatcaaaattttaagagataatcattttttaaaagcttagagcggaaactcggtttgagctgtattcatcagtaataaaatggtacttaaatagagcagttaagcgaaaccttggcaatattcatgtgcaaattaagcaatttctatgcgttcttcgtggcatctagctgtatgaaaaacagctctcaattaaacgagaactttatagttctcattcactgttggtggttctttatagctacccctgtgcccaacactccccgctgttctagttattttcgttcaattgatcatttgacattaactcgttgacggcggccagagttttctttgctgctctgagatgtgatgagatattgctattgctgctgcggatgatgcgaactgctcctcgccagcattgccagttgcccatgtcgccgccaattaagtgggctgagtaactcgcatagaattccctccgcgtcatcgtttagtccccaggccgccaagattcagtattttaagcagttggagcagcagctcatcatccggaatggggcgaatggctgtggcctggaaacatatctggaggaggatgcttcacccggtgacggagagagcgtggccattacccgctgcctgctgctaaaacggcaacgtaatcactttgatcttgtggccctcagcgatatgcctgtggacaagtacgccggcgacaattggatcatcgaggagtactttgtggaccacaatgacgactatctagtgagtcgtccccattccgagtcacagattgtcggcgaatatctttcgttttctcgtgatgcattgtcggtcctacaattttataggaacacaaccttttttcaaaaatattgtggaaaaaaatatgtacagtagtaattgtaatcctaacaaattcccttcgttgttttaaactaaaattgttagttataatctgtatatgtgatatatgtacacatgtcgattcaagtcaaatggtcgtccatatattattcgaatttctgcaaacacaaatgttaagtcttctggaaattttggcatgatttattggcaatgctactgctttgaccgccgctatatacaccgattttacacggtgcccactcactctccctgtctatatcatgcccccaaatacacacatgtttatgggctcccgagagcgacgccttggggattcctctccgcactgtgcgcatgttcgtctaaactacctatggcccatggcgcacagctgatacttctttctcggagatgcgcgcgcagcttcatccggcggaaaagcatctacttgccatttgctccgtggccattggaaaattataaatacacgcgccgccgaaagtctgcgctcttctcatctgcggccagttttcggctgagaattttcaaattcgaggaaaccgaaacagattgaaatctacgtttgttggctgtgtgtcgccgccactgctgccatataaaccatataaactacatattgtcgtcgcttcgtcttcgtcgtgtaacggtacgggtaccacggggatcccccgcacactcgctgtctctctctatccggtcagatccccccgatctctatattgatcgtctcctttcgcgcaatttgtttatcgatgtgtgtgtgtgcgtgtgtggtgtgtgtgcgtttcttgtgctttgaatattccttttctttttgtatttggctgagaaacaccaaataatcgaatagaacaataattagaggtacatacggagcgtatgtgcaatatagaaacgcatttcggaacgataggataggtagaacaattgctgggcaccgtgacataatcaagcgcaagaacaaaaaacaacccaaaacttagaacatttaagtgttttaaaaataaaacagtagcagtgcggcaagaacaaaattgtcgaaagcgaaaaaaacatcaaacaaaacactgagtgttaaaaaaaagtgcgcgatattcatcggactgtatttgtttaaacaaaacgcgatgcaagataccatagccaaactgttttattgaccccccgccaatggtggcgagtgtataattcggaataatatcaagtgggataccatccagcctgatgagcagctgtgaaacgtccaaaacgctgatagtgaactttgcacttctccaccaagtttgcaattagcgaggcgaaagatacttttaatagaaatagcgtatggggatggaggagactagtgcaacattcactcaatcgaatacacagatagaaatgaagatagtttaaaaacattttggactatggaatgatatatatcttcaaaccatatttctttgttaactatgttccaaaagtttaagggtcaacaagtaaaaacagtttagttactattgtgcttagataatatggtgaatatgttttctgtgtactcggagatgaaggcgaagaagacaacgcagcggccaagcaaatcaaaacaaaaactcaaaactaacaaatggagcacacacgtgtgtgtccgttagtgtgtgtgccacatagatacaaactatctatatgtgcgctacagatcggcgggattattcatcaggctgccacatcatcatcatgttgatctccgccgctccggcgtctccttccgctgccctccatcctccactttccgcttagctggcgttttctataattttcgaaagctattttcgtaaggcttgcatttatatttagttgccacaacaaacttatagcaaaaatccaagacacaaacttgtacatgattaaattttggccatatgatgatgccaaccaaaataaaagtcaactggggtggaaaacttttccccttcagattttccaactcgaatgtgtgtgctttcggtacagtgaaagctaagccagagctcagcaaagatcagaaaattaatggaaactcaaagtgaattaaaaaatccaatcagtcgaatgtgattatcagagatcagagatgcatcttccaaatgagagctgtcagttcaatttgcatggctgatcgaggtttcactgtactggcactagcgtcacacgtactgtgtactaggtataacgtcgtccatttgttaaaaataaaaacagatttcgaaccgaacacagaatggcagggaaagatgcccaatgaaccccaccgagatatcacacataggctaaaacgatctctccagggatattcacacatattccacacatcgcaatagatttagggcaaggtgcagatcttttggctagaatcgcaaaggggtagggggtttgctttttgatgaggcggcgccgcgatcaatgagctcattgctgtttacgatttgtaatttgtatatgtctctgctctatataccaaaacaaattgggggtgctatacatgcttgtacccatatatatgtcggatgtatatgggcgccaaaaagaagcagtctttggtcgaacggcgaccattgatacaattagtaagtcaagtcgtcgggcatttgccaaaatgccaatgagacattgacattgagcgtgcgatcgattgttccgatccgatctgatccgaatagaaccaatacgaaataatccgatgttgcgcaggtttcctttggggccaacattggcagcctcgcgagtcttgcccagctagtcgaacccaacgcaattcgagggagccgccagtgcaatattagataatcgagtaatttttccccttgggatccagaaagaaagctgacaatcaaccgaaaagttcaccacaccccttggaatgtccaacgaacttagcgaactgatcgcccttggctgtccagacctcgcggcgcaaaagccgcagggcggtagcacccaggtggagttgatcctcaatactgagcgccgcctgagcataaagcagatgacggccacggatttggccacacttagggcagcagcagccgcagaagcggaggccagatctcgagcacaggcggaggcggaagctctagcaattgcccaggaacagtttcgtcaggcccgcgaggccgagtccaaggccagagcacgtgctgccctcgaggtgcaggctcagctgcagcgggtgatggagagcgagaaacgcaggcaacaggaagaggaggaacggcgcatcaggcaacaggcagaggaggagcaggaggatgatgaagacgacgacaacgatgaggaagaggaactaaccaagggttcccttccaaccaattcaggtccaagagaacgcattgcttcgctaccctgcaacatagatgatgccatggagatgcaccttcttaacgtttcgcagccgaaggcctcttccaaagatgactcaccgcctaagaagagtacctctcacatagctgactcgattgagctgctgagaatgcagcgagctgctcgggatgcccgttcccacaatcgtagtcgagagcgttccatttcgccagatcgtaatcgcgaaaggagcgctgctccagatcgcctccagagttctgccagcatgagcagcttggactcggccagtgcatcggcatccagacaacctagcaaggcaggcagtcgacgtggtagcaccacgagtgccaccggtgtggaaccaccacttatggcagcacctccacagcctaccaaatttccactcactaagacggtgtcagcgcctaacatggaccggcggcggagcagtctgacatcactctttcctgggccatcgccattggtggcacccgaaccatctctgcacactaatcccgatccaagggttcaagaacagattgaagaggatcgtcgtcggcggcgaatggacgatggttaccgtgagatacccagtggaaaaatggtgcatcgaacgaagacaccgccaccagtgggcactaaccttggagtgagcctcaagcgggtgacagcgcccagtggatcgataaccatcaagcccaaggaatcgcccatgctgggagtcgtcctgcgtagagtggagaaaaaaactgtaccgcaaaagagcattctagacgacgataaaccactgtaccacttctccattgtgcgcagcgaccacaaggaacacgtgcctgctcagaaaccaaaacccaagcctgctcctccagctgctaaaccaagtcccggtggcatccttactggaccccaagtaattcgaaacgctcccaagcaacctgtgcccgtcaagccacagcgtcctatgcccggcgttcccatcactatcaccaagatcgagggcgacaagattatcatcatcaagaagatcattgtgcctaagaacagtaagataccggagcagtatctgcaggttggtcgtcgtcgtgttggtgatcgccttgtggtgtctgtagttcgtctggtgtttggtgtctccttcctcttgtgctttgttcgaaatctgttttatagaatttacctcgatggtaggaacacgttaatacacttgggaatagttatgggttgtaaaataaggaagtgcaatggtttgattgtgtaagatataacaataccataaataaacgcacacacacataacacacaaaaccgcgataaaggctgaatgaacgggttttgattgaaaactgattgcaaaacaagctgaatcaacggattcagttgaaatcggatcttttattcatagaacccaaaacggttcgcagtgcgcgattgtttcctatagatgagtgaagatgccggcaagccagcaaatacagtgccctcagcggtatcctcctccgcagccccatcgccaagcctaagaacaaaagaggaatcccagccagctatgcagaaacctacgccgccgccggccagtggccagcagttctttcaggtggtctccccgcagttcgcctctgtgctatcatccagcatcccggagagcaagtgtgcggtgcgttctcccatatcgtcgccactagcaatccggaagagtcgtccacctctgctgccgtcgagtccaaagtccactcctccactaccgcggaaacatcaccctttggcttacaacgcggcaactggaacaatcagcagtgcctctggagcagcgttgccttcccggttaatggccaccattgcctccagcccggcttctagtatatcgctgtcctcctgtagttcaccttcatcatctccaccaccgccagtaccatgtcgagctcctaagaatgccagtagacctgttgctgtgactgctgctccacctccatccacctcgaacgaaatcagtttggacaagttgctgcaacagcagcaggagctagaggagaaatccgcggcagccacaaacagcgcaaaaatggatgcaaacttctacgatgccgagattgagatgatgaacaagtatcttaagagtctgcctgactacagcgaactggacaggaagctgcaccaggagttccaggagtgcgaggatctctatgacaagatcaagcgtcagcagcagccgctggccaagtccaattcgcagcaatcggtcacgaaggcagtaggaccaggagtgcctgcgatctcctccggcttatcaaagtcttcttcaattaacttcgcccagaatcccagcagtcgtggagctgctccgcgtttggcctatccttcgatattttcccaggctgcaggcgaacccaagctgcagcgcagcatttcaagttctaatatgcctataagtgcacctaattcaatgcgtccgctgcccaccaagaatggcctgcaaagtggctccaatctgtcccttaacaaacagttgatgaacgaattctggagcgaaaatctaaccagttctcagaagcggcaaacacctaagcgaaccttttggaactacgagaagatctgcggtgcccagttgggcgatgcaggacaaccctttaaggtggatgcaaagactgccaaaaaattggctatatttgatcccacagttgcggaggccgctcagaaggagctgcagcgacctcagcagtcacaggtgccccaaaatcagccccacaaactgcagaaaaatgcatctttgtcgcacctggatctcaaggtgcgtcaggcggtgaccaaggacgatctctataagttgatctgcaacgagcaatcgccgttggcaggatcgaattttgtgagtagagtgcctgtgaagcagcaatttccagcacagcagcaacaggtgcttccaaagagcatgtccatgacgcatgtgccgggtggtggtcaacccatgggagctccattgctgcgaacttctagtcgaactcatatacccagctacatgaagaatctaccatctttgagcaggagcacatcaaactctgcaatactcatgacccaaccgcgaaaggaacctccaccaaaggaaccactgaaagctccagctccacttcctgccatagctgcaccgacggtgggcaaaccaagtggtgtcctaaagagctccagcagttcctgtgtcccctcaccgcgttgtgccgctgccttctttcgccgacctcaagaagctaacaatcctcagcagcaacatcaccagccacttcagaaaccgcagcaagtggcgccaattgaggaatccggacctggtgattccgcatctctggaacgaaaatcggagaagagcaatagcacgttaagcacaagcagctttacggtgaccaactgttgcaccacccacctgccgcagctctccaagttcacctcatcgttccatattgcccccaccacagcaacaaccacagccgctacagcaacgccgaccccaacaggagctgcaacaacaagcgatcagcagcaacaaagtggcggaacaccggcgatggtggctgccaatttggaggtgccaacatcgtcatcgtcatcagcggccacaaagcgccagaaagatgttgacaacaagctagaaaaatgcttgaacgacatgctaaagttgaagaccagcagcaacaacaacagcactagtaacagcaataataatgcaatcatgtcgcattcgctgacgggcgagcacaaagacccgaagactgcactcgaaggccccacgagcagcagcagcagcagcagcagcaagtacataggtgaatctcagatccccgtgccagttcagctgtacgatccgcagaagccgttgctgcagcaacagcagcagcaacaaaggatctgctatcccataggcaaatctaactctacctctcagctacccatgggcggctatcagcgattgctgcaacatcagcagcaacaacatcaccaacagcaacagcagcaacatcaggaacagcagcagtatccgcagcacaagcgacccttcctcaactggaatagctttgcatgttccgccatgaacggagcgagtgatcccttcatgcagcagcaacacatgcctgcccaccagcaacagcagcatctgccacacaagctgcagcaatcatactcctcgtctcatgtgcccaagcaggcgcccaaatcgggactggccatgtttctgcagaagaacaccaacaaggagaacaagtttggccagccgatgcagcagcagccacccggcatgatgccccagatgtatggataccaggcgccccagcagcaatccaagataggctatccccgcacaggtgccccactgacgcactcggcctccttcagctccgcccaaaggccgacggccctgcagttccaccagcaacatcagcagcagcagcatctgcagcaacagcagcaacacccccagcagcaacaacatcagcattccagctttggggtgggcatgatgagtaggaattactataatatgcccaagcagcccgagcgcaagccgctgcagacctttgatccgtatgcctatcccaagccgaatcagatgcagccggtcaagtaccagcagcagcaacagcatccgcatacgcagtttcagaatgcttccgctggaggaggcggtggcggtgctgctgggcttcaatacgatccaaatacaaatacgcaattgttttacgcgtcgccggcgtcatcgtcatcgaacaagcaaccgcaacaaccgcaacagcaacagcagcagcagcagtcccagctacaacaaagcaattctgtcatattcaatcactcgggccagcaacaccaaccacatcaacagcagcagaatgaaatgtccaagtccgcattggggctgcacttcatcgaggtagattctattcctccaatttatttctgtcttgttttcgtgctgcacatgtgtttgaaccaaaaatgcccactaacaacacgctgccgcttccaaagaaagtttgccccaaaatagctggctgactcatcgctgggctccaaaaggccgccgacgatgtgttttcccccccggtttctgtactttccctcgctttgctaatttctgttggttggcccccaagtttgtacttcctgtactcttggtggcgtttcaagtgtgaagcgttcccaagagcagaggcacttattgcttacctccaaccttagaatatcggtccccttggcgtctacaccgatctcttggcctcttggcaggctcttgcacttgtcgacatcgacaacattgcacaatcgagcaaagactgcgggaaaattcaatgtcaattttcctcagctctattaatagtggctgacagcttaatttatgtttgtttacacgatttcagcgcttaaaaaatcttttgcatatttgctaactgcctacatgaattttatgcgttgatctttaacaattttatggccgaattgcgattccgatgtaattgttttaataattaaaaaacactaaacaacacggagcgcgttcagcagaatcgaatttctaaaaatatgtaatactcacgacctgctctcgcgctctccgacaaaaatgactgatcgatgcgacgactgactcgactacaagatacccctttccaatcaaaacctcatgatcatcacccaaccttcccttttacattgatataacatttttcgcatctttgaacccttatgcttaaatagtgttttgcttccagagcaacatgaatatggttcaatataccctagtatattttcgtacttgatctgcagactccttagcctttagtttttggcttctttcggtcgcagcaaataataatagcaacgggaagaagaggcgcacactcagctcagcagctctcccgcggatcttacggatggtgctccgtgctcggtgttctcgacatcgccgatattttcaatctttataattagtatttgtggcgtgcgctttcgttcatgttgcgctgatttcggtttgtttgtttcgaccaatgctcaggcaatcggcggtcggtgaaggaaacgcgctgtgaaaactgtctgggaaattggaagcggagctcgtaacattggatggctctaagtgcgtgaagtgaatggaaatggatgcatctaaagtgcagttttgatggaacctcgagtccacgtcgaaattgtcgcagtggcgggggcgaccagcgtctcttgtctctgttgtgtgtgtctatttccgtcgaagctgccgaatctcttacaatttcaattatttttacacataaatacgctctgtctatactagatctctacgtacatatattgccactccgagaacgtgtacaatacttttctattttattcgtctacaacaaaatcatgctcccaacaaataccagaaatcagtacaattaatgaaatagaccaagtcggaggagcacgatccgtatcggccaaaaattcagacggcggcccacccacccaacaaccgcaaccaagcccctaagaggcgttaagtattagccgattgtcgtcatcgtcatcgcgggcgagacccacgcgaaatctgccgcggcgaggaggatatccgacatccgaaaaaactaaggaatggccacatttctgaatcgttttcatcgcgaaaaaagcgaaaagatattgccagcgacgacggttgccgaaaatgggaaaacagctgacgccgaagcggtacaacagcagcagcagcagcagcgtccgcagcggcggtacatgcgaagcgccaccgccgccagcgtaacgcagctgctctccgagagctgcaacagtctgctgcagcgattccgacgcaatccaagcgaacgacctgataacaaacaacaactgcagcagcagcagcagcaacgcaattggtaatcgatgcaaaggaaatgaagcaaaagatttataatttatttttaattttgcgtgccttttttttttactttcgtcgcctttcgtcaagcgaaaaactcggtcaaaacgcgcaatgctcattgctttcctttccctctattttcactgcgagtgaaatgaaaatgtattctctgtgccgctggcgctgatttaagcagagtggtcagcgcgtaattgcgagtttagttgcagcgcgtcattccgccgcggtcgaaagtatctcgcgatcggatcattttattcgcatcgcatcggatcgtttcgttttgtatattgcatttcccaccgccttttggccatcgcaaagaaggccaattatgtaaacggtcccaagtgcgagtgcgttttaaatcgctttgaactcgcatctgaacttccagtagtgcgacgatctcgaaaagtgtgaaaatcttgctgccataaatcgtgaataattgccattgaaaagatacgagttgaaatttgatttatcacgtgttattgccagtcataaatcaaacagagcttaacggagctcttaaatcagtgtgatatgcactggatacccctaattgtcagtctaaagagccaataaatgctcgttgatcaataatttgaaagtgaaatttacgagagtgggccaagatttggctgagagtggaaatctgattttttgctatcttccagcatgtccataaaaacctcgaaatgttagatataatgatttacgcagtctaacttttgttaaagttcaatatttctgccaaaaactgttggttgcacaaaaaagcttgagtttccctcgagctttcacagctgtccgaattctgcgagtgaagaatccgagtggttctcttcagcagattctgaaattcctcaaatctctcttcagctgtcttcggggaataccaaataaatactcaagtccaaactgtggatgtctggcaaattcttcctcattacgcatgattataaagtatgaagcgaatctctctttttcgctgctctttgtttaactgcaattgcccctttattatttatatgtgcgggcatgtttaaaataaaacgtaaatgtttcgctttgttctttttatttctttccgcgctcgaccagcagcaattttattgttcttcttgttgactggttgttttgtcggcgagagttcaaggctttttctgcgaagactttcgatcatttcccatgttttgctgctaaactgacggaaatgtaattacactgctacggcttacaaagcgaaatgcatttcgatgaagcgtgcccagctggcggacaaaagaagcatccccattcgaagcggatcgcatccaatctactatccaatccacccactcgtctacatatgttatttgggtgttcgcccgctctcgctcgcacgcggtagcgacctctcgctctggcaagtgcgcaatattttcacacttttcacaaaaataaaaacgattcctcaatattttctggctaccgccgacaccgccaccgccgccgccgcatcattatttccttcatctacttcgttcttcgcatctgccgcctctttctttcgtcgtcgcacgaattttccgaaaaattttccccagttttcctcagttaaattttggtccgtgtcgtggcagcgcgtcccgtccgtcgttcgtcgcgaaccgcgtggatcaacgcatccagaccgacaaagaagaaccgaatatatcctcaccagaactcattgttttgttgggcttctcttttaagtgcggcagcaatagccgaggatcacaaagactcgaccccaacgaatgacagcaataataacaataataagggaaaaggtggatccagtagccaggcccagaagcagagcaaacgtcgccgcagctcggacaaatcctcggccagccggagacatccggacggcgatagggaacgggaacgagaacgggacaaggaacgagaacgggatcggcaacaggacaaggaacgcgaaatggcagatcgccacagacgctactatgcgagcggaggactcggcagcaccacaggactgggctaccatcccagcagcagcgggagcaccagtaccgctgccctgatgggtcgctaccagaagagctccaccacagccaacgccctggacagactgcgcacccacctgagtcccgtgggcggctactacaagccattaattagaggagtgggaggcggcaggcgtgaccgcgacctagacgatgttagtatcttcgaaacccataagtgaatcaaaagcgagcggtgtggaaaccaacggtgtagaccactttcaagacccaagacccagaccgagatcccaaaagcgatcccatgactcacagtcggggtatttaattttggaaaaagcgaaagaaatcatctcacctgtcgcccgtgagtcagcaagtcacttgccctaaatgtgtgacatgtctgactggcggtcaggaaatgaggaaatatgcgcaattaaagcgttatagtgtatagtatatgcgtgtttggccaaacagtattgcaccaactattgctacccctattgccacatagacggctatagaaagtttcttcctacacagaagatatatgtgcagatattatattaggggcccacacgggcgcgttttatagcgcttctatatgctcattctatatcttcagcttcattcttgccgtgtgcgtttacgttgtcgaatttattttcgattccaacatctcgtcgcttttctctattccgttatatttgtattagtatctctctgtacgctgcagatgtgtataaagctattcacgattttctgccgctttatatataaactttgaaggtcgtcgcgccgtggacttttttgtttagattctgctaggcattctaaataaaaataaagggtatctcctcagcccacctctctgaaaatccgaaaatacatggagaaagccaaatccggatagagtggctctaatgttagtgaaattgtgcgaaatgaaaaggcccaagcacaccccataattagtcattgccgaaaaggccatttaaatgggtctaagtctaggtctgggtttgggtttcggtttctgggccttcttctttcgtggagcgtagagtaaagagttttacgcccgtcaccgttggtttcacacgagcgcagctcttgagcactttccttctccattaaatctgtgaatccgaaactgaatcttaatcccaatccccctgaatcgtatgattcctcagcgaagagatctgctcttggacaaagacagaacgcccaccacctcagcgctttcctcaggaggcaagcagtcggccatttcccggctggagaacaaatactctgatatcttggaacgagcggctggcaggcggcgccatgaagaggatcgcgacaagaccctggagccggatgactatggtgccagtggtagtggcggattgctccgctcggccactgcccatcagctggcgaaatctaagttgtcctccagctcctttaatgcttcggatcgcaaggagcgcactccataccgaactcgagcgcagaggcaaaggtatatggccgagtccaatgacagcggctatctgaccagcggcaatcgactgctcgacgagaactacccagtggactatggtcagcgatacgactatcacgacgccctacgcctaggaggagcatcaggatatccttcaagtcgctacggccgaagaggtggcgaagaagaagcgctctctcctcgctccacaagagcgtatggaagaaccaaaaccgttgaaagtctactggctgctgagatccaagacagcggtcgaaatgcagctggacccgccgaggatcgaccattgaactcacggaatcgctttgctcatcgacgtaaggagcagcccccagaagaactgaccgctgaagagcgtgaaattcttgccgacgatcggtcttcggaggacaatgcagccattctgatgctgctccgagaggacaatcagttcctggaggcgaaaaagttcgaggagcgcatgcgcaaacgccgtgagcttagggatcgcgtcaagcgcatagaggaagcggctgaggaggccaagaagactgaagcggcagtagcggcagcagaagccgaggcagctgctctcgagcaggaggccaaaaaggccaaggaggcagccgcagcagctgcaattgcggcatcaactgctgctgcaacatcatcagcaactgcagccacactggcaacgccacaggaggcgcccaagaagaagtcgcgcagcaaaaaagtaactagagacggtagcgattgcagtggctcctccgagagcacctcgggcagtagctcatccgatgaggcggaaacagaaaccgagacggattcggctgcgcccggtgtgcaactaacccacacagcagacacaaccccacagacatcgttcccgtctgtaaatggcaccaccaccaccagctcctccatctccaccaccaccccctcaaatacagccaccacctcatccactagcacttctgctctttctaaccacacaacggcaacagcgacggcactctcctccggcaccaccaacaagagccgctttctgccccactcagatcgcaacaacaatgacctcgccaagtacaagcctagcagccagctaatgcactcctccagctccggggcactagccttcggtggcattggggcgcgccttgcggcagcagatgctcggcgtcagcagcagcggtatcagggcgccagctcacgtaccgccgcggtgctgagcgagttcgatcgctacaagccattgggatcgggaacgggctccggatcgagctacctccatgactcatacagcgggagtagtaggcgatccaatgccctgggaggcagctcgttgtatccgcagcgatcccaactggatgcctaccagcagcagtaccagcagtcgtcctcctacctgcagcacgatcactaccagctggccaagagcgccacctcgtcggccctgttcaacaggtctcgcattccaaagacactctcgacctttgtaagcaataagccatcacgaccatcctggcggatgggtgattcattagcagcttgagctttgttgccgccgcctcttctaactgcaactgcaattgtccattgaccctgatccccgatcccgaaccatccccccccccccccaaatcacaaggccttatatcctaaactttctcctagacaatcgacctactacagaaaaagctaacagcaatgcggattgtaatccatgttatcttacttatacaatgttgatcctgcctgattcttttgcatgtgattttgaaactgggataaaaaacgtaagaatccctttacctcgacttttacaacgaatagaaaacaaccttatttgttcttttaccatttaacatttacaatatattgccaaacagctattaatgttattactaagcagcaagcattcgatggtttgttgttttttcattgcccaagaaacaagagcacagctattgatgcatttcctatttatataaatatatatataccattttcgatatatacctatttgccattatatttgatattgtttgtacatgttttgatattaaccatttttgtaaacacaaatttcaaaaatttgtccgaactaattttcttatcgaacaaacgaaacgtatttttctcgtgttttttctgaatatgatgatgaaaatcacaatgatgatgatgggttgatgatgatgatgtacatacacaacttgatggggatgatgaaatgatgatgatgatgatgttggttggtttacgggctatctgcggctgaattttaaacggaatgcgattgctttggtgccaacgtgggatccggatcgttcgtcgtttggatggtgcgcttttgattgctttgacctgatgaccaacaacccgtggatccgatcaaacccctggatatatatatttttgtttcttttttctctttcttttttgtttctttttctctctttcaaattacatactttaccacacacgcacacacgcaccttatgtgtacgtctgtaaactgccatcgacaaccacccaacgcccccaacttctcgctcgcaaattctccgctcgccgtttcgctcgcctgcaaaccaccttctttcaacggatcgaatgcaccacccgcaacgaaacgcaatcgcaatcgtcgccacacaccgcaaaacaccaccaccacccccaacccctgcgacatcggcaacgccaacggcaaccactgcaacgtcgtcgctccgctccaatccgattcgatcgaaccgaacagacagcaaagcccgtcattcaagatgatgctgatggtcacttaatttaccacaccggagacattctccatcacagatgttcgtgacaatttttggttttttatttttccatacttatgtttagaaaacaatcagaaaactcttttgaaaaacacataaatacttgaaaaagaaagaaaaaataatgataggcaaaagccaccccaccagtcacacctttctctcctcttcttgtaactctattttcgtttaaaatatttccaagttttcattattatttcttaattatctcacagcaagaccaaaccgcgtcgcgtgcaatcgggaaattaagaagattaaacaaaaaagaaagatagaaggacaaagcaacaattgaaaattttcacacaattttcgtcactttcgcgaaaatattttgaacttccgaatatgtctttgatggctctaagattaacttttaccggcaacaaaattcaactgggaagttttcacacacaaaccgaacacgaacttgtcgcataattaacgaataatattgaaattacaaaccctttccgtacacactcagcttagttcaaattagtattttgcccagcccccatcaaatacttagctacagctacaggtttagctttagaacaagaaaatcaaccagacagctaactttttaacactatttatggacttgtccgaaatcctactacaactcgctatcctttccccgaatttcagataagatcatggccacactgggcgagggaacttttggacgtgtggtcaaggtcaaagatatggagcggtaagaatttccatacaagaaataaaatattaagtactttaaccgcccttttatcgttttagtgattactgcatggctttaaagattattaagaacgtggaaaagtaccgcgaagctgccaagctggaaataaatgctttggaaaagattgcccaaaaggatccgcattgtgatcagtaagtttctaaatatgcaacttgctctttcatctaatctaattcttattatctttcttgctccttcagtttgtgcgtcaaaatgattgactggtttgattatcatggacacatgtgtatagtttttgaaatgttggggctcagtgttttcgattttttggtgagtggattactgaaacagaaatggacgattaatactttaatcgttttttttttttacagcgagagaacaactatgagccatacccgctggaccaagtgcgccatatggcctatcaattatgctactctgtgaaatttctacatgacaatcgtttaacgcacacagatctcaagccggagaacatactcttcgtcgactcggattatacttctcactataatcataagattgtaagtagagacaagcagctaaaaatatgcaaatatccttatactattgtattttacagaaccgcgaggtgcgccgcgtcaagaatacggacgttcgcctaatcgacttcgggtcggccaccttcgaccacgagcaccacagcacaattgtctcgacgcgacattaccgcgcgccagaggtcatactggagctggggtggtcacagccgtgtgacgtttggtccattgggtaagaaacggcttggcattgcaaatatgcgcatatattaaatgatcgacgaaatttcgcctacaggtgcatcttgttcgaactgtatctgggaatcacgctcttccaaacgcacgacaatcgcgaacacttggccatgatggagcgaatcttgggacaaataccatatcgcatggcacggtaatacaatgcagctcatgcttttatttccaaaggcgcagttcccttcaccgaaatcgtttaacgtgtagcaatcatactctttatagcaaaaccaaaacaaagtacttctatcatggtaagttagattgggatgagaagtccagtgcgggtcgctacgtccgtgatcactgcaagccgttgttcctgtgccagctgagcgacagcgaggaccactgtgagctcttcagtctgatcaagaagatgctggagtacgagccgtcgtcacgcatcacgttaggtaaactgccgcccacttgttggttgattccaatgctaaatatatctatttttgctttgtttcaggtgaggccctgcatcatccgttctttgataggctgccaccacaccatcgagtaggtgaggtcagcaacaagcagcccctttcgtcgggcagcagcagccgcgaacgatcgcatagcctctccagatgagaattacagcgatttggttattgttgacagacagcgctaattaagtactcactcatgcaaacatacactcaaggcagtcgtccagcaacgtcttgcacccgactcgtagagtagaccagcaactttacgacgaaccctattttaagagcaaaagtcttattttaaatttttgaacttgacttgtatagatgtttattatacaaaaatccattgatcccttttgatcctttgtttccaaatacttcgagcacatgttgctgtgcattatatttagagctgtgtagcgccatgctgcgcttgtgcattgtaccatacccgccaacagtgtttgttctgtaatgataaccaaatcgtgtatattattgaaagtgcggtgcgtcttcccgacaccagaacctaattgtaaatgtcttgcattgtgcacaccccaaggtggaggagactaattgaaccgactgcaaaccgataattggaatatacaaatgtagttgtaaaataagaaagtcgcttaagcgctagttggaatgcatccccatgtctacacctgtcactgaaccgggagccgactaatttgtaattaatgcaccatttcgagagcgtgaactgaaagctaatgcaagccattatgtacaccgcccacgaatgtacggattattgtaaatgtaaagagcaattgttatgccaccatgtgtacacttcagcgatcgcagcgcattttgtgtaaattcagtagcagccccagagtcatctctcttagaatacgttttcaaatgtgtagaaccgttgccggcctgttttgttcgttttcgtttacaaccgaatatcgaaagatcaacccatttacacattgctacacacaaagtataattgaatatacttatacatacttaattcaaatgattgtgagttagtttaatattacataaatattaattataaattacattatttgcaatttaacccgatcaaccagcatataagataaaaaccaatattgtca

SEQ ID NO: 24563 - DNA, 1864 bp, DROSOPHILA
cacaacactgtctcccagacgtggtgaataaaataccaagtgacgtgaattgaaggaaaaaaagacgattttcaacgtaaacgcacactatttttcggtgtgtgtgaaaaggccaacaagcgttttcaacaacaagcagaagccaggatttacaggacaacaattgtggatatagcggcagcagcagctgctcaaaaggcaacaacaacggcagcgacagcgacgcttcggccaagcaacaacaacagtagcaaagcaaagccagcggagcgcatagcacaaaaatcaattttcgcgctcgtgaaaaatatcagcagcaaattgcaagatgcccagaacaaggagactccaccactcaagggatcgctcctcggcgggcacacgagacaagcgccgacgacacgatactgccgatcattcgccacccctagctgaggccccatcgccgccgcgcatcaccaacacacatcacacaagatcggcggccaagcgaaggcgacacgagctcgatgccaagaaggcccagatatccaaggaacccactttcgatgacagcatctcaacccgccgacgcaaggagcgttcgaagcgttcgcaccgcaagtcgcccgccgccagtcgacggcagcacaaataccgctacagggacgagacgtcccattcgagctcccgccggcggcaccgtgatcgcgccaaggacgaacgcgacagcggacgcaacaaccgccagtcgcaggctaagacagcaaagcccgtcattcaagatgatgctgatggtcacttaatttaccacaccggagacattctccatcacagatataagatcatggccacactgggcgagggaacttttggacgtgtggtcaaggtcaaagatatggagcgtgattactgcatggctttaaagattattaagaacgtggaaaagtaccgcgaagctgccaagctggaaataaatgctttggaaaagattgcccaaaaggatccgcattgtgatcatttgtgcgtcaaaatgattgactggtttgattatcatggacacatgtgtatagtttttgaaatgttggggctcagtgttttcgattttttgcgagagaacaactatgagccatacccgctggaccaagtgcgccatatggcctatcaattatgctactctgtgaaatttctacatgacaatcgtttaacgcacacagatctcaagccggagaacatactcttcgtcgactcggattatacttctcactataatcataagattaaccgcgaggtgcgccgcgtcaagaatacggacgttcgcctaatcgacttcgggtcggccaccttcgaccacgagcaccacagcacaattgtctcgacgcgacattaccgcgcgccagaggtcatactggagctggggtggtcacagccgtgtgacgtttggtccattgggtgcatcttgttcgaactgtatctgggaatcacgctcttccaaacgcacgacaatcgcgaacacttggccatgatggagcgaatcttgggacaaataccatatcgcatggcacgcaaaaccaaaacaaagtacttctatcatggtaagttagattgggatgagaagtccagtgcgggtcgctacgtccgtgatcactgcaagccgttgttcctgtgccagctgagcgacagcgaggaccactgtgagctcttcagtctgatcaagaagatgctggagtacgagccgtcgtcacgcatcacgttaggtgaggccctgcatcatccgttctttgataggctgccaccacaccatcgagtaggtgaggtcagcaacaagcagcccctttcgtcgggcagcagcagccgcgaacgatcgcatagcctctccagatga

SEQ ID NO: 24564 - protein, 511 aa, DROSOPHILA; identical to SEQ ID NO: 1848

SEQ ID NO: 24565 - DNA, 3232 bp, DROSOPHILA
agagccgcacccattccgacagcgagacgcccgggggaaaacatataacggagcttaggtgatggaaatttgtttccattcgtttttcttttttttccttttttcctttttgggatgttgttgccttggaggcgttgaaggcggaggtggaggtgcttcgtgtttgtccatggagcgctgtgacagtcattatggcgtcgcttgtcttggcatggtcggtcaccagtgtccacaacagtggtgtccgttgcccaacccgtccaacaacactttcccattgcccgttgcccatcgccaattccagcgacaacgcccacatggcccaaaaccctctggccaccctcatctaccaacccccttcttttccaaaacccaatccgctgcagttggcagtcgccgcagcaattggacagacaaatatttacttcagaagtttttcttttaagcagtgcgcaaaagccctcccacacccgctttctttccatttttatacatatatatatttttttccatgcttcgcattttaaattaaaaatacggaaaaaacactacggctctcacgcacactccggcagcgaagaaaaaattcttattaccgccttctgcgaagttggagcggcggcaggaggatgaagctgcgagaaggatttgggatggaatgggatggacatgggcttcggtggcccgaggtctcctggcgaaacagaaaagaaattaaggcaaaaattgagtaggttgaaatttgtgtacccgttctttcggttcgctcaagccgcaaagaaatgctgcccaccaccccatcccgttgggttgcttcctccccgccatcgccttcatcatcgcgtccagtttgtgtgttttaaaaaagcgaaaaaaaaaaaaaatcttttcttcttcgacagcaaaaaaaaataagaatggtggatggtggagcagggcgggcgccgaggttgaagaatccttcgaataaatgaaagaattttttctgctgtagatgcaaatggcaggcgccggaaacggaactactggccaagaggatggggtgcagcaccgtcagaggacggctatatatgagtgggtggggtcggttgtggttgcgctgctcatcaacgccatgaagactctgcgcccaaaaaaccccccaccgccaccaccatcaacaacccatatttatttatttaaaaagaaaaaagtacataacaaattttcgcaacttcttcccggcgctttcttggacctttttttccgtgtccagcgcactttattaaaaacaacaagtacaaaggaaagagggctgaagaaattaagaaggaaccaaagagttcggctcagaaaatttaaataaattgcggcaagggaaaggcaagggttggaaggaaggtgcgcgacgatgagaaaccgaaggcgacccaatcacaatccgcctccttggcacaatttttttcgctccgtgcagaattttccttgtttttaattacgacaacgacagagcacagagcgctctaatggccgtgagggcacacccggacttgggactccggacagcggacaacggacagcggactacggactacggactacggacttctccggactgtccgggtcttatgtaaagcaatacacaaacacacacacacacacacagagagagagaccctgaaaaaaaggctgcgtggcaaagtcttggcaaggaagttgaagaaaaaaattggcattgggcaggtatacatatatacgtatgtatccaagaactgctaccccaaaaaaacaaaaaaacaggcggaaaaatcaaaggaagaggagcaaagaaaaatcactgccccttgcctggttttgataatctcccactgcaaattccaattaaaaactcttcatgtgctaaagtcaaatcaaagagatagagctcagaacagggcgggcgatatccctccatatcccacccatttgtattgaaattctaacgcaattagtgcatgaaaataaagcgccaatgctgcgtatgagtgatatatagcttaaatgctacaatggctagttcagctcggttcgctacatctcagctcagttcagctctctgggcaacaaaacgagaacgagaacgaggacgagaatgaggaccaagaacaggaccacgaccagtcaggcataattgaaaagcgagaccggctgacaagcagagtaacaagcagcacgtggagcagcaaaaaaaaaaatgtggcatcaaatggctagtgaacacaagcatcgcacaaaatgcaggggatggatgaaatgcaaaaaaaaaattgatcaaagaggccaaatctgtctaaaccataaacgaacaagcttcgatccacatcaatggcatataaatgcaaaggagaagacgttccatgaacgttaattactacgatgattatacaaatccatctttttactcatcattttgaaataattaagaaaaataaattatatgcgaaattccaaattgttttgctgaattttagaaaaaagaagtatgcatttaaaatatgtattaatatttgcaccacattttgaatattttaaaatcttctatttaaacacttttaaatacttctatcagttcttttattttctacatataataatccccgttttccttacaatttcactactttttcctcgcaaaaagagctaccttcttgaaaggtttccccccacattcaaccccaaattcatcagcaatctggatgtcttaagcccttcctaccgttcaacattgagggtacagtcccatccaacggttctagttaacaattaccgagccccagaaaaatcgataattactaatgtaactaaatacaattaaaagcaggaccgaaaaaaaaaaattacacatacacatagaaggggaaaatcgcgggcattttcatgcagagacaaatgagcggaagaagcagcaaaaacaacagcagccgaggctagaaaaaaaaaaatcggaaaatgcgcttacttacagcccagttggcaaatgggcaacccaggatgctgcctaccatatacccatccccgcataccatttccacaacccgtggaccgcttttcctggttttccgcggactatcaaagacaatggcgggcccattcaagggtttagaatttcaccatttgcatttttttccctcgactcccaaatgccaaccccctacttccatccgattttgctgttcagtaatttcatttcatttaccattttttttttttttta

SEQ ID NO: 24566 - DNA, 522 bp, DROSOPHILA
atggcaggcgccggaaacggaactactggccaagaggatggggtgcagcaccgtcagaggacggctatatatgagtgggtggggtcggttgtggttgcgctgctcatcaacgccatgaagactctgcgcccaaaaaaccccccaccgccaccaccatcaacaacccatatttatttatttaaaaagaaaaaagtacataacaaattttcgcaacttcttcccggcgctttcttggacctttttttccagcgctctaatggccgtgagggcacacccggacttgggactccggacagcggacaacggacagcggactacggactacggactacggacttctccggactgtccgggtcttatctctctgggcaacaaaacgagaacgagaacgaggacgagaatgaggaccaagaacaggaccacgaccagtcaggcataattgaaaagcgagaccggctgacaagcagagtaacaagcagcacgtggagcagcaaaaaaaaaaatgtggcatcaaatggctag

SEQ ID NO: 24567 - protein, 173 aa, DROSOPHILA
MAGAGNGTTGQEDGVQHRQRTAIYEWVGSVVVALLINAMKTLRPKNPPPPPPSTTHIYLFKKKKVHNKFSQLLPGAFLDLFFQRSNGREGTPGLGTPDSGQRTADYGLRTTDFSGLSGSYLSGQQNENENEDENEDQEQDHDQSGIIEKRDRLTSRVTSSTWSSKKKNVASNG

SEQ ID NO: 24568 - DNA, 9617 bp, DROSOPHILA
agagtggccgtaacggtaacttgctgcacacggaatacgcgaggtgtgcttgagagattccaaaataataccacaaatacattatactacctacgtgtgcactgtaaatgatttttaaagaattcttcggaaaagatctatgattatctattcattgtggcgctatcaagtagaacaaattaagccgcatataatatatattgcgatattaatgttgctgaccccatgaatagtattatatttttatataacttttcttgatccgagttcttatcagggtaaatgtagccatctgaaactgcctggggcgaaataaaacacactttcattatttttcacaattttcttgcttgcaaaactaaactttatccttaagtttgcctttattagatctttattttgaatagcaattcaatgtttttaaaactaatcaattgcaatttgtcgtctgtttgcgtttctattcaaacagcaattgcaacagtttctctactcgactgctttggattttatttcatttaatgaataatgttttcgttttaagttttctcttttttgtgtttgcgattttatttacaaaaaggcatgtcaaagatatatgaataaggatgtgcgttgcaaataaaattgaataagtgggtcgtcgatctaaaacatgaaatttgcaaccaaaatatttgtatcgaagttgtggacaatttgtatacgattcactgaggatctagaccaattttcacggattttcttattttctaaacaatttaggctctgctatcttctatcccgctgcactcttcgtactcgtattactattttattgaaaatacaatattaataatatatcattattctcataagaagcacaatttatgttgttttagtttttatttcatcattttatgcgtttacatttcagtgttttgaacattttttgccgtacatttttcagaattttgttgtttaacattttcagcgcatggtttataatttactctcatttatcatttatggtttgcgtttttataatttgtttgttttgttttttatttgttaacactagacactagataacctataaaaatggttgttttgtttatagttctttatggaaaacatgacaatgaatacaagaaactttacaaaacagtaaacacgctggaaaagttgttgaccgatgaaaaagggggcggggccaaggggcaaatagactatatgtgagaattggtcttggacgcacgcacgcatagttgaactaaaagtagcaatacttagcttaaatgtagcgtataaaaatagtattttcttattattgtttttttttcttgtttctctcatttcagatagactttcaataaaacgaattgagaacactaatttgtattttaaacttaggctgcgttttttttatatgtatatgtaggtatcaattaactgcgatgcatacgttattaatgcatctattttatacttcttccgcgtttgcctcatctctttgacttctgctttctggtctagctagcattgggttcttagtgaatttattaagtgtttaaatgagcattttaaattggtttgactgagacaacttccggctgttcgattgctgacgttgctgatgagattaaaaatgagacacatagtcgatcgacaagctccgcggcctatcgtctctttttgcatggaatgaacgttgtcaaacgaataaacaatcggaaattcgtgtttagtctatatttataaagtagagcaaacagggcgcatatgtttcttgacttttcatcgtaaacttaacaagcgaacagaaaaaatgttacaacatgcattttatgatttttttttttatgttgtatattattatcttttattacaaatacttcggcgctggcgctaattatacaaaaaatttcggcgaaatcaatagctaacataatatattactcttattgtgggtttttgaattgcgctacatgaaatcaaatatacgcttcactatttataaatgtaatgtataaaaatttgtttccatctcttaagtttctggtattgtttctcgttatacgcatacagcgcagaaatacattacaaagcttttgctatggcattatgtatgatgtaatttgtttgggggcgggaaggagaacatggatggggatagggataagggtggcctgaggtaatggtgttaggcaaacaatttgattgcaagtgaaatttgaaaactattttgaagcaaaccgattaatttaacataagaatgaggcgtgatcgtacttcttggtgtttctgtagatatagttgcttgtgtgattgtggcgtatggtgtggttcttgtgaggagtgttggctaaaatttatcctgaaatatgaagaggttattggtcgcagccacggcgatgatattttcttcggggtgccaggcggtgtgcaggatcttcttgttgaaatctagacagtccacgctgatctcatccttctttcgtttgccgccagtgcaaactttccgtggcttaagcaccgttttcggtttgatgatgtccctggacgcctctagcgtcacatcctttttcgagttgcgatcgaagacgcggaagaagttgttgtagcttccggtcattattgagctgtccttgccgttccaacagcactcgaacttgtcgaagatgcagtcattctcgtacagcgagcacagcttggcgcgcaggtattcatgaacctgtaaaaaataacaatgaaattagtatggctctcagaaaaaatcagatgtgcttcaaaaattctgcagatacctctacctttgagaaacacattattttaagtaataactaaccggataggtctcaatgggctttgtttccatatgcagatcccacactttgatgctcaagtaatccctggagatcatgtagcgacccgagttgcttagcttcacatcgctgatggagctgattatttcgctgaaaaagctgcgattcgttggattctcgggctcctcgaactgtttgctgtgccggtcgcatagcgccgccgaacgcatatcacataatcgtattgtgcccttagagctcgagtagacaaacacattgcactcggtcggatggaattcggccgcggtgatcacctctgttagctcctccatgttggttggcttgatgtcgacaatgttgtagctctggttgaccacctccaagtgccacagattgatccgcaggtcgtcggccgacaagaaggtctcctgatccgaattaacgcttattgaattgatgtgataggtgtgtgcattggcgaaggtgcgccgtggggaggcctccaccagcagtggtatctgcttcacggatggcactcggagggccgttacattctgtggatcccggatcagtccgttctcctccttcgtgttgtagccgccgaacgacttgtcacgctcactgaccttccacaatttgactgtcttgtcgttggtcgagagcagaaagtgcacgggattcttttgttgcagccaccggatcttgtttatcttctcctcaatctccagggacttgaggtagtcgaattcgggctcgtgcgattggaatgtcgaatagacattgtattcgccgcgtctcggattggcggcttttgaggcaggatcacgctgcaatagtttcatgatatattaaataatgttacgtttgcataaaatatatttcactcacctgaaagatgacgacgcgaccgcccttgtcaccagtggccagcagctcgccatcgtgattgaattccacgcaggatatgatgtctgcatccgtgacatcatcgtctagggcgcctttaatctgtgagaagcaccaagacgcctctccattacctgaaaagacagagcacgaccaaatgatgagtattcaatttgacactttcggccagctggagttcgatccactgaatggcaattcgattggacaactaactgaaaaggctagcggctcatgaaaccaagtgtaacgtttgatttgcttccgagcccatacatgttcaaaggaacatacatagatggtaagcggaaggacaaccaactatgacgacggtatcctcggcctgcccaaatatttgctaatgacgccatactcggccttccgcgccggtctgcctgcctttaaagtcctttaatctcttggccaaatattcctctttccgttttcttgtctagctgctttcagcccacaaccacgccccttttccatcgctctttttttttttttttgccattctctctctccgcacagccacttttagcgattgcggtacgttgtgtaaacgatgacgttgctgctgtcctccttattcgaaaaccccactttatacactgatattccataatgggagcatttcatttggaaaatgagttttccttttcactgacagtgggatgcatgatggtgtttattttttaatttatgaacatttttaattttttaatcaatatcgaagtaaactggtattaaaagcaataatctataaataaaatgcctccggcatcattataaatttcatgaagataatacataaaatgtttgtcatgcccactgtactccatttcgttttgtatctgccatttgctttttgttttttaggcccccatgtctgggggctgtgtgcgaattttggcaattttttcatcattcccaaatattcattgggctttgtttgtttgatttctttggcacagcccttgcccagcccagtcccatgtgctgtgacctcattatccgctggctattggcagtctgttggcattttcctgctgccattgacgacgtcacaatgcgattgacgaggcgcagcaattgtacatatttatgccgactgtttttattccgagtgtgcagggtatcagcaccgtaataggatcaaaggcactcagtcgtccaattagtcagtcataactcacgtctcgcggcactgcgactatttatagttgctattatatgtggcagcttcgcaaacgcccccgcaaacctaacaaactaccatttagagatgttgagtcattgaactcgtcgtaaatgcacaaatgaaaacaaaagtgttgaatcgatgatgagcaatttaattgtgtaacgtccgaaaattagtaaataaatcatattactgcataacgagattcctttaaagaaaatcgtataaattaggctatgccaatatattaccacatatgattgcgaaacaactcattagttcttacggcaccaataaaaaaataattttagcattttcactgggaagtatatgggaaagaacaagacaatctgtaaaattgctcttgctcgcttatttattcgttagatcgtatataaacgtacataacgagataagtagattttcatgagcgcccgcaaaatggaacaaaataatgaaactcaaatattgacacaattatttaacacaaccacgcgatgtcgctgctaagccaaagctttagcgctctatccccccacctactattatactctgctataccatactatctacctatctatctacaatatcacggttttagtctatatacgctatagggcgggacaactgaacgacctagagaatggcggaacggactgttcggctgacaaacacagaaggcaaggtaaatatatagcgggtgagtggtgaacggggcacatccggcagggaaatccttttttattttggcagccccttggataagttgtttcctcaaaggaaacatggctgaaccactgagcgagcaattaagaatgttggttaggaatcattaatgagcaaggtatttggggaatgcgcacaacaaaattcaaatgcttctttgaaacattttcgctatttatcaaattcggccagtttcacctattgtttatattgtcaagtctagcaaagaaactgaatagtacaggccccacctaatcgataattgattggttgtttagttatgatctcagcttgtttggcttcttgggcacttcaagtgtgcattgcaaattgagcacaaaagagccttaacgttcgtctctgtagcacctcgccagttccgccccccgtcaattaccatatccaatctaatctaagacacacatcaatctgcccctccttacttaaccctctcgaaatcttcgcatttctcatgactagaacatcaaaacttatgtaatgtcttgtttggcgacattttgttgttcaacttctggagacgtgcaggccattaggagatgtccatgtccacttgtgcgtatcttgcagatacacagagactgcatatgaaattgccaaataattttgcatacatcgcaaagaagcaacgaaaaaagtctataaacctgagcgacgtcacgttgtctgaaaatatgcttggggaaattgaataaaatagagggggtgggtggatggggtttcctttggtccattgcgactttaactcaatttgcacatggcaaaaaaaccacgatccagtttcgagcgctctatatctattgaccgagccaatttgtacgccgcattctcagcactttgtgcaattgtttattatttaattatggcaattgtttgtctgtatcgagcatgtgcttgaaatcaattttatactcttgcaaaaagtcctttaaatattagaaaagtatccttatataaaatggggtttactcaaattaaagaatgtacaatacaaaaacaataaaggaatcttttaaaacaattaactcaattgtagcagttttatctgtttactaagtttaccgtactctgtatagatcttcttatcggatgcatactgttgtagcgattcgtgcttaacctttacgagttgctatagttgctcgttttttttttttttgtaatagataatgcaattgggggcgccggctcagttttagtttaaaaaaaatattttaggggctgcgggggcctgtcaatttaacttttgcatgccgctcacgtcgctttcggcgttttgttcaagtgcaaagatcaatgctagttgatagggaaaagttgttattcgaatgcgttcgagactagtttgtttacttctcactgaatttgtttattggcgcatttaatgccaacatcaaaatgatcagaaaagcgaaaatagatcgaggaaatgccaaaacatacgtaaaatacacttgcaatttggccttgtaagctctttattatgtcgaaaaaaactcgaactagaaattcaattatttatataaaaaagagtattttaagaaaataaaatcaaaacgatcacatccacgaaatcacaaacctacaaccaacctcacaatactccactgtagggtattacaaaaaagttggcagttcccacacaaaaagcgagtgacgaacgcgaagagcagcagagaaaaaggaggagagaaggagaagagcatcggcaagggagaggaaagaattaaacttaccggccatgttttaccgaacagtttgcgtcgattttaaggagccgcagctaaaacaacaacaacagcactagaagcaacgaaaaacggagcgacaacaaaaataacaagaacaaaaggagaaggccaaaggagctgcgctcgcgctctctagctccgtctctttctcacgggggtggtgttgttgttgtagctgccgattttaaagtttcaaaaagttgagcgcgattattacacttcttcttctacgctcttttcactaattcgtttgattacactttggttttccgttgttgtttatgcatttgattcttttgttaattgtgtatttttttgtgtgttagcacgacttaagcatgtagaggggaagaaagaactgcaaaagtaggggaaattattttttttgttcccgacgacgacgtcggcgacggcagcgcagcggcagaattttggcgtgcgttttatacgtgcatttgtgcgtgcgtgtgtgtgtgtgcgagcgagcgaaaggaagagagcgagtgcagccggtggttgtgagcgaatacaaaaaaaattacttcacacagataaacgagatatttgccagttaatctacaattattattatttattgcattttgccaaacaaatgcgaaatacaaataaacacacacacacactgaggcagacacacgtttgcgccgcttgctttgtctctttgttttatcgcgaattccgagcaaaaaatatatgcgaaatctaaccttcaaaatgagaacactaaatagtggcgatgccttgttactttacgcctgcgagtaaaaaccgcgtgatcgaaaaagggataagcatgcaatttcccattttttactacccaataaacgcaggcaaaaatcaaatgttgccgaaaataagacgtccaaaaaaagcttctgttttctgattctgtttccgattcacattctgcgcgctgcctcttcttcccgtttttgccgcctcttttgctgcactgcttcgtcgttgcgtcgtaatattaatatgaatgcgagtgagtgtggcttttgcttttgcacaagcggcattccgcctcgattttcgctatagcacgcacttttgcactatttacacggctaccgaaccactcccgcacgctccgctcgcttttttaaattggttagtgactaacggattgcgataaatccaacgcaaaatggaagtataaattttgttgcaaatttcgcactttacaataagagttccaagctaccgaattgccgctgtgcgaacggcgttgcatttgcccagtgttgggcagtataccgaggcgttggtgttgcaaagtactcgcgactaacagcagactgttggcgccaatgttattggtaacggtggtttggcgggcacttcgaattgttaaatgtttaaataaactcgccttttccaaagcataatataattcctattgttgataccgtttgggcaagttcattgaaagcaataattgatcatatttgttgataacatttttattaccgcctgaccatggtctattttttataccccaaaatatattaagttaacatgcatgtggaaaaacttaaaaatatgatactgcattgacttacttgctggcttcttggctccattgatgttgatggccgtgttgagcatgttgccgattttcgtgatgctcgactgtcgcataaacgtccttggcggcagagtgggcggcgggggcgtcgtctgcatctgtgggtccggcggctccagcaccggactctgccgtccccagcgacccattgggtactggatttcccgtggacgcggttaagaatgggctggtccaagacgaacgtgatccgagcgatgatctgcaggcaaattgaacggtcgaatctattagcgtgttggatgcacacacaccggttgtatgattgtataatgcatgtttgcatgaatctccgacttcgtcgcatgagcgggctgcgtgtttttgaatttgtcggccaattaacacctgtcgcacaacgactagtcccctgcccacacccctcggcacctaccccctcgctcttgaccaaacaaatgggttgtgcaaatgaatcgtctcctgtcatttgtttactttaggaattacgcctgcgtgcaaaacagaacaaaacatctgctttcggtttgaattaaattccgccgccttcgtgtttaataaatttaaggtttcttttc

SEQ ID NO: 24569 - DNA, 3157 bp, DROSOPHILA
aaatttatacttccattttgcgttggatttatcgcaatccgttagtcactaaccaatttaaaaaagcgagcggagcgtgcgggagtggttcggtagccgtgtaaatagtgcaaaattctttcttcccctctacatgcttaagtcgtgctaacacacaaaaaaatacacaattaacaaaagaatcaaatgcataaacaacaacggaaaaccaaagtgtaatcaaacgaattagtgaaaagagcgtagaagaagaagtgtaataatcgcgctcaactttttgaaactttaaaatcggcagctacaacaacaacaccacccccgtgagaaagagacggagctagagagcgcgagcgcagctcctttggccttctccttttgttcttgttatttttgttgtcgctccgtttttcgttgcttctagtgctgttgttgttgttttagctgcggctccttaaaatcgacgcaaactgttcggtaaaacatggccggtaatggagaggcgtcttggtgcttctcacagattaaaggcgccctagacgatgatgtcacggatgcagacatcatatcctgcgtggaattcaatcacgatggcgagctgctggccactggtgacaagggcggtcgcgtcgtcatctttcagcgtgatcctgcctcaaaagccgccaatccgagacgcggcgaatacaatgtctattcgacattccaatcgcacgagcccgaattcgactacctcaagtccctggagattgaggagaagataaacaagatccggtggctgcaacaaaagaatcccgtgcactttctgctctcgaccaacgacaagacagtcaaattgtggaaggtcagtgagcgtgacaagtcgttcggcggctacaacacgaaggaggagaacggactgatccgggatccacagaatgtaacggccctccgagtgccatccgtgaagcagataccactgctggtggaggcctccccacggcgcaccttcgccaatgcacacacctatcacatcaattcaataagcgttaattcggatcaggagaccttcttgtcggccgacgacctgcggatcaatctgtggcacttggaggtggtcaaccagagctacaacattgtcgacatcaagccaaccaacatggaggagctaacagaggtgatcaccgcggccgaattccatccgaccgagtgcaatgtgtttgtctactcgagctctaagggcacaatacgattatgtgatatgcgttcggcggcgctatgcgaccggcacagcaaacagttcgaggagcccgagaatccaacgaatcgcagctttttcagcgaaataatcagctccatcagcgatgtgaagctaagcaactcgggtcgctacatgatctccagggattacttgagcatcaaagtgtgggatctgcatatggaaacaaagcccattgagacctatccggttcatgaatacctgcgcgccaagctgtgctcgctgtacgagaatgactgcatcttcgacaagttcgagtgctgttggaacggcaaggacagctcaataatgaccggaagctacaacaacttcttccgcgtcttcgatcgcaactcgaaaaaggatgtgacgctagaggcgtccagggacatcatcaaaccgaaaacggtgcttaagccacggaaagtttgcactggcggcaaacgaaagaaggatgagatcagcgtggactgtctagatttcaacaagaagatcctgcacaccgcctggcaccccgaagaaaatatcatcgccgtggctgcgaccaataacctcttcatatttcaggataaattttagccaacactcctcacaagaaccacaccatacgccacaatcacacaagcaactatatctacagaaacaccaagaagtacgatcacgcctcattcttatgttaaattaatcggtttgcttcaaaatagttttcaaatttcacttgcaatcaaattgtttgcctaacaccattacctcaggccacccttatccctatccccatccatgttctccttcccgcccccaaacaaattacatcatacataatgccatagcaaaagctttgtaatgtatttctgcgctgtatgcgtataacgagaaacaataccagaaacttaagagatggaaacaaatttttatacattacatttataaatagtgaagcgtatatttgatttcatgtagcgcaattcaaaaacccacaataagagtaatatattatgttagctattgatttcgccgaaattttttgtataattagcgccagcgccgaagtatttgtaataaaagataataatatacaacataaaaaaaaaaatcataaaatgcatgttgtaacattttttctgttcgcttgttaagtttacgatgaaaagtcaagaaacatatgcgccctgtttgctctactttataaatatagactaaacacgaatttccgattgtttattcgtttgacaacgttcattccatgcaaaaagagacgataggccgcggagcttgtcgatcgactatgtgtctcatttttaatctcatcagcaacgtcagcaatcgaacagccggaagttgtctcagtcaaaccaatttaaaatgctcatttaaacacttaataaattcactaagaacccaatgctagctagaccagaaagcagaagtcaaagagatgaggcaaacgcggaagaagtataaaatagatgcattaataacgtatgcatcgcagttaattgatacctacatatacatataaaaaaaacgcagcctaagtttaaaatacaaattagtgttctcaattcgttttattgaaagtctatctgaaatgagagaaacaagaaaaaaaaacaataataagaaaatactatttttatacgctacatttaagctaagtattgctacttttagttcaactatgcgtgcgtgcgtccaagaccaattctcacatatagtctatttgccccttggccccgccccctttttcatcggtcaacaacttttccagcgtgtttactgttttgtaaagtttcttgtattcattgtcatgttttccataaagaactataaacaaaacaaccatttttataggttatctagtgtctagtgttaacaaataaaaaacaaaacaaacaaattataaaaacgcaaaccataaatgat

SEQ ID NO: 24570 - protein, 225 aa, DROSOPHILA
MEELTEVITAAEFHPTECNVFVYSSSKGTIRLCDMRSAALCDRHSKQFEEPENPTNRSFFSEIISSISDVKLSNSGRYMISRDYLSIKVWDLHMETKPIETYPVHEYLRAKLCSLYENDCIFDKFECCWNGKDSSIMTGSYNNFFRVFDRNSKKDVTLEASRDIIKPKTVLKPRKVCTGGKRKKDEISVDCLDFNKKILHTAWHPEENIIAVAATNNLFIFQDKF

SEQ ID NO: 24571 - DNA, 3436 bp, DROSOPHILA
tatccagctagttggtttccttaactgaacttaactatacgtatgactcctcgggcatcttgacctgcattatttgcaggattcctatcaaacccaacgtctggaaggtgcatataaattccaagcagcacaaactgaacgtcgatcaggctaagcagaataaggtggagaaacccgtcaccactactgcacccaaggatcctacgggtccgtccaccaagacttcagctcctgccaaaaactccagcacactgccagataaaactccacagagcagccaggaaaagcatcctcccctcattcaagagaaaactgcccagggaaatgcgagcagcaagcctgagaatgaaactactgtcgagaaactgccagaaaagttcttcgacgaggataagaccaataaatcggaggccgctcgccttcaggacgaggaatggcagcgattccagcaggagatcaagcgggcggacacggaatccagtgaaattgtggccgacgagcaggaggacatcaatctcaagcgacacatcaaggagatcgacgagcagatcgacaactggaagagatttattaaaattaacgatcagaaaaaagtactccttagtaaaaagcgaagagtagaccccaagatggaggtcgatccggaattgagttcaagcgaagaagattgcagtgtggatgatttgttcgactggagaacgaaaaatctgcatagctagagaataaatatggtattaaaatgttactgttataaaacaacaaacgtcttttaattaacgcattattccattcaaaagtctttccaaagccaaaaaaattcaaaaaaaaaagcgtgttagaaaattttgaaaatataatttcgtagatttttataaactgaaagtgaaaaaaactggtggaacagctgacacatcttgaccatgaaagtggtcaacaggtagaaagtggtacgtggccacactgcgactaactctcacattttgtattagcgctaagcgatccgtacgctacattactatcagacttagtacatattttatgttacattaattagttacagactcttatttattcttaagccgtatctacagaaaccttgttaatgttgtgttgagtattacgtattagttgtgcaaatgttttgttgtgtttaagaatgttttgaactcgttacgttgtttgtttgatgtgatcaagtttcccataaacacaaacatatccccccatttgttacaatgatatctaattcgtgaacatgagcctaaagtatataatctttttttggatgttgacggcgaactattcaagtgtcttaagcttggaatattccaaaggtttcaatgagtcggacgctattaacacaattcacacgggccacaataaacgaaccagtaaatttctatttgacacaatttttcgcataagttcgggagtatcgaatgcctttggactttcggataccgaagacgaggtcgagtataccgaaaattccagcctaaaaaactgtgactgtggtatgtgcatgtgttgtttgttgctgatatttaaattaatgtgataaatttcactcgtgcagattgtggcttttcgaacgaagaaatccggattgttgggggaaagcccacgggtgttaatcaatatccttggatggcacgaatcgtgtacgacggcaagttccattgcggaggatccttactgacgaaggattacgttctatcggccgctcactgcgtgaagaaactgcgaaaatccaaaatcagagtcatattcggcgaccacgatcaagagatcacctcggagtcacaggccatccaacgtgcggttacggctgtgataaagcacaagagctttgaccccgatacatacaacaacgacattgccctgttgcgacttcgcaagcctatatcgttttctaaaattataaagccaatctgcctaccgcgctataattacgaccccgcaggtaaatatttctagcattcctagcaataaatatgtatatattaatatgaaattggatttaggtcgcattggaacggttgtcggctggggacggacatccgagggaggagaactaccatccatagttaatcaagttaaggtgagtaatgctatttggtttcttgagtatattatgaccatctacgacaattgcaggtgccaatcatgtccatcacggaatgccgaaatcaaagatacaaaagtactcgaattacctcatccatgttgtgtgcgggtaggccttccatggactcatgccagggcgacagtggaggaccgctgttgctatccaatggcgttaagtatttcatcgtcggcattgtgtcctggggcgttggttgcggccgcgaaggatatccgggtgtttactccagagtgagcaaattcataccgtggattaagtctaatttagaaaatacctgcctgtgttcatagtcaatgttgtgtgcaaatgcacgaccttatttattgcctagcttagtccgttttaatgcaaagtgtctttgttactccaccaatccatcgaaaataaatataattgtttcatttaaactattgagatattaatctggattagctgaagcacagctttcatatatacatttttattgcgtatataaaaaacgtagttctataaaaactatgactaatgtatatcgggatataagtgctaatcctacactttctaataataacctagtgcattattttacaattactgtactgctagacttccctgtaccttttagttacgactgcgttcgccacttttaagacttcatttgatatttttccacagcttgagttcttgatggatggtatactgagtgctgcatgcaagggcattaggaattcggtgttggcgttggagcccagttggtagttttccatagccccgtagatactcttaaagagtggctgcctgtctgaatggaaataaccacgatttccgtggataaccttaacgccagtttgagacatattgcaaatgctcatgtacatgcagtgatctggacggtagttgtattcgcatggcatgatgtacagcttatcaggatgatagtaaaatagtatgttgattatgtcttgatccccccaaataatgcgtagcttgtactccttatgaatagacacgatatgctgttcccatttcatttctctcatccgtgtgagattcattagcataacgccggaattaacgcccagtcggccatagaatggatgtcgtgcaaatctattgtaccagccaatgttttcgttctcgtgctcgggcgtcagtgcggacatttgcgtctcattgaacttcttaaagaatcgccagatatccgagatgggcgacaaaaacaatatatccgtgtccacatacagcaatgagtccacatgcgttagcaatgactagaaaaataagggtttgttactcttggaattatatgga

SEQ ID NO: 24572 - DNA, 976 bp, DROSOPHILA
ccgtacgctacattactatcagacttatgtcttaagcttggaatattccaaaggtttcaatgagtcggacgctattaacacaattcacacgggccacaataaacgaaccagtaaatttctatttgacacaatttttcgcataagttcgggagtatcgaatgcctttggactttcggataccgaagacgaggtcgagtataccgaaaattccagcctaaaaaactgtgactgtgattgtggcttttcgaacgaagaaatccggattgttgggggaaagcccacgggtgttaatcaatatccttggatggcacgaatcgtgtacgacggcaagttccattgcggaggatccttactgacgaaggattacgttctatcggccgctcactgcgtgaagaaactgcgaaaatccaaaatcagagtcatattcggcgaccacgatcaagagatcacctcggagtcacaggccatccaacgtgcggttacggctgtgataaagcacaagagctttgaccccgatacatacaacaacgacattgccctgttgcgacttcgcaagcctatatcgttttctaaaattataaagccaatctgcctaccgcgctataattacgaccccgcaggtcgcattggaacggttgtcggctggggacggacatccgagggaggagaactaccatccatagttaatcaagttaaggtgccaatcatgtccatcacggaatgccgaaatcaaagatacaaaagtactcgaattacctcatccatgttgtgtgcgggtaggccttccatggactcatgccagggcgacagtggaggaccgctgttgctatccaatggcgttaagtatttcatcgtcggcattgtgtcctggggcgttggttgcggccgcgaaggatatccgggtgtttactccagagtgagcaaattcataccgtggattaagtctaatttagaaaatacctgcctgtgttcatag

SEQ ID NO: 24573 - protein, 223 aa, DROSOPHILA
MARIVYDGKFHCGGSLLTKDYVLSAAHCVKKLRKSKIRVIFGDHDQEITSESQAIQRAVTAVIKHKSFDPDTYNNDIALLRLRKPISFSKIIKPICLPRYNYDPAGRIGTVVGWGRTSEGGELPSIVNQVKVPIMSITECRNQRYKSTRITSSMLCAGRPSMDSCQGDSGGPLLLSNGVKYFIVGIVSWGVGCGREGYPGVYSRVSKFIPWIKSNLENTCLCS

SEQ ID NO: 24574 - DNA, 3136 bp, DROSOPHILA
tcagcttagctaactttttctggagccgcgcagctcaagcaaacactcaaactcacacccacttacatatgtgcaactttttcatgtacctttcgcatcttagatacttaaatggattattaaacggaagacccgaaaattgttaactgatctaaggcagaactacacacaaactactaagaaaatatactgaattatttatggaacggcgtacaaaactaaagcgcaacaaattgggagagaaaggttaggaatcattgcaaagtaataatcatagacacaaaagtattcagaaaacaacacacaaaataaacacacaaggcacatatacaaagcagatgaaaaaacaaactacaactgagaaaaacacggcataaataaggtttaagttatgtttaaacaagagataaataactgtaacggtaaagtcgaaagtcaacagttgatatgttgtaaaaaagctattaaataaaaacaaaaaacacaaaaaaaaagaaaagattaccaaggcaggcaagtgagagtaattgaatgttaaagaagctactaagtaaatggtacgagcagatgtgtgcaaagataaccaaagaaagcaaattgaaaacaagaaaattgatttataacattaagtgaaaactaattaataaataaagaggtaacacctatgaaaaatgtaactgattttgtttaaatttgaaaattacaccactgcagccagcgaaacgggaatgttaagataaccggcaagaattatcaggaaatggaacgttactaaggggtcgattgtaaacaacgtgctatgctgaacgcttaaagataaaagtttacttttattgaaacattttggaattagtttcatatttgttactaatattacagggtcctttaaaatttcagttagcaggggggcctacagcttgcggttaacatgttctgttaacaagaaagttatcgcttcatccgatgtgttatcgtctgttagctagcagtgcacatgttgccgactaggaagaagaagcacatccaaaacaaataaataattcgtgcaatttattaattttacaagacaaaaatccagtgctagacaagatgcccaaggttacgaaggaaaagaagagccggattcataatgatgtgcaaaaacagggtgagtcggtaccatatcaaaccaagaaacgtactttaaacccacatatttttaatttatagggatcgttttcaacaaggactttggtcagcacatcctgaagaatcctctggtgataaccaccatgctggagaaagccgctttgagagctaccgatgtggtgctggaaatcggtcctggaaccggaaacatgaccgttcggatgctggagcgcgccaagaaagtgatcgcctgtgagattgacacacgattggccgccgagttgcagaagcgtgtgcaggcaactccgctgcagccgaagctccaggtgctgattggagacttcctaaaggcggagctgcccttcttcgatctgtgcatcgccaacgttccgtatcagatcagttcgccactgatcttcaagttgctcctccaccgaccactcttccgttgcgccgtacttatgttccaacgcgagttcgcagaacgattggtggccaaaccgggtgataagctctactgtcgtctgagtatcaacacccaactgctggcccgggtggacatgctcatgaaggtgggcaagaacaactttaggccgccaccaaaggtagaaagcagtgtggtccggctggagccaaaaaacccaccgccaccggtcaacttcaccgaatgggacggactcacccgtattgccttcctgcgcaagaacaaaacgctggcggctacctttaaggtgacgtccgttttggagatgttggagaaaaactacaagctataccgctcactcaggaatgaggtaagtctgggaagattatgtatatgattgattaggaagataattgcaatttgaatttccctagccgattgaagacgacttcaaaatgcaggataaggtcataagtatcttggaggaacaggacatggccgcaaaacgtgcgagaagcatggacatcgacgactttatgcggctcctgctggctttcaattcagcgggcattcacttcaattagttgtatttattctatagatcgttaaactttgtacaatttaccaacattaatataaatgttaagccaacgaactttaattatctcaacattttttagccaaactggtttccatctagtacagtagttatcaactaacaatcccgtcgtctacaatctgatatcagttacttccggttttgaatgaatatttaagcattctacaatataaatttaactatgaatgactttctttgggaaaacctaaatagatggctaagtaaactatgaatctccatccgtgcttcctactgtatatagaatagaaccagctgatcattgcctgagcccggagagcatcgtctccgaagtgcgcaattgaaaagtagctgattagcttcgatcagatcagttgccggccgatcgagttccactgcagttcaataggatggccatgcaatcgctagaattgatattactgctagtgttttcactcagcagcagccttgttcagggccaaaatccggatccatttgcccagcttggtaggtaatatgagggagactagaatcttactgaaaaaggaacattccccttagcttgcacgaagttcaagcagattgtcttcgaagagcgcgtggccattagcttctttttcaccgatgcacccattacctacgagacagtggattcctgccatggatccagacccctgattgtggacggcacgccggcggaacccaaggaatttccatttgccgctcgcctcggccatcggaaaactaacaatgaaataaaatggttctgtggcggcaccttgataagcaatcgcctggtgctcacagcggctcactgctttttttccgaacagtaagttcttaacttttcatatctcatagttagttactatccattccattgtaatcgaacggatttctatatatttctccagcggtgaggtcaacgttgtgcgcttgggtgaactggagttcgataccgacacggatgacgcggaacccgagga

SEQ ID NO: 24575 - DNA, 1010 bp, DROSOPHILA
ccgactaggaagaagaagcacatccaaaacaaataaataattcgtgcaatttattaattttacaagacaaaaatccagtgctagacaagatgcccaaggttacgaaggaaaagaagagccggattcataatgatgtgcaaaaacaggggatcgttttcaacaaggactttggtcagcacatcctgaagaatcctctggtgataaccaccatgctggagaaagccgctttgagagctaccgatgtggtgctggaaatcggtcctggaaccggaaacatgaccgttcggatgctggagcgcgccaagaaagtgatcgcctgtgagattgacacacgattggccgccgagttgcagaagcgtgtgcaggcaactccgctgcagccgaagctccaggtgctgattggagacttcctaaaggcggagctgcccttcttcgatctgtgcatcgccaacgttccgtatcagatcagttcgccactgatcttcaagttgctcctccaccgaccactcttccgttgcgccgtacttatgttccaacgcgagttcgcagaacgattggtggccaaaccgggtgataagctctactgtcgtctgagtatcaacacccaactgctggcccgggtggacatgctcatgaaggtgggcaagaacaactttaggccgccaccaaaggtagaaagcagtgtggtccggctggagccaaaaaacccaccgccaccggtcaacttcaccgaatgggacggactcacccgtattgccttcctgcgcaagaacaaaacgctggcggctacctttaaggtgacgtccgttttggagatgttggagaaaaactacaagctataccgctcactcaggaatgagccgattgaagacgacttcaaaatgcaggataaggtcataagtatcttggaggaacaggacatggccgcaaaacgtgcgagaagcatggacatcgacgactttatgcggctcctgctggctttcaattcagcgggcattcacttcaattag

SEQ ID NO: 24576 - protein, 306 aa, DROSOPHILA
MPKVTKEKKSRIHNDVQKQGIVFNKDFGQHILKNPLVITTMLEKAALRATDVVLEIGPGTGNMTVRMLERAKKVIACEIDTRLAAELQKRVQATPLQPKLQVLIGDFLKAELPFFDLCIANVPYQISSPLIFKLLLHRPLFRCAVLMFQREFAERLVAKPGDKLYCRLSINTQLLARVDMLMKVGKNNFRPPPKVESSVVRLEPKNPPPPVNFTEWDGLTRIAFLRKNKTLAATFKVTSVLEMLEKNYKLYRSLRNEPIEDDFKMQDKVISILEEQDMAAKRARSMDIDDFMRLLLAFNSAGIHFN

SEQ ID NO: 24577 - DNA, 2953 bp, DROSOPHILA
gcggacaccatgtagaagtaggacaaagcggctgcggccgaccagaacacggatccagtcttcactgagcgcacccacaggaagtaggtgaactgcagggcgaatatggcaatgccctcgttatcgtacgatccagccaccgacctactgatgtagccaggcacgatggcgatgaagctggcggcgaagaggccggcgcccgcggaccacagctccttggtcagcaggtaggtggagatggaggtcaggccactgaagatcggcgccaggaacacgcagatgtcacgaatatggaccggtatgttgagtacgtgcagcagccaatggattccgccggacgtaatcatcaggccgggatagacggtaccgcccacaatcctgccgagcggataccatgcgcgctcgtcgaaccagttgaggaagttgtaccaaccattctgcaccatgtaggcggtggcccggtagttgaaccacggatcaaactcatggataatcgactcgaaacggatgacggcgaagaggcgagaggaaaatccggccagccaggcgattagcaggatggcgaaggtgattaggctgctgtagccagccaccttgctgttcagcatcttcggcgtccgattcatgtcccaattccagccagtaactcgaaaattataaccgatctgaaatgcaacgacacattcttcgcttagacacgtagtctaaaaaaattgccgggtagactgccaactcggttttagatacgctatcgatagtgcaatcgataacaagaccagggcaacgtaactttgaatgcttttaaatttgtacttgcctcgttttcgttgtattccaaaataatttaaaatacatctaaacaattttttggaataactttttgttccatttatttgcatagcataaaaaaataagcaaactctccattccatttgttctgtgtcttgttcaaaataatcgccgttgcgctcatctctagtttaattcctatgattgacagaagccgctgaaaaacctaagaatattgaaaatcaacatgaataatgggaatataaaacgccttcaaaagaaactcagcgtttcgaaaaagccagcagtcactgtggattcaccattggcaaaatatcctttacaaaagcaaaaaacccactgaaattctattgttgtttacactttctagccggtgtttactaaaacatgttgttttctaatataacttttaatttcgaataaatatccagctagttggtttccttaactgaacttaactatacgtatgactcctcgggcatcttgacctgcattatttgcaggattcctatcaaacccaacgtctggaaggtgcatataaattccaagcagcacaaactgaacgtcgatcaggctaagcagaataaggtggagaaacccgtcaccactactgcacccaaggatcctacgggtccgtccaccaagacttcagctcctgccaaaaactccagcacactgccagataaaactccacagagcagccaggaaaagcatcctcccctcattcaagagaaaactgcccagggaaatgcgagcagcaagcctgagaatgaaactactgtcgagaaactgccagaaaagttcttcgacgaggataagaccaataaatcggaggccgctcgccttcaggacgaggaatggcagcgattccagcaggagatcaagcgggcggacacggaatccagtgaaattgtggccgacgagcaggaggacatcaatctcaagcgacacatcaaggagatcgacgagcagatcgacaactggaagagatttattaaaattaacgatcagaaaaaagtactccttagtaaaaagcgaagagtagaccccaagatggaggtcgatccggaattgagttcaagcgaagaagattgcagtgtggatgatttgttcgactggagaacgaaaaatctgcatagctagagaataaatatggtattaaaatgttactgttataaaacaacaaacgtcttttaattaacgcattattccattcaaaagtctttccaaagccaaaaaaattcaaaaaaaaaagcgtgttagaaaattttgaaaatataatttcgtagatttttataaactgaaagtgaaaaaaactggtggaacagctgacacatcttgaccatgaaagtggtcaacaggtagaaagtggtacgtggccacactgcgactaactctcacattttgtattagcgctaagcgatccgtacgctacattactatcagacttagtacatattttatgttacattaattagttacagactcttatttattcttaagccgtatctacagaaaccttgttaatgttgtgttgagtattacgtattagttgtgcaaatgttttgttgtgtttaagaatgttttgaactcgttacgttgtttgtttgatgtgatcaagtttcccataaacacaaacatatccccccatttgttacaatgatatctaattcgtgaacatgagcctaaagtatataatctttttttggatgttgacggcgaactattcaagtgtcttaagcttggaatattccaaaggtttcaatgagtcggacgctattaacacaattcacacgggccacaataaacgaaccagtaaatttctatttgacacaatttttcgcataagttcgggagtatcgaatgcctttggactttcggataccgaagacgaggtcgagtataccgaaaattccagcctaaaaaactgtgactgtggtatgtgcatgtgttgtttgttgctgatatttaaattaatgtgataaatttcactcgtgcagattgtggcttttcgaacgaagaaatccggattgttgggggaaagcccacgggtgttaatcaatatccttggatggcacgaatcgtgtacgacggcaagttccattgcggaggatccttactgacgaaggattacgttctatcg

SEQ ID NO: 24578 - DNA, 801 bp, DROSOPHILA
aagccgctgaaaaacctaagaatattgaaaatcaacatgaataatgggaatataaaacgccttcaaaagaaactcagcgtttcgaaaaagccagcagtcactgtggattcaccattggcaaagtatgactcctcgggcatcttgacctgcattatttgcaggattcctatcaaacccaacgtctggaaggtgcatataaattccaagcagcacaaactgaacgtcgatcaggctaagcagaataaggtggagaaacccgtcaccactactgcacccaaggatcctacgggtccgtccaccaagacttcagctcctgccaaaaactccagcacactgccagataaaactccacagagcagccaggaaaagcatcctcccctcattcaagagaaaactgcccagggaaatgcgagcagcaagcctgagaatgaaactactgtcgagaaactgccagaaaagttcttcgacgaggataagaccaataaatcggaggccgctcgccttcaggacgaggaatggcagcgattccagcaggagatcaagcgggcggacacggaatccagtgaaattgtggccgacgagcaggaggacatcaatctcaagcgacacatcaaggagatcgacgagcagatcgacaactggaagagatttattaaaattaacgatcagaaaaaagtactccttagtaaaaagcgaagagtagaccccaagatggaggtcgatccggaattgagttcaagcgaagaagattgcagtgtggatgatttgttcgactggagaacgaaaaatctgcatagctag

SEQ ID NO: 24579 - protein, 254 aa, DROSOPHILA
MNNGNIKRLQKKLSVSKKPAVTVDSPLAKYDSSGILTCIICRIPIKPNVWKVHINSKQHKLNVDQAKQNKVEKPVTTTAPKDPTGPSTKTSAPAKNSSTLPDKTPQSSQEKHPPLIQEKTAQGNASSKPENETTVEKLPEKFFDEDKTNKSEAARLQDEEWQRFQQEIKRADTESSEIVADEQEDINLKRHIKEIDEQIDNWKRFIKINDQKKVLLSKKRRVDPKMEVDPELSSSEEDCSVDDLFDWRTKNLHS

SEQ ID NO: 24580 - DNA, 3125 bp, DROSOPHILA
accgaccactcttccgttgcgccgtacttatgttccaacgcgagttcgcagaacgattggtggccaaaccgggtgataagctctactgtcgtctgagtatcaacacccaactgctggcccgggtggacatgctcatgaaggtgggcaagaacaactttaggccgccaccaaaggtagaaagcagtgtggtccggctggagccaaaaaacccaccgccaccggtcaacttcaccgaatgggacggactcacccgtattgccttcctgcgcaagaacaaaacgctggcggctacctttaaggtgacgtccgttttggagatgttggagaaaaactacaagctataccgctcactcaggaatgaggtaagtctgggaagattatgtatatgattgattaggaagataattgcaatttgaatttccctagccgattgaagacgacttcaaaatgcaggataaggtcataagtatcttggaggaacaggacatggccgcaaaacgtgcgagaagcatggacatcgacgactttatgcggctcctgctggctttcaattcagcgggcattcacttcaattagttgtatttattctatagatcgttaaactttgtacaatttaccaacattaatataaatgttaagccaacgaactttaattatctcaacattttttagccaaactggtttccatctagtacagtagttatcaactaacaatcccgtcgtctacaatctgatatcagttacttccggttttgaatgaatatttaagcattctacaatataaatttaactatgaatgactttctttgggaaaacctaaatagatggctaagtaaactatgaatctccatccgtgcttcctactgtatatagaatagaaccagctgatcattgcctgagcccggagagcatcgtctccgaagtgcgcaattgaaaagtagctgattagcttcgatcagatcagttgccggccgatcgagttccactgcagttcaataggatggccatgcaatcgctagaattgatattactgctagtgttttcactcagcagcagccttgttcagggccaaaatccggatccatttgcccagcttggtaggtaatatgagggagactagaatcttactgaaaaaggaacattccccttagcttgcacgaagttcaagcagattgtcttcgaagagcgcgtggccattagcttctttttcaccgatgcacccattacctacgagacagtggattcctgccatggatccagacccctgattgtggacggcacgccggcggaacccaaggaatttccatttgccgctcgcctcggccatcggaaaactaacaatgaaataaaatggttctgtggcggcaccttgataagcaatcgcctggtgctcacagcggctcactgctttttttccgaacagtaagttcttaacttttcatatctcatagttagttactatccattccattgtaatcgaacggatttctatatatttctccagcggtgaggtcaacgttgtgcgcttgggtgaactggagttcgataccgacacggatgacgcggaacccgaggactttggcgtgctcgctctgaaggcacatcctggcttcgagaacccgcaactctacaatgacattggcatagttcagctggatcgcgaggtcaagttcaataggtacaagcatcctgcctgcctgcccttcgacgacggcgagcagcacgagtccttcatcgccatcggctggggccagaagaagtttgcccagaaggagtcaaagaagctgttgaaggtgcagctccagggctataaggaccgatgtgtcagcagtgtggatgcgaatgatgagttgcccaatggctacgagcccaagagccagctgtgcatcggatcaagggacaacaaggacacatgcaacggcgactctggcggtccagtgctggcctatcacaaggatctcgcctgcatgtaccacgtaatgggcatcacctcagccggcatcacctgctccacgcccgacattccaagtgcctacacgcgggtgcactacttcctcaactggatcaagggcgaactggccaagcagacgcagtgaatgacatgattgtttttaaattcgtttaatctcttacacttgagaccctgggctgggttctgagaaagccagaaatatacaagttattaattaatgattgtaaatccaccaccgactataaaaatttgcatctgggtttgctaagcaaaccggtttggattttgttggatttgaattaaattttcaggttttcatttccacagaacttttcacttgctttaaagtcgtgacaatgcatcaattttcttatgattatggtttatattacctagtcaatatttgtaaatatttaaatgccggaacatattgttttcatgttgttcgccctcaaaccggcttttatttctattgattttctgcttgcgtaagccgagagcaaatattagtgtataatgtcttatcaacaaaatcgaggcttttcccgctttttgttagctctcctgcggagattgcactttggcaggcttaaaagagcagctttttgtttataaataaatatgttagttgcctaccaaacgtagaggtagccacacgatgagcagcgcgatcttcgccaagattgtccagctgggagcagtattgctggtttcattcgtcgcatgggcgtcagctcaggattcggatatagccaggagtaagtgcatcattgtttgaaagatcttttatagatgttcgcgctctacagcgtgcactgcctacaagagaagcgtttgggaggagacgtccgagttcagctttctgatcgagaacgctccgattatctacaagaccctggacaaatgcactagctatgcgccgctcatcatcggcggaggacccgccgtgcccaaggagttcccgcatgctgcgcgcctgggacacaaagatgagaatggcgaggtggaatggttctgtggcggaacacttatcagcgacagacatgtgctcaccgcagcgcattgccactactcaccacagtacgtactattcttatcgctaaattcctagactaaatcgcaaatattttatgccacctcttcagaggatcag

SEQ ID NO: 24581 - DNA, 989 bp, DROSOPHILA
atggccatgcaatcgctagaattgatattactgctagtgttttcactcagcagcagccttgttcagggccaaaatccggatccatttgcccagcttgcttgcacgaagttcaagcagattgtcttcgaagagcgcgtggccattagcttctttttcaccgatgcacccattacctacgagacagtggattcctgccatggatccagacccctgattgtggacggcacgccggcggaacccaaggaatttccatttgccgctcgcctcggccatcggaaaactaacaatgaaataaaatggttctgtggcggcaccttgataagcaatcgcctggtgctcacagcggctcactgctttttttccgaacacggtgaggtcaacgttgtgcgcttgggtgaactggagttcgataccgacacggatgacgcggaacccgaggactttggcgtgctcgctctgaaggcacatcctggcttcgagaacccgcaactctacaatgacattggcatagttcagctggatcgcgaggtcaagttcaataggtacaagcatcctgcctgcctgcccttcgacgacggcgagcagcacgagtccttcatcgccatcggctggggccagaagaagtttgcccagaaggagtcaaagaagctgttgaaggtgcagctccagggctataaggaccgatgtgtcagcagtgtggatgcgaatgatgagttgcccaatggctacgagcccaagagccagctgtgcatcggatcaagggacaacaaggacacatgcaacggcgactctggcggtccagtgctggcctatcacaaggatctcgcctgcatgtaccacgtaatgggcatcacctcagccggcatcacctgctccacgcccgacattccaagtgcctacacgcgggtgcactacttcctcaactggatcaagggcgaactggccaagcagacgcagtgaatgacatgattgtttttaaattcgtttaa

SEQ ID NO: 24582 - protein, 319 aa, DROSOPHILA
MAMQSLELILLLVFSLSSSLVQGQNPDPFAQLACTKFKQIVFEERVAISFFFTDAPITYETVDSCHGSRPLIVDGTPAEPKEFPFAARLGHRKTNNEIKWFCGGTLISNRLVLTAAHCFFSEHGEVNVVRLGELEFDTDTDDAEPEDFGVLALKAHPGFENPQLYNDIGIVQLDREVKFNRYKHPACLPFDDGEQHESFIAIGWGQKKFAQKESKKLLKVQLQGYKDRCVSSVDANDELPNGYEPKSQLCIGSRDNKDTCNGDSGGPVLAYHKDLACMYHVMGITSAGITCSTPDIPSAYTRVHYFLNWIKGELAKQTQ

SEQ ID NO: 24583 - DNA, 3154 bp, DROSOPHILA
gccaccatcttcgtgatgcatgtgttcaagcatgcgcagccggctctgctctacctggtgccagcctgcatgggcacgcccctcctggtggccctcatccgcggcgagctgaaggtgctctttgcgtaagtgtggactgcgctgggcgctcgacttgaaactaaactaactcattctcgcccccactgcagctatgaagatcatcccgaggagaagcccgaaaagaaggagaagaaggagaaggacgagggcgtcagctcgtccggcagcaaaaagaaggagtcgaaaaagggcaagtagagccgggaggacgcaacatccgaacaacatccccactcgttccatcgtaaatgtcttctgcagctagccaagctccctttcgtttcgatatggcttctccatctaccgcagtccatagctcatatggactaacaccgctacaaaagacgattcacttactgagttagttatgtacgttccttggccaggcacaacaatcttatttagttcggttaggttacaattgtagaaaatgttccctcgacttttttaccgcaatcaatttaaatatgtatttcaaatatttctgtggctccgcacaggaggcttatatgtttaagaacagtttagatacaaatatattccaatttttgtaaacagtgcaattttgactacgaattctacattgcatttcttaaaactaatgcagtaatttgtgtaaacagtaatgcgaataaattttaattctaacgtttaattaaactagttttgtattgagtagagggtttttaggaatgtaacggcttaagagaaaaacctaatacattttaagttgagcttaccaaaatccaaagaatttttaaatttaaaacataatacaaaagtgctttgaaaaagtcagtattttaataccactgtttatccacggccacactaaatatcgataaccgcatagtgagaccctttgtgtagaaaaacttatacctttagcgagcacaagcgttcattcctgaaaaattgcggtaaaaattgcgaaaagcgcgagttccccccgcgattgcaaataattaatttgcttggaaccactggagacgcaaggacgaacagagaggtaggtgctcttgcacttagcgcgccaaaaggcgacaaagcccctcgtaggccacttacccacacacacacattcgcagacagacgcgcgtgcaaaaaaggccaagtgggactgctagcggaaatccaggactcgaggacacgttcgggcggcagtagagaagcgagcaagcagcgacgaccatgtccggcattgctattacacgattgggggaggagcgcaaggcctggcgcaaggatcacccattcgggttcgtcgcacgacccgccaagaaccctgacggcaccctcaacctgatgatctgggagtgcgccattcccggcaagaagtccaccccctgggagggcgggctctacaagctgcgcatgatcttcaaggacgactaccccacctcgccgcccaagtgcaagttcgaaccgccgctgttccacccgaacgtctatccctcgggcactgtttgcctgtcgctgctggacgaggagaaggactggcgccccgccatcaccatcaagcaaatcctgctgggcatccaggacctgctcaacgagccgaacatcaaggacccagcccaggcggaggcctacaccatctactgccagaaccgactggagtacgagaagcgcgtgcgtgcccaggcccgcgccatggcggccactgagtagtcgggctcctgccaaccacctttaccacatagacattaacaaatacacacatctagccggtaagcgtttgtttggaatgctctccacgtctacttacttttaaagaatcgactaattttggatagcccccgcggcccgaagcatctaattttttaatgttctgcacttgcttaattaccagcatgtaccatctgaataaatacaaataagtcctgtaatttttcgatgaggcccaaagtggccacgtggcacccagaattcgacgctcttttcagcttccattctgggtgcaggtgccgattattctacgggctattttgtatcgcgagtactacgtacaaacctatgtaatttcaataaaaatttattagttgtaaaagcttatgcattttaaagcggaaaggatttcccagcaaatgtgcagtcgagcacttgttggtcgtcagtagccgtacagctggatttagtgcttgaattattccatataaagttcttccttttgcttattatttaagtaacatgactatttttaaatttaagcattttatttaaaaacttgttcagtccatttttacctttatattttatttgatttttaggcatttgaagctggtcacatttcccaactatttcagctgatctggcaagtccgccaacattactatgcataatttttggctgatctggtagcattcgctgctgatatagcaatgcttccagctaacggttcatttccaacgaggccgccatattgaaaaatgcccagttaaaacacctactgagatttgtgttcgcctggtacttcagtctggggaatccggcatactgacagctgaatttattatttttcccgaggatgctcatatatttcgaactgaattaccagggaagcataagcgtggaaaggtgtttttaaaacaaccgccaggattcccaaagtcttggttttggtgggcatgctctattctgagtaccaggcgaacagaacttctagtaggctaccaacgatcagctgatctatctgatgcctggtctaatctaacggttcttttattagggatgccacaatatttttctattgatccggtaatatgtccgatgtttgacaatattttaatcaatctggcaactatgtcgtcataacatttttcgctaatctggcagcactcaaatcgttcgttgaattcaaaaatgtaaaatgtcgtttagttactaatttcactatattttatattgaataaattaattacttttattgtcgcacacacttaataaataatgtactcatttaaattacacagttagaattgctcgctttatggggaacagcgagtaatttacattatagtattggatctacattggaatacttcgcctcctt

SEQ ID NO: 24584 - DNA, 1104 bp, DROSOPHILA
cgttcattcctgaaaaattgcggtaaaaattgcgaaaagcgcgagttccccccgcgattgcaaataattaatttgcttggaaccactggagacgcaaggacgaacagagaggccacttacccacacacacacattcgcagacagacgcgcgtgcaaaaaaggccaagtgggactgctagcggaaatccaggactcgaggacacgttcgggcggcagtagagaagcgagcaagcagcgacgaccatgtccggcattgctattacacgattgggggaggagcgcaaggcctggcgcaaggatcacccattcgggttcgtcgcacgacccgccaagaaccctgacggcaccctcaacctgatgatctgggagtgcgccattcccggcaagaagtccaccccctgggagggcgggctctacaagctgcgcatgatcttcaaggacgactaccccacctcgccgcccaagtgcaagttcgaaccgccgctgttccacccgaacgtctatccctcgggcactgtttgcctgtcgctgctggacgaggagaaggactggcgccccgccatcaccatcaagcaaatcctgctgggcatccaggacctgctcaacgagccgaacatcaaggacccagcccaggcggaggcctacaccatctactgccagaaccgactggagtacgagaagcgcgtgcgtgcccaggcccgcgccatggcggccactgagtagtcgggctcctgccaaccacctttaccacatagacattaacaaatacacacatctagccggtaagcgtttgtttggaatgctctccacgtctacttacttttaaagaatcgactaattttggatagcccccgcggcccgaagcatctaattttttaatgttctgcacttgcttaattaccagcatgtaccatctgaataaatacaaataagtcctgtaatttttcgatgaggcccaaagtggccacgtggcacccagaattcgacgctcttttcagcttccattctgggtgcaggtgccgattattctacgggctattttgtatcgcgagtactacgtacaaacctatgtaatttcaataaaaatttattagttgtaaaagc

SEQ ID NO: 24585 - protein, 159 aa, DROSOPHILA
MSGIAITRLGEERKAWRKDHPFGFVARPAKNPDGTLNLMIWECAIPGKKSTPWEGGLYKLRMIFKDDYPTSPPKCKFEPPLFHPNVYPSGTVCLSLLDEEKDWRPAITIKQILLGIQDLLNEPNIKDPAQAEAYTIYCQNRLEYEKRVRAQARAMAATE

SEQ ID NO: 24586 - DNA, 3097 bp, DROSOPHILA
cttcgagaacccgcaactctacaatgacattggcatagttcagctggatcgcgaggtcaagttcaataggtacaagcatcctgcctgcctgcccttcgacgacggcgagcagcacgagtccttcatcgccatcggctggggccagaagaagtttgcccagaaggagtcaaagaagctgttgaaggtgcagctccagggctataaggaccgatgtgtcagcagtgtggatgcgaatgatgagttgcccaatggctacgagcccaagagccagctgtgcatcggatcaagggacaacaaggacacatgcaacggcgactctggcggtccagtgctggcctatcacaaggatctcgcctgcatgtaccacgtaatgggcatcacctcagccggcatcacctgctccacgcccgacattccaagtgcctacacgcgggtgcactacttcctcaactggatcaagggcgaactggccaagcagacgcagtgaatgacatgattgtttttaaattcgtttaatctcttacacttgagaccctgggctgggttctgagaaagccagaaatatacaagttattaattaatgattgtaaatccaccaccgactataaaaatttgcatctgggtttgctaagcaaaccggtttggattttgttggatttgaattaaattttcaggttttcatttccacagaacttttcacttgctttaaagtcgtgacaatgcatcaattttcttatgattatggtttatattacctagtcaatatttgtaaatatttaaatgccggaacatattgttttcatgttgttcgccctcaaaccggcttttatttctattgattttctgcttgcgtaagccgagagcaaatattagtgtataatgtcttatcaacaaaatcgaggcttttcccgctttttgttagctctcctgcggagattgcactttggcaggcttaaaagagcagctttttgtttataaataaatatgttagttgcctaccaaacgtagaggtagccacacgatgagcagcgcgatcttcgccaagattgtccagctgggagcagtattgctggtttcattcgtcgcatgggcgtcagctcaggattcggatatagccaggagtaagtgcatcattgtttgaaagatcttttatagatgttcgcgctctacagcgtgcactgcctacaagagaagcgtttgggaggagacgtccgagttcagctttctgatcgagaacgctccgattatctacaagaccctggacaaatgcactagctatgcgccgctcatcatcggcggaggacccgccgtgcccaaggagttcccgcatgctgcgcgcctgggacacaaagatgagaatggcgaggtggaatggttctgtggcggaacacttatcagcgacagacatgtgctcaccgcagcgcattgccactactcaccacagtacgtactattcttatcgctaaattcctagactaaatcgcaaatattttatgccacctcttcagaggatcagtgaacatcgcgcgcctcggggacctggaattcgacaccaacaacgacgatgcggatccggaggacttcgatgtgaaggacttcaccgcgcaccccgaatttagctacccggcgatttacaacgacatttccgtggtacgattgagtcgacccgtaaccttcaacgattacaagcatccggcctgtctacccttcgacgatgggcgattggggacctccttcatagccatcggttggggtcagctggagatcgtgcccaggacggagaacaaaaagctacagaaagtgaagctctacaactatggaacgcgctgcaggattacggcggatagaaatgatgagctacccgagggatataatgctaccacccaactgtgcatcgggtccaacgagcacaaggacacctgcaacggcgattccggcggaccggtgctcatctatcacatggactacccctgcatgtaccatgtgatgggtatcacatccatcggagtggcctgcgacacacccgatcttcccgcgatgtacacacgggttcacttctacctggactggattaagcagcagctggccaaaaattagaattgatatttacatacgaaaatttgactccacagttctgtggataacttatcaaaaggagtttaactaacttcagttttgagtgcattatgggaaacaatagtaaatggaaaataaagctgaattgattgagtattattcacatacagtgttctagaaaatgatttgatttaagtgcaaagtccatgaatataaaaatacttttgaacatgaacgctagttctccgggaatttatgtattatcctgagcagattgtactaacgattatgaattatgattctagtcattcactaaacgccgaggcaaccacacgatgattgcctcggcaatccggcacgattgttcttctggaaactgggtggctgggcatgtacataagggtgtacttttacctggactggattaggcagcaactggccataaaatagatttaaattagagatttgaattagaaaagtctatcgagatcaccgttctatcagaagtagtagtttttttcaaatatatattttatatatataagcatttaaataacctttacccagtaagaagatacaagatacgtaagatcagccttgcttacccacttataaagaagtaaaaacaaaatcgttttattgtggaataattgttaaaagagcggggatttcattagcttttacccgctttagacgcacctccattgggctttccgcagctaattgatcggtaactaattgggagctaaacccgttcggatcgcacagtcgatcaccgatcgccacctgaagatgaagatatggaggctgttctcccagctgatcgtttcgctggcatgtgtttttggccagcagccggatatggatgttgtgggatgtaagtggacaaagaagtagccttgcaagtggctttaaagatctagttatatattataatatattaacgtgttgaccactgatctgagctgttctttttgatcaatattggattatcaaattgaaaatcgcaatgttcagcttg

SEQ ID NO: 24587 - DNA, 981 bp, DROSOPHILA
aaacgtagaggtagccacacgatgagcagcgcgatcttcgccaagattgtccagctgggagcagtattgctggtttcattcgtcgcatgggcgtcagctcaggattcggatatagccaggacgtgcactgcctacaagagaagcgtttgggaggagacgtccgagttcagctttctgatcgagaacgctccgattatctacaagaccctggacaaatgcactagctatgcgccgctcatcatcggcggaggacccgccgtgcccaaggagttcccgcatgctgcgcgcctgggacacaaagatgagaatggcgaggtggaatggttctgtggcggaacacttatcagcgacagacatgtgctcaccgcagcgcattgccactactcaccacaaggatcagtgaacatcgcgcgcctcggggacctggaattcgacaccaacaacgacgatgcggatccggaggacttcgatgtgaaggacttcaccgcgcaccccgaatttagctacccggcgatttacaacgacatttccgtggtacgattgagtcgacccgtaaccttcaacgattacaagcatccggcctgtctacccttcgacgatgggcgattggggacctccttcatagccatcggttggggtcagctggagatcgtgcccaggacggagaacaaaaagctacagaaagtgaagctctacaactatggaacgcgctgcaggattacggcggatagaaatgatgagctacccgagggatataatgctaccacccaactgtgcatcgggtccaacgagcacaaggacacctgcaacggcgattccggcggaccggtgctcatctatcacatggactacccctgcatgtaccatgtgatgggtatcacatccatcggagtggcctgcgacacacccgatcttcccgcgatgtacacacgggttcacttctacctggactggattaagcagcagctggccaaaaattag

SEQ ID NO: 24588 - protein, 319 aa, DROSOPHILA
MSSAIFAKIVQLGAVLLVSFVAWASAQDSDIARTCTAYKRSVWEETSEFSFLIENAPIIYKTLDKCTSYAPLIIGGGPAVPKEFPHAARLGHKDENGEVEWFCGGTLISDRHVLTAAHCHYSPQGSVNIARLGDLEFDTNNDDADPEDFDVKDFTAHPEFSYPAIYNDISVVRLSRPVTFNDYKHPACLPFDDGRLGTSFIAIGWGQLEIVPRTENKKLQKVKLYNYGTRCRITADRNDELPEGYNATTQLCIGSNEHKDTCNGDSGGPVLIYHMDYPCMYHVMGITSIGVACDTPDLPAMYTRVHFYLDWIKQQLAKN

SEQ ID NO: 24589 - DNA, 3219 bp, DROSOPHILA
atataatgctaccacccaactgtgcatcgggtccaacgagcacaaggacacctgcaacggcgattccggcggaccggtgctcatctatcacatggactacccctgcatgtaccatgtgatgggtatcacatccatcggagtggcctgcgacacacccgatcttcccgcgatgtacacacgggttcacttctacctggactggattaagcagcagctggccaaaaattagaattgatatttacatacgaaaatttgactccacagttctgtggataacttatcaaaaggagtttaactaacttcagttttgagtgcattatgggaaacaatagtaaatggaaaataaagctgaattgattgagtattattcacatacagtgttctagaaaatgatttgatttaagtgcaaagtccatgaatataaaaatacttttgaacatgaacgctagttctccgggaatttatgtattatcctgagcagattgtactaacgattatgaattatgattctagtcattcactaaacgccgaggcaaccacacgatgattgcctcggcaatccggcacgattgttcttctggaaactgggtggctgggcatgtacataagggtgtacttttacctggactggattaggcagcaactggccataaaatagatttaaattagagatttgaattagaaaagtctatcgagatcaccgttctatcagaagtagtagtttttttcaaatatatattttatatatataagcatttaaataacctttacccagtaagaagatacaagatacgtaagatcagccttgcttacccacttataaagaagtaaaaacaaaatcgttttattgtggaataattgttaaaagagcggggatttcattagcttttacccgctttagacgcacctccattgggctttccgcagctaattgatcggtaactaattgggagctaaacccgttcggatcgcacagtcgatcaccgatcgccacctgaagatgaagatatggaggctgttctcccagctgatcgtttcgctggcatgtgtttttggccagcagccggatatggatgttgtgggatgtaagtggacaaagaagtagccttgcaagtggctttaaagatctagttatatattataatatattaacgtgttgaccactgatctgagctgttctttttgatcaatattggattatcaaattgaaaatcgcaatgttcagcttgctctagatacaagaagagcgttttcgaggaaagaatcgagttcggtttcctgttgcccggagcttcgattgagagtcggatcatagacaactgcaggagctacacgccgctcatcgtcggtggtcatccggcccagcccagggaatttccgcatatggcccgcttggggcgtcgcccagatccgagcagccgtgccgactggttttgtggtggcgttctgatcagcgagcggttcgtcttaaccgcagctcactgcctggaatcggaaaggtaagcagaggtttttccctgctcaagttaggaataaatatctcatttttataggggagaggtgaatgttgtgcgattgggcgaactcgacttcgattccttggatgaggatgcggcgcccagagactatatggttgcagggtatatagcccatccgggctacgaagatccgcagttctaccatgatataggtcttgtcaaactgacggaggccgtggtctttgacctatataagcatccagcctgtctgccgttccaggatgaacgctcttccgactccttcatagccgttgggtggggaagcactggcctggcgctgaagccatccgcccagctgctgaaggtgaagttgcagcgctacggaaattgggtaagtaaattggcatgggatattataaatccccatggataatccacattaataaatatattatttccttataggtgtgcaagaaactgcttacccggcaggtggaggagttccctcgaggattcgatggaaacaaccagctctgtgttggttcggagatggcccaggacacctgtaacggcgactcaggaggacctttgctaatgtaccatcgggaatatccctgtatgtacgtagttgtgggaatcacgtcggccggtttgtcctgtgggtcaccaggaatacccggaatctacactcgcgtctatccttatttaggctggatagcccgaactttggccacgttttaaattacatctggatctgtaaatttatataaattttttactaaatacttaaaaaattaaatttaaaagcatttaacagtccgattaatttagaatcgctgctaagtggaagcgagtcattcctacgaaatcgatagaccgaacatatcgatgcagtcatcgatagttgtttacctttttttcccaaaaaaaagaaacatttacaaaacaaaagtcgtcgctggatttggattgtaaattaccaatgaccagaggtctgaagccgcatggcgaatacgatgtaagcggacatcctgcgcaggattccacatcacaatttccccttcctggctgcggcgcattttattttgtccccgcataattgccaattgtgccggatcatggagaaggatctgggtgaggaaaaggaccaggatcaggagcagaacactgagatggagcccaagcaggagatggacgtggcgcagtcttacataacgcgggccaagatgaatcctgccaagaaggataacgagaagcgacgacgcaaggatgccatgcgaagggtaattagtgcgactgtgtgtgtgtttttacgctggcagagcttgttccaatttagattgtttataaattacaaagttcatgtcaaataccaatctttgattatattttagtgtccaaaagatcaaaccccctaagttattataaaataaaccacggtctatatattaagccatgtatgtacgcctatcaagccaatgctaatctatgaaaatgttccaggtctcgatgatactgcgaaaatgcgactccatgcgcacgacggaagatcgacagtttttggagaaacacccggacatggtgaagacgaccaagaagcgcaaggagcgggtagagatatacaaggagcgggttgtggaacgcgaggatgcgccgcacgtgatcgaggcgaaggtggagcagttggccaacatcatttcgcaggctaagcatctagtttgctacacgggagccggtataa

SEQ ID NO: 24590 - DNA, 951 bp, DROSOPHILA
atgaagatatggaggctgttctcccagctgatcgtttcgctggcatgtgtttttggccagcagccggatatggatgttgtgggatcttgctctagatacaagaagagcgttttcgaggaaagaatcgagttcggtttcctgttgcccggagcttcgattgagagtcggatcatagacaactgcaggagctacacgccgctcatcgtcggtggtcatccggcccagcccagggaatttccgcatatggcccgcttggggcgtcgcccagatccgagcagccgtgccgactggttttgtggtggcgttctgatcagcgagcggttcgtcttaaccgcagctcactgcctggaatcggaaaggggagaggtgaatgttgtgcgattgggcgaactcgacttcgattccttggatgaggatgcggcgcccagagactatatggttgcagggtatatagcccatccgggctacgaagatccgcagttctaccatgatataggtcttgtcaaactgacggaggccgtggtctttgacctatataagcatccagcctgtctgccgttccaggatgaacgctcttccgactccttcatagccgttgggtggggaagcactggcctggcgctgaagccatccgcccagctgctgaaggtgaagttgcagcgctacggaaattgggtgtgcaagaaactgcttacccggcaggtggaggagttccctcgaggattcgatggaaacaaccagctctgtgttggttcggagatggcccaggacacctgtaacggcgactcaggaggacctttgctaatgtaccatcgggaatatccctgtatgtacgtagttgtgggaatcacgtcggccggtttgtcctgtgggtcaccaggaatacccggaatctacactcgcgtctatccttatttaggctggatagcccgaactttggccacgttttaa

SEQ ID NO: 24591 - protein, 316 aa, DROSOPHILA
MKIWRLFSQLIVSLACVFGQQPDMDVVGSCSRYKKSVFEERIEFGFLLPGASIESRIIDNCRSYTPLIVGGHPAQPREFPHMARLGRRPDPSSRADWFCGGVLISERFVLTAAHCLESERGEVNVVRLGELDFDSLDEDAAPRDYMVAGYIAHPGYEDPQFYHDIGLVKLTEAVVFDLYKHPACLPFQDERSSDSFIAVGWGSTGLALKPSAQLLKVKLQRYGNWVCKKLLTRQVEEFPRGFDGNNQLCVGSEMAQDTCNGDSGGPLLMYHREYPCMYVVVGITSAGLSCGSPGIPGIYTRVYPYLGWIARTLATF

SEQ ID NO: 24592 - DNA, 3129 bp, DROSOPHILA
ttcaaaaggaaagtatcgttactctgtccttgaactctgttatattgttagattatgtatcaataaaatgtatactttcttgtcggcatctttaaaatattattctatatgccaattgaaattcggggcacatcagagctatcattatgtgttatttaaaaaaccattcaattcgccataatttattggaattgacacccgcagcggttttaaatctatgaaattatttgcccagtttcatttccattaaattagcattttaattttaacaaaagctagatttttatatcagtgcattatcattaaaatgccatttgattagtcacgttaccgagggagttccctagtcgattgccacatcttcttttcggttcgcattggttttccattaaaattcaattagcatagaattgtgaatcgctgcgccgcgactgccgcgaaaaatatgcataacgattgtaattgtgtacggtgttaattgtcaataaatgaaattaaatgagctgtaattaaacaatagcatttgatcgtatgggcgcacgctgcgtatgcttgatatgcgatataattggtgtctgaaaactgtgtgtgacagttgacggcttcatatccgcatcgtttaccaatgagacgagttaattaacttacttggccaacatcagcctgccaacattactcatacgccccatggtacgtagtgcacgggctgtctataaatacaatcgaaaatttcaaattcactagctgcgttctgatgaactgaccatataataggtatctgtttggtttcttgaacctatctttgtcgcctttgcgaaatataattagatcaatttcactttcaatgttgcacgcaatgaggttacagagttcagggtgtatgcattctagaatgcattggcaagtgcagttgcatccgatggcgagcgaatgcgacaaggtttctatcgtattcctaataatcgtatctaaatttaaaaagaaatctattgttactaatttaaaattccttgcttatatggtctatggtttgacaaaatcatttagcaatgtacttgggatttataaaaggttgcgaattctcttgcgaatattaataagactagacaatataagaaataaaaggaactgaagaaaatcataagttggtcagtggaactaattctaatatgcatgtactccatgcttattttttagttaagattttaaaaaacatattgattagcagttcacatcatccaccacttacttctcgactgcatggccacgttctttagcatccgcgtaatgtccgccttcgtccaggtggaggtgtcgaatcccagctggtagacagaatgctcctcgatggtgtcgtggatggcggccaggcagaggaagcacaccgagttgcccttgaccttggcgttctcattctggtatatcagcgcagttcgtgtccaattgaagctgttgagtattgcccgcaccacgttgcccagattgttaacctgagctcctttcaaccgggttagagtggagtaactctcggatttcttgttgaactccttggcgttgccgccggtggtgagtacgggcacttgccagacatctgcatacctcgagatgggcgccaatacatactcgcagggcaggccaaagactgcattcacctctggccactgggtgtaaatctcgaagaagccaatgggtccgtacttcgaggagcagaaggtatcgcgcgatatcagctggatgtcgaagtgactgccgcccacgaagcccatacgctgaacatgccgaatggccagctcgagcacgggcagcaccttgggcatgatgcagtcgttcttgttgtccgattccaccgatggcagcagtgcgacgaagaccaattgcctccgggcacccaaacgccggtgatcgggcatgggaaggctgggaaagtgctggaccagttcggtgctctgcgacttgtgcgagttcttggtctctggcgtcttgaagctgtgctcatcggacccgactccaatgctggccactccgcccacggattcggcatcgtagaaccaggctgcgctcggaaagagatgagcctgcagcaggcagaggatcaggagcaggctcagtccttggccagcttggggcatctcggacggagaggatgtcctcccgtgcgcttgtatattcttggagtcttttttgtaatctcgttcgtatgtttgtcaagcgttgctctttgtcactgattttgatcgcattatttatgcgaatgtttttacaacactttcaacacgcggctctgctttaattcattttgcaacgaaaacctgcggcaaattgaaatttttgtttattaattgcactgttttgtttggctcaatttttattaatcaccgacgattgttcaaatttaattagctatctcgggacttttcattagcaaactggtttgtcgtacgtattttcacccttattattttgggcaatcgatattaattaacacttttacagcaggaaatttggctggcatttattttgtgattgtctgtctgtccaatttactgaagcattcaaagatgctttacgctcgagcacatacatacatatatgaacagccgcagatggcaattgaatgggaagccgaaatttcaaaacaatatttactattcgtatttttaaatgcaacccctgaacaactggccaagccatattgcaatttttcctgtaaaaacacttgtgtgggcatgcaaattgtttgtggagcaacaaaagcccaaaacgaagggaattaacaggcaaaccgtagctgagacacactttctattcagaataagtatttctatatctttgatatattgatcaatttatattctgctattatatatttttagccagcaaggcagctagtttgactagatctcacccattcataagtgtgtccattgtaaaagggcttgacaaaaggctaaaaactgtttggttatttttagaagaggaactttgaactgaatgaagccgaatattttatgcgactagaaagttcaagtgattcactcataaattatttcataccaagtgcagccattggagtttctacttcaaataaacaacacaatttgctaattatgatgcagaaaaataaatttc

SEQ ID NO: 24593 - DNA, 903 bp, DROSOPHILA
atgccccaagctggccaaggactgagcctgctcctgatcctctgcctgctgcaggctcatctctttccgagcgcagcctggttctacgatgccgaatccgtgggcggagtggccagcattggagtcgggtccgatgagcacagcttcaagacgccagagaccaagaactcgcacaagtcgcagagcaccgaactggtccagcactttcccagccttcccatgcccgatcaccggcgtttgggtgcccggaggcaattggtcttcgtcgcactgctgccatcggtggaatcggacaacaagaacgactgcatcatgcccaaggtgctgcccgtgctcgagctggccattcggcatgttcagcgtatgggcttcgtgggcggcagtcacttcgacatccagctgatatcgcgcgataccttctgctcctcgaagtacggacccattggcttcttcgagatttacacccagtggccagaggtgaatgcagtctttggcctgccctgcgagtatgtattggcgcccatctcgaggtatgcagatgtctggcaagtgcccgtactcaccaccggcggcaacgccaaggagttcaacaagaaatccgagagttactccactctaacccggttgaaaggagctcaggttaacaatctgggcaacgtggtgcgggcaatactcaacagcttcaattggacacgaactgcgctgatataccagaatgagaacgccaaggtcaagggcaactcggtgtgcttcctctgcctggccgccatccacgacaccatcgaggagcattctgtctaccagctgggattcgacacctccacctggacgaaggcggacattacgcggatgctaaagaacgtggccatgcagtcgagaaaccatataagcaaggaattttaa

SEQ ID NO: 24594 - protein, 300 aa, DROSOPHILA
MPQAGQGLSLLLILCLLQAHLFPSAAWFYDAESVGGVASIGVGSDEHSFKTPETKNSHKSQSTELVQHFPSLPMPDHRRLGARRQLVFVALLPSVESDNKNDCIMPKVLPVLELAIRHVQRMGFVGGSHFDIQLISRDTFCSSKYGPIGFFEIYTQWPEVNAVFGLPCEYVLAPISRYADVWQVPVLTTGGNAKEFNKKSESYSTLTRLKGAQVNNLGNVVRAILNSFNWTRTALIYQNENAKVKGNSVCFLCLAAIHDTIEEHSVYQLGFDTSTWTKADITRMLKNVAMQSRNHISKEF

SEQ ID NO: 24595 - DNA, 4002 bp, DROSOPHILA
ttaattttgcccagattttcgttttcattttgcttcttcttcgccaatatgaaaatgaaaatctgcaaatatgtgtgcgcacatttgtatacacaatgttggcgcccacaataaacaaattgcctggcctgactgtggtgaattgaattcgccatgctcacatggctcgttgcagctcggaggagctgccaaaaattgcagctattagatattattattatatggcggctatatgctttaccgacttgtgaagcgcactatctgtccgtaaagtgcgttggcgtgttttcaaaacgattgccttgaattctatttgaccaacgatcaacgatttgcggagggacagagaaaaactgcgtgactgacgtcagtcccgaacatttcttttcgaattttggagcatgcaacgcccaccgcagaaaatatatggattcggtttgctttttccagtcaaagtttcacatctgatacacacaatgcttctttctatgtatatggaaatggtcaatagccagatagttggggaaattgctctagctatgtttgctcctccatttgtttaccctttgcgggggggaactgattggaaacaatcggaagaaagtcggcggaaaactttgggggtttcctttcgaagccaattaaaatgaaaatatttatgctggtttttctacttgaaatcatttgagtaatcttttgcagtggaaaaataggcaaaagtgtgtttagtataattgaactttctggtttaaaaatatattctgggtaaaataattcaattttcatgtcaaattccttgcaaattccttaaaaattatatgtcaacactttgtctgttcattttaatttatgcatcccaaaaggggacaaattattggtcgtctggcaaagaccaaaacattcgcagagattataaaaataaattcggtaaattacgatctaccaacaaaaaaaaaccgaagcatttatgcccagagaaatatttccagtacagtttacctcacgagatttttgaccttctcattaaacagccatcgaactcaccttggaatcgcgcggctggaagggtttgccattgtgcagccaatagacttctggcctgggaattccgccaacgatggcctccagcttgattttctgacccacacgagccatggcattcgaaaggggaaccttgaaactgggtaactctgtgggttccagagctaaagtaaaaacatatagcattacgaaaaagaagatcttcagatatataagtttgctacttacgttccacaatcagagaagccgaacaatgttcaatgcccgccggattggaggcactgcaagtgtacaccgcgtcatcctccaagaagacctcctcgaacttcagagtggcctctccattattgtagctgatcacgtaatcgggagaatcgtcgatgcacttgtcatttttgaaccactgaacagtgggcaagggaactccagccaccacgcatgcaaactgaaaggagcttccctcagtggccttgccgctctgcaagaatcgtaggatccgtggtggaaccaactgcacttcggcggcattttcccgaacggataaagtggcattagtatcgcatgtacccaccagattcgaagcacggcaactgaagcgtgctgaatctgcggcaaaggtctcctcgatcaccaatctgcagatacccttatcgaaggtggtcttataatcggaattagtttggatactgatgccatccttgaaccattccacggcgggttctggagttcccgtaacctcgcattcgaagacaaatcggtccccttcgcggctaactgcatctttcagaggccgagtgaaaagcggagaggcatatcgcagctccgtgaaaatggagttaacctgaatgtcttttcggatgttttcggttacaattcgctgctggtccacttgatcgcgtagggtctggagtctggtgatctcctcacgctggatgcgggcttcctcctctcgtttcgatcgtgactcgttttctctacggatacgctcctcctcctcgcggcgaatgcgggtttcttcatccctgatgttttggagacgcacttcctcttccctgcgggcaatatctctgagcgattgtatacgcagctcctcctcccgggcagcctgttccctggccaattgttcccgcgtggcctgctcccgaatggcctgcaatctggcctcctcctcccggacagcttgctccctcagagccaattctctggctgccaattcccgttgagcctgctcaatggccgcctgctggcgctggttttctagtcgggattgctcttctctgtgcaacctttccttggcctctgcttcctttatagccttttcccgttcggcttgatcacgagcatcccgctccctttgctccttctggcgctgctcctgcttcagcctttcctgcaccacattaatgtccatcttgagcttgatgaaggactggaagatgttcattacatcgttgtacaaggaagacaccttgttcatatcgtgggcacattgcgaggcactgtccaacttggagcgcagagccgcctcccgactggtcacatagttttcgatatcattgaccaaatttcctgcttccacggagtcgcgcagatatggaaccttgttggacacgctggtgtaaaagtagctaatctcacggtactccgcgtcgatctgggaaatattaacaggttattaatatcaaagtgaacacttaattgtgaaaagaaagatcgtgtgtctctaaataaatgaacatataatttatgggattttaattacccaccttttcgaccacctcgaagaaatcggtcgcctggttgaggctctttcgtttctgcttcacttgatccttgaagctctgccatttttcgttgagtttacgcagctcgtccttgacgtaccgctcgctctcgggattggtaataaaaagctgttggctcgtggactccgtaaacttctcgatccgcttctcgagcagctattttgtgtgtgggtgagagacaagtgatgtggtaatctttagagacagccggaaaaatatgcgcttattgccagcaaattaacccattaggcagcaactaaagcgtagtgtgtctaggcgaaatgcagccaagcgggaatctattctcttacacggaagaaaatgcttagaggctctctcttaatgtatataaattgtaaaaaaacgcaacattgtgtatgttttttttttggacattcccatcggaaatgatttgggaaactgcataaaattgtgatacaaatttttttttcgattttccaattctcattcgtgcatttccacatccatctacactttggcttagctggtcattaaaattggaacgccagaagcaatttataacagcaaatgcccaacagcaagtataagtgcattaaaaaatggtctgaatgtgtttctgtttcggtttcggcctactgtatctgctgtatccgtatctctctgagttgtatttcatgtatctggcccagagtttttaattacaaactaacgacagctgccgctgtctgtctaaagcccatcgcccgccgctgacagcgacaacattttgaaagttgcgatattttcgaaatgtcatcccggcagtgcgtcgtttcccatttggaaatttgatgaatgctgtgtgcctgccagttagatgggtggtcacccatccacccaaaagggtaagcgggaagtgatgcaaaaataaagaccaacacacaactcagtcgcatgcagggatcgatccggtctgtatctattcatctatacatctatgatctatagctatatatccatgactattgctacctcgatcgtgtgggctgtttggccccagcgtcgctgatggcgcgttgatttcaattgcctgggcattgaacactagaatgggattagatcattcaataattttaagcccatcaaagtcgtcccgaaatctatcagagatctgttcgacgtcgtgtggtgtcat

SEQ ID NO: 24596 - DNA, 1826 bp, DROSOPHILA
ctgctcgagaagcggatcgagaagtttacggagtccacgagccaacagctttttattaccaatcccgagagcgagcggtacgtcaaggacgagctgcgtaaactcaacgaaaaatggcagagcttcaaggatcaagtgaagcagaaacgaaagagcctcaaccaggcgaccgatttcttcgaggtggtcgaaaagatcgacgcggagtaccgtgagattagctacttttacaccagcgtgtccaacaaggttccatatctgcgcgactccgtggaagcaggaaatttggtcaatgatatcgaaaactatgtgaccagtcgggaggcggctctgcgctccaagttggacagtgcctcgcaatgtgcccacgatatgaacaaggtgtcttccttgtacaacgatgtaatgaacatcttccagtccttcatcaagctcaagatggacattaatgtggtgcaggaaaggctgaagcaggagcagcgccagaaggagcaaagggagcgggatgctcgtgatcaagccgaacgggaaaaggctataaaggaagcagaggccaaggaaaggttgcacagagaagagcaatcccgactagaaaaccagcgccagcaggcggccattgagcaggctcaacgggaattggcagccagagaattggctctgagggagcaagctgtccgggaggaggaggccagattgcaggccattcgggagcaggccacgcgggaacaattggccagggaacaggctgcccgggaggaggagctgcgtatacaatcgctcagagatattgcccgcagggaagaggaagtgcgtctccaaaacatcagggatgaagaaacccgcattcgccgcgaggaggaggagcgtatccgtagagaaaacgagtcacgatcgaaacgagaggaggaagcccgcatccagcgtgaggagatcaccagactccagaccctacgcgatcaagtggaccagcagcgaattgtaaccgaaaacatccgaaaagacattcaggttaactccattttcacggagctgcgatatgcctctccgcttttcactcggcctctgaaagatgcagttagccgcgaaggggaccgatttgtcttcgaatgcgaggttacgggaactccagaacccgccgtggaatggttcaaggatggcatcagtatccaaactaattccgattataagaccaccttcgataagggtatctgcagattggtgatcgaggagacctttgccgcagattcagcacgcttcagttgccgtgcttcgaatctggtgggtacatgcgatactaatgccactttatccgttcgggaaaatgccgccgaagtgcagttggttccaccacggatcctacgattcttgcagagcggcaaggccactgagggaagctcctttcagtttgcatgcgtggtggctggagttcccttgcccactgttcagtggttcaaaaatgacaagtgcatcgacgattctcccgattacgtgatcagctacaataatggagaggccactctgaagttcgaggaggtcttcttggaggatgacgcggtgtacacttgcagtgcctccaatccggcgggcattgaacattgttcggcttctctgattgtggaacctctggaacccacagagttacccagtttcaaggttcccctttcgaatgccatggctcgtgtgggtcagaaaatcaagctggaggccatcgttggcggaattcccaggccagaagtctattggctgcacaatggcaaacccttccagccgcgcgattccaaggtgagttcgatggctgtttaatgagaaggtcaaaaatctcgtga

SEQ ID NO: 24597 - protein, 476 aa, DROSOPHILA
MNKVSSLYNDVMNIFQSFIKLKMDINVVQERLKQEQRQKEQRERDARDQAEREKAIKEAEAKERLHREEQSRLENQRQQAAIEQAQRELAARELALREQAVREEEARLQAIREQATREQLAREQAAREEELRIQSLRDIARREEEVRLQNIRDEETRIRREEEERIRRENESRSKREEEARIQREEITRLQTLRDQVDQQRIVTENIRKDIQVNSIFTELRYASPLFTRPLKDAVSREGDRFVFECEVTGTPEPAVEWFKDGISIQTNSDYKTTFDKGICRLVIEETFAADSARFSCRASNLVGTCDTNATLSVRENAAEVQLVPPRILRFLQSGKATEGSSFQFACVVAGVPLPTVQWFKNDKCIDDSPDYVISYNNGEATLKFEEVFLEDDAVYTCSASNPAGIEHCSASLIVEPLEPTELPSFKVPLSNAMARVGQKIKLEAIVGGIPRPEVYWLHNGKPFQPRDSKVSSMAV

SEQ ID NO: 24598 - DNA, 3155 bp, DROSOPHILA
gacgtgcagcggatcgagggggatcaagcccagctccttgataccgcttttggcgtagttcctgagcacgaagttcaccctgtcctccaggcactgctcgtccattatggcgcacctctcgatgcccgaggctgtaaattggggcgtggcgattgtgaaatatacataaacattatatattacggaaagggggtgtgtgcaactcacggaaatcggaggcgtgtccgtaggtggacgcacatccgaacagcaggacgagggcgagagttagctccataattgctggcggcgaacgtaatcgagtactgatccattagccgcgggcgttaacacttatatagtcactttcgtcaattgaaatgtatcatgtttttgttgccgtaaaccgcttttgcgtttcagccgcacagaatttgactttagaccgtttggcagttgagtcagttaaatggattataaaccgaaaccggcaggctggctgtatggcaaagtggctggttatagccggcgaattcattttacgattccctttaatgaactcccaagttcccaactcccaagccagacatcgaccccgtcccattcaatcgctcctaatcgcgttttgggtgcaatttgctcgatatatgcaaattggatcggccttccccaaaacgcacattaattcccgtttcaacgtctaattaatggctaagtcaacaaagattgtttatcaagcttttttttaatgtaactgccttttccagttacagatattccctgcctttcggaatctccgcgcgcgaataacacatactttcaggcggtccttcatcttttggatcaacctgatctatagggttccactcactgtaacttaattaataatgggtcatagttttaaatgtttttatggtattttacagaattctttgtatcacttataaataatttacaatgtgctaactacatatatgtaacttttattgccacacaacacttacagattatttagctgagatggcttaatagtagttacttgtgttctcactttcaaacgcgaaacacgaactccattaaacctaatgatgattgctagcctcaaaacttagatctgtcagtacgcaaacaacatgatctagtatctttatgtggactctgcccactttgaagagctaactcacgattcatccgcaaaaaacttggcatacggcagtttggagaacacacctttgacgacgcccaggtaaagtttgccaaaggatcggtcgattgctttggccgtctccttgtaaatggcctccgagttttcgttgaggaagacattcatgttgtcacccagcgccttgtccccattgaacagattactgaaatggtagtggctggactccggcttcatcgttattttcagatcggtaacgtccaggtaggtctccccattcttcaccagcggtttgcccgagaagctgacgattgccctgacgttaactggacaggatttttagttcctcgaaatctgaaaaatcaattggcatagcttacccattgtcatgttactctgtccagttccgctgatcggtagaatgagtaccttgccctggatgttatagggtccaacgagtgagaaggttttcgtgacaattttcacttcgtgcttggcggtgagatcccttccgaaacccctgcaaagatcaaggcaagttgaatcacatccttctcatccaaacaaagtgttgttcctgcacccactttactttgacgatcctttggtccttgatcccatacaacagattgtcggtgaaggttagagttatgcccacgggactggagctctcaccctggctaataaccatccgatccaccttcaacggatccagctgcatcaggttcagaccaggatccccctccgccgagttttcgctgaacagggtgttgcacagcttcatgatacattcgccatcaccatacttacaaggttttggatcttcggctgtgaggaacacaaaggattattttggaaccgaaaagtagaggtaggtgtctatctaggtttcccagattattacttcattggcaaggtcttgttttaaaggactttctcttacggaatttggcatccaccgagaccaaaaggcacaaaaccactgcgaatgcgattgcgaacatgctaacacgtctataactttaagttactgaatacgaacgggattttcgcctagtatttatagtggtccactaagtgcaactcaaataacgtctaatggcaacctttgatatagctcttatctgtgccgtaaccgtctgtctgtcaattccagagctcgtttcagaatcatcaactaataacgaatagcaactgaatcatctgatggtattaggtaagaaaacgttgttctaatttcaatacaagccttagtttatcacctcatttgggtgcactttagacagcaagtagatcatgtagcaaatcttcttattcaccttaatcttcatcaatcagttacatcgaaaatccgctcaatgaatttaagtatcagacagattatgtccaattaaaagtcatggtattaagttctcccttaacaaagttaactggcaagtgtgcaactcacaaaagggccagttccaaatatagccgaattgagatgcgaaaacaacgcagtcatcgtgaccaccagttctttagttggctttagttcttgcgaatcgaagtgaagggcagtggaggagtagcggtggagtagtagctcggaacaggtcctagactttgggttaacttaatgaccaagtgtcccgctttaaagtccagcccccgtggagaacaaaagcaacttgtttcgctcggaatcgctgcagttgattgctcgctcgtggaagattttcactgacccaaggccaactgggtgtccgattccctgggatcgggatggcagctataccgttggctactcttgaacttggacagtgaaatgagttcgcaatgagtgacagcacagttgtgttcagattaatagcactgccatttagttagttcttgattctaagacaagcagatcttagtcatatatcatatcatcatatcatatactaattttagtgcactttgggctaaattagttgcacaggatgtaggagtagtagtaggagcatgcatcttcgtcttttttaagacacaa

SEQ ID NO: 24599 - DNA, 919 bp, DROSOPHILA
acgtgttagcatgttcgcaatcgcattcgcagtggttttgtgccttttggtctcggtggatgccaaattccccgaagatccaaaaccttgtaagtatggtgatggcgaatgtatcatgaagctgtgcaacaccctgttcagcgaaaactcggcggagggggatcctggtctgaacctgatgcagctggatccgttgaaggtggatcggatggttattagccagggtgagagctccagtcccgtgggcataactctaaccttcaccgacaatctgttgtatgggatcaaggaccaaaggatcgtcaaagtaaagggtttcggaagggatctcaccgccaagcacgaagtgaaaattgtcacgaaaaccttctcactcgttggaccctataacatccagggcaaggtactcattctaccgatcagcggaactggacagagtaacatgacaatggttaacgtcagggcaatcgtcagcttctcgggcaaaccgctggtgaagaatggggagacctacctggacgttaccgatctgaaaataacgatgaagccggagtccagccactaccatttcagtaatctgttcaatggggacaaggcgctgggtgacaacatgaatgtcttcctcaacgaaaactcggaggccatttacaaggagacggccaaagcaatcgaccgatcctttggcaaactttacctgggcgtcgtcaaaggtgtgttctccaaactgccgtatgccaagttttttgcggatgaatcgtgagttagctcttcaaagtgggcagagtccacataaagatactagatcatgttgtttgcgtactgacagatctaagttttgaggctagcaatcatcattaggtttaatggagttcgtgtttcgcgtttgaaagtgagaacacaagtaactactattaagcca

SEQ ID NO: 24600 - protein, 249 aa, DROSOPHILA
MFAIAFAVVLCLLVSVDAKFPEDPKPCKYGDGECIMKLCNTLFSENSAEGDPGLNLMQLDPLKVDRMVISQGESSSPVGITLTFTDNLLYGIKDQRIVKVKGFGRDLTAKHEVKIVTKTFSLVGPYNIQGKVLILPISGTGQSNMTMVNVRAIVSFSGKPLVKNGETYLDVTDLKITMKPESSHYHFSNLFNGDKALGDNMNVFLNENSEAIYKETAKAIDRSFGKLYLGVVKGVFSKLPYAKFFADES

SEQ ID NO: 24601 - DNA, 3681 bp, DROSOPHILA
tcgttttcgggaagatcgtgctcccagtccagaacgttatcgtataggattcccgatctacagctacgacctttgctatccattgaagacttgcaggcacgttgcagggatttttgacccactgtttccacggcagatgggctcacaaattgccgtctgcatttcttacactgttcgatgtaaatgttgccgtgcaattcggaaagatacttccgatccagtccggatttcaagtggagaccatcaatattctgtgagattacgtactgcacatagccactttcaatcagggctatgatagccatgtgggttttagttggtctggcttcatcgaaggaaacattgaagtccggcttctcgcccttctcctccagggtccaaacgcccttgggtccgcggaaatccggaattcctgcagacgtactgatcccagctcccgtgtggaggacaacgtgtcccgatttcttgatcaattcagccaattcctggcacttttcggccacaacctcatcgctgtcgaaactctctggtgctcccaaaattcccttgttgtcgtaggctgacaatccatccgcgtagttgcagctcatggtttgataaaagtttgatctacttcaaaagcgactattatgtctttttggtattaatttgtttatattttgtacggctaaatgagtccatcgagattttattgtttataatatgaccgtatccgtaacgctacaaaatactttaaaacgtgccaagtgaaattacactggtcattaaaaaaaagtataaggtgtaatataatttgcagcttggtaaaaactaaataaatctcaaatatcttagcttaccttgattaaatataaatgtaaagtattaactcaaaatatttgttattatatttaaaacatttattataaattattttattttctaccatgtggttcagtgtaccaagcaacatgcttggatttccaactcgcacggtcacactgtaaacaacggctgcggaaacaaagtgtgcttctaatttccaatcaaaacgccggcagaaaaacaaattttatccacggcaacgaaacaatagtttgtttgatcgttgcaacgcttgacttcacatttcctctccctcgggcgaaaaacagctgaaaccggaaacggatcagagtattagcatcaggcaggacacggatttagaggcgccatgaagatcgaggaagtcaagagcaccgtgcgcacccaacgcatcgcagcccacagccatgtgaagggattgggcctggacgaggttggagctgccgtgcacagtgcagccggactggtgggtcagaaggcggcacgcgaggcagccggcattgtggtggacctcatcaaatcgaaaaagatggccggacgagcgcttctgctggctgggccaccaggcacgggcaaaaccgccattgctctggccattgcccaggagctgggtaacaaagtgcccttctgtcccatggtcggatcggaggtattcagcaatgagatcaagaagaccgaggtgctaatggagaatttccggcgctccattggtctgcgcattcgtgagaccaaagaggtgtacgagggcgaggttacggaactcacgcccgtggaaaccgagaatcctatgggtggctatggcaagactatcagcaatgtcgtcatcggcttgaaaacagccaagggaaccaagcagctcaagctggatcccagcatctttgatgccttgcaaaaggaaaaggtggaggtgggcgatgtcatctacatagaggccaacagtggtgccgtaaagcgtcagggtcgcagtgacacctttgccactgagtttgatctcgaaaccgaggagtatgtgccgctgcccaagggcgatgtccacaagaagaaggaggttatccaggatgttactctgcacgatctggatgtggccaatgctcgtccacagggcggccaggatgtgctctccatgatgggccagcttatgaagccgaagaaaactgaaatcactggttagttgtgtaattttcttcccattcaaatttactaaaataccatttgatgagcagacaaactacgcatggagatcaacaaggtggtaaacaagtacattgaccagggcatagccgagctggttcccggagttctcttcatcgatgaaattcacatgcttgatttggagaccttcacctacctacacaagtccctggaatctcccattgcaccaattgtgatttttgccaccaatcgtggacgctgtgttattcggttagaaatacttagctcgtaaaacctattcgcattattaataagagttacctctttccagtggcaccaccgacatagtttcgccgcacggaattccgctagatctgctcgatcgtttgctgatcatccgcacactactctactccactgccgacatggagcagataatcaagttgcgcgcccagaccgagggactgcagctggaggagaacgcatttacacgtctcagcgagattggaaccagctccacgctgcgctacgccgtccagctgctgaccccggctcatcagatgtgcaaggtgaacggacgcaaccagatcagcaaggatgatatcgaggatgtgcactcgctcttccttgacgccaagcgctcctcgaagcatttgtccgaaaagaacaataagtttatgttgtaagtttgacgattcaagctgaattgtaattccatttgcacggatttcccagtaaaaatcaaataataagcaatttaatttattgtaatgatgtggtaatttgaaaacattcaaatgatcatttcaatggcgcttcaaacatcgacaagaaaagtgtgtacacacttcaactgaaagtaaatcggaaatttttggttggtgtcttagctagattagggcgaatcgtgaatttctttcaacggtttttttaattgatacgtagataagcatatttaaacgaactcggaggactaaccattttctttttataattcggttgtttgattgtaattattttgtctttcgttttccgcttaatcttccatatttgctgcttgtgatcgcagcgatatggcaacttccactcgcgccaccctcattttcccaccatgcgacatcagctgctcgcgttgtttggccaagaattccaattggtggtgagttcagttactcaacgagcgtcgagctgcgcactgccccaaaataaatagccagggagctccgctgaagtgcatgcagtgaatagtatatttaacgattcgattcgcggcgtgggcgtcttcttctttttcggcccgttcccctcgcgtcttgcatcttgcctctcgctcgctccaacaacgccggcaactgcacttggcgtgcgtgtgtgtgtgtaagtgtgagtgcgtttgtggttttccgaaagaatgtgaaatcataataaaagtcgcgatttgttgttgctattccgcgcaattagccactatttaacgcacatgtgtgtgtttcgagcttatttgtgtgtgaacaaagccaggcaacccgttttggcggaaataaatgcaatcctgatggcaggatcaaggtaaaatggaaacatttgggatctattgcatgaatgaaccaatgttgaagaagcagcacaagcagcagcagcaacaacaacacagcggcagctaggagagcgaaagagagcgaaggc

SEQ ID NO: 24602 - DNA, 1384 bp, DROSOPHILA
aacaaagtgtgcttctaatttccaatcaaaacgccggcagaaaaacaaattttatccacggcaacgaaacaatagtttgtttgatcgttgcaacgcttgacttcacatttcctctccctcgggcgaaaaacagctgaaaccggaaacggatcagagtattagcatcaggcaggacctcatcaaatcgaaaaagatggccggacgagcgcttctgctggctgggccaccaggcacgggcaaaaccgccattgctctggccattgcccaggagctgggtaacaaagtgcccttctgtcccatggtcggatcggaggtattcagcaatgagatcaagaagaccgaggtgctaatggagaatttccggcgctccattggtctgcgcattcgtgagaccaaagaggtgtacgagggcgaggttacggaactcacgcccgtggaaaccgagaatcctatgggtggctatggcaagactatcagcaatgtcgtcatcggcttgaaaacagccaagggaaccaagcagctcaagctggatcccagcatctttgatgccttgcaaaaggaaaaggtggaggtgggcgatgtcatctacatagaggccaacagtggtgccgtaaagcgtcagggtcgcagtgacacctttgccactgagtttgatctcgaaaccgaggagtatgtgccgctgcccaagggcgatgtccacaagaagaaggaggttatccaggatgttactctgcacgatctggatgtggccaatgctcgtccacagggcggccaggatgtgctctccatgatgggccagcttatgaagccgaagaaaactgaaatcactgacaaactacgcatggagatcaacaaggtggtaaacaagtacattgaccagggcatagccgagctggttcccggagttctcttcatcgatgaaattcacatgcttgatttggagaccttcacctacctacacaagtccctggaatctcccattgcaccaattgtgatttttgccaccaatcgtggacgctgtgttattcgtggcaccaccgacatagtttcgccgcacggaattccgctagatctgctcgatcgtttgctgatcatccgcacactactctactccactgccgacatggagcagataatcaagttgcgcgcccagaccgagggactgcagctggaggagaacgcatttacacgtctcagcgagattggaaccagctccacgctgcgctacgccgtccagctgctgaccccggctcatcagatgtgcaaggtgaacggacgcaaccagatcagcaaggatgatatcgaggatgtgcactcgctcttccttgacgccaagcgctcctcgaagcatttgtccgaaaagaacaataagtttatgttgtaa

SEQ ID NO: 24603 - protein, 396 aa, DROSOPHILA
MAGRALLLAGPPGTGKTAIALAIAQELGNKVPFCPMVGSEVFSNEIKKTEVLMENFRRSIGLRIRETKEVYEGEVTELTPVETENPMGGYGKTISNVVIGLKTAKGTKQLKLDPSIFDALQKEKVEVGDVIYIEANSGAVKRQGRSDTFATEFDLETEEYVPLPKGDVHKKKEVIQDVTLHDLDVANARPQGGQDVLSMMGQLMKPKKTEITDKLRMEINKVVNKYIDQGIAELVPGVLFIDEIHMLDLETFTYLHKSLESPIAPIVIFATNRGRCVIRGTTDIVSPHGIPLDLLDRLLIIRTLLYSTADMEQIIKLRAQTEGLQLEENAFTRLSEIGTSSTLRYAVQLLTPAHQMCKVNGRNQISKDDIEDVHSLFLDAKRSSKHLSEKNNKFML

SEQ ID NO: 24604 - DNA, 2809 bp, DROSOPHILA
cttgggagcaccctgctccagatttctttgttgctcctccgttagcatcatatcaccctcgacaaatccacctgcctcctccggatcgtagacacctgctggcaggggtttgccagagttaagcaccacttgcagcagaagaacatatattattccagacctcgacatcttgccagttgagttcctcgaactagactaataaagtggccacggagaacggctacctaaatataaaacacgcaggaaggctgcccatacaacttagattagatacaaaaaggcaaaaactttttcgcaaattgataaagacaatcgaaacgtccaattagatcaaggtttatggtatatcaccattttgtgaggcgcccatgtgaaaaccttccattagtcatgtaagttttcgataaatatctctaaaatacgtcacgggttgtctcttggattgccgcaattcacaatgatagatagggaattatatgtagaaatcagaaattcaagtggagtagtgattggattcttaagtgccgaacaaaataccaaaaacaattataaataatttaaaccactgctacccaagtatgagtaattcccccaaaatcgtcatttgattactgattattacccaacaacgacgacacgcgtaatcgttctgctgaacacaagagtttgcttggctgcccaaaaggtgttcaaattcaaagccttatcgcaatacaacgttctcttcgcttctccacactgggaactacatgataagccttgaaggcagaaaacatgacaatcaatgggttctcaattgcatgctcaataggaaagagactgacgtgccatcgcactcgaaaaattaaaaaaaaaattgaccgcagccgtaagtaatatatttagtcaaacaattagaaaaagactttgctcgactattaccagaatacctataaattttgcttaattcaatttcaaagcaaaaatgacaaattttatgactaattcaaatatattttgcctaaacatgatcagggcatctatacattttgttcaacttgcgaatatccttttcgctcatataaaatcgttgccccatattttcggctccttcgcggaggggcacaattgtgggttggccattcctggaaaaggcccttggcacatagtgcataacactttcataatcgtagccttcgtcaaagtcgtgccacgctgtagaattatcgttgttcacgaaattgatattgtactgcggatttatatttttccactggatgctgacgtattggtcccgattttgggacacatgctgatgttcgaagcccaaaacgtgaaggagctcgtggataatggaaccgatgcgaaagcagccttcgccaagtgggtaaatctccagatttaccacctgtgtcttattcctatagcccaagtgaacggtattgcagcccaaaccttttgacgtaatgacgagcgccatgggaaaatccatttcagtagctggcttgaaaataacgcatgagttttcctctatgatggaaatggctctaagaatttcccgataatgactgtcggcttcaagatttatgtcaggataggtcagatcttatgtgatatacagaacataccaaatgcatcatcttcaatcatatatggtacagtgcgattgggccagtgataaatctgattgacaattccgtttcgagtacgaattggatgagcttttatgtccccctgataaaatccggcaagcagctccggatccttaaagagttcactaaaaacagtaggagtgaacaaaaaaatcacaccccatatctgcggaaacatggtggagacaggaaacaaactgaacgcttcattaacccatgccagttttactgtataccatgactggtctagtgggtatatttaattcgacatgcctatagagaaagagaacgggagcaattatattatccaacttttaactagatatttatattagataacgtacattagataccacgctaggtttcttatataaatgtatatatacaacttttattaataataggaattatgggaaatattcttttaggaatgtatagcatatcctaactgtgcgcattctcgggaatccacgattttctatctggtagagtatatatattgtcgctggatcactgtttattcttttcgtgaaataaaaagtgatttttcagttactttatatttatatttaatgcctgaaagaagaattgcacaaatgttcaaatattatttgcatactttcaggtgtagaagcttaaattgaatctcttcaatttattctggaagctttgaaaactcctggttacccacttaaaagaattcagtaacatgtaagcaaaccgactcgttaatgttttaaaacgactcaagtatttaataaataaacatgaataaaattcggttaaagcatctatatttgcgttatgatctctttctatttattacacctgcctggggcacttgtacatgacgttaagtttgttaatatccgactgggtcatttgcaatcgctgccccataagttcttcggcaccttcctgtagcggcacaatggtcatctctccgtttttagagaacgcataagcggtgtagtgtagtacactggagtaatcatagggttctccgtagtcctcgacggtttcattgtcgtacttgttgaagttgccctcagtgccctcagttatgttttcctcagcaattcggacatagtcatcgcgattccaggtgctttgctggtgatagaagccaagggcatgcaggaactcgtggacaattgttcccagacggaagcagccgg

SEQ ID NO: 24605 - DNA, 756 bp, DROSOPHILA
atgtttccgcagatatggggtgtgatttttttgttcactcctactgtttttagtgaactctttaaggatccggagctgcttgccggattttatcagggggacataaaagctcatccaattcgtactcgaaacggaattgtcaatcagatttatcactggcccaatcgcactgtaccatatatgattgaagatgatgcatttgccgacagtcattatcgggaaattcttagagccatttccatcatagaggaaaactcatgcgttattttcaagccagctactgaaatggattttcccatggcgctcgtcattacgtcaaaaggtttgggctgcaataccgttcacttgggctataggaataagacacaggtggtaaatctggagatttacccacttggcgaaggctgctttcgcatcggttccattatccacgagctccttcacgttttgggcttcgaacatcagcatgtgtcccaaaatcgggaccaatacgtcagcatccagtggaaaaatataaatccgcagtacaatatcaatttcgtgaacaacgataattctacagcgtggcacgactttgacgaaggctacgattatgaaagtgttatgcactatgtgccaagggccttttccaggaatggccaacccacaattgtgcccctccgcgaaggagccgaaaatatggggcaacgattttatatgagcgaaaaggatattcgcaagttgaacaaaatgtatagatgccctgatcatgtttag

SEQ ID NO: 24606 - protein, 251 aa, DROSOPHILA
MFPQIWGVIFLFTPTVFSELFKDPELLAGFYQGDIKAHPIRTRNGIVNQIYHWPNRTVPYMIEDDAFADSHYREILRAISIIEENSCVIFKPATEMDFPMALVITSKGLGCNTVHLGYRNKTQVVNLEIYPLGEGCFRIGSIIHELLHVLGFEHQHVSQNRDQYVSIQWKNINPQYNINFVNNDNSTAWHDFDEGYDYESVMHYVPRAFSRNGQPTIVPLREGAENMGQRFYMSEKDIRKLNKMYRCPDHV

SEQ ID NO: 24607 - DNA, 2793 bp, DROSOPHILA
gaaggtcaggcatgaaatggattcgattttctgaatagcgctcacgatgtggttacgatgttcttcatctattgcgataaaatattatagttttaaaatatatttgatattcaatacataccaatatagctattaatatggtaataaataatgcgattgggccatctataggtttcgttgcgccaaatatttctcgaggatccactgggcaccatatcaccctcaatatatccagctgtcagctccggatcggtttctatccgtatggatggagctgcccaagcgacgttgactacaaccagaagtagaagtaatatactgtaatagcacatattggctgctagacttcccattcaatactgtttgggcagttcaatgcacgagcgttgttcaattccgcagccgtagttaatctttagtatttatgatttttcaaattagtagtgccgtttttaaatgatatctaatcatttgtaggacggtaggaaaggtaagcagcaattacgtttataatctcgggcaattgaaaggaaaatattaaattgtactagtttggcaaaacttacaaattttaatttatagagtccaattgtactttcttggagaacatataatatgttttaacataaatattattgatactatattctatgtactctgaatgcttttattgcttaaccaaggtacagtatgcaaataaatatggtttcataaaaatcaaataattataagcttaaacaaactaataaatataaaaccttcaaaacaataatctctgatatgttgcatgctttttacttaatctggagaactttacttcactgaaacaaaaatagcacatctctataaaaaatcacaattgatttaaaagatttgtttatagccgcaattgctctttaaagtaattcattctttgtgttctgtaagaataaatgcattttttctgttctgaaaatgtataaaagccgcttgctcctagcaatgttatatcagttctgaaatgcattaccttgcactcgctgtgatttttggacttgggtcttcggctaacggtcgtccttccatcaaacttcaagaagacgacatcatactaatttcagaacaactccaatattttgaaggaaatctagaaggtcgtgttgtaaaatcatggtcagaatattactggaagggaagaacgttggtctacagttatgccggaggattttgtaagtaaactgtttaagaaattctgagcagttcttaaaagttctatcttatattttattttgatcatagcttccttggatattgcaagtattgaaagtgcaatggcagaaatatcatcgaaaacctgtgtgaaatttcgccgaacggaatacaagagggagccacaagtagttatacaaaaagagggttcaggatgctggtcgtatgtaggatatttgggaagagcagaccagaccctcaatctaggcagtggttgtatgtccaataggactattcagcatgaacttcttcacgccttaggcttctttcacacacacagcgatccgcagcgggataaatatgtgaggatccaaaccgataacatcagatccggtcatgaacataactttcaaaggcttcgtgccaatggagtgacaaattatggatttggctacgactacgacagcattatgcactatggtccatttgctttctccaagaacggacagtcgacaattgttcctttgaaatcccatgcgaaaatcggtcaggcaacgcaaatgagtccaaaggatgtgcaaacactgaaacgcatgtactgctaattttattatctttcgataaatatcacaacaattataacactgtgccctggatgtctatgaaataaaagaaataatataaatcgtaactgaatgctttgtatgccgaaatgcatctcctattaaatttgacttgcttctttaacgttaggatacaaaaaagcagtgtaatggtgttaatttcatatacatagccagactacatcctctcgaagtaatcgcaacatttgcaattctaacgagctgttgcacttgacaggaaactacagtctcccgccccgaaaaacttattccacaaaccggttaatctggaaaacaaaaacgtagaggaagtgtttgcctttgccagcaactaaaaattgaatatttagtggtcgtaattaaaaattagcgcgccaggcaactaaccatgcgaccgcgcacctacagctacccacctaacggctgagtccttccgtataatcccaggactaactatctgcgtagaccgtcccgtgttttcggccctctatctctctcacacaaggactggcatatacatatatttggttttttaatggcacaaattgcactaaagccaaagctcctccagagctacctgcccacaaaacggaagtcgtaaacatttaatttatgcaagcagtgcattcgcttttttagttgcaactaaagatgggctaacgtcatccagtatggaataggtggctaagcttttgtgttgctggcggctttatcaacatttgagtttgttgcctttgcgacaggacattttaaatgtatacttacctcaacagataattttacgagggtgttaagtcttaagaacataacgaaataactaaaatcgtccaagagcgaaagcttaagtttaggtattggcgatgatcattttcagactgagaatgagacgattttcagtcgatttaaggttagactgccatgcaaccctcaactcaattaaatgtactttttataaaatgttatcacaggccaacgcgattac

SEQ ID NO: 24608 - DNA, 723 bp, DROSOPHILA
atgcattaccttgcactcgctgtgatttttggacttgggtcttcggctaacggtcgtccttccatcaaacttcaagaagacgacatcatactaatttcagaacaactccaatattttgaaggaaatctagaaggtcgtgttgtaaaatcatggtcagaatattactggaagggaagaacgttggtctacagttatgccggaggattttcttccttggatattgcaagtattgaaagtgcaatggcagaaatatcatcgaaaacctgtgtgaaatttcgccgaacggaatacaagagggagccacaagtagttatacaaaaagagggttcaggatgctggtcgtatgtaggatatttgggaagagcagaccagaccctcaatctaggcagtggttgtatgtccaataggactattcagcatgaacttcttcacgccttaggcttctttcacacacacagcgatccgcagcgggataaatatgtgaggatccaaaccgataacatcagatccggtcatgaacataactttcaaaggcttcgtgccaatggagtgacaaattatggatttggctacgactacgacagcattatgcactatggtccatttgctttctccaagaacggacagtcgacaattgttcctttgaaatcccatgcgaaaatcggtcaggcaacgcaaatgagtccaaaggatgtgcaaacactgaaacgcatgtactgctaa

SEQ ID NO: 24609 - protein, 240 aa, DROSOPHILA
MHYLALAVIFGLGSSANGRPSIKLQEDDIILISEQLQYFEGNLEGRVVKSWSEYYWKGRTLVYSYAGGFSSLDIASIESAMAEISSKTCVKFRRTEYKREPQVVIQKEGSGCWSYVGYLGRADQTLNLGSGCMSNRTIQHELLHALGFFHTHSDPQRDKYVRIQTDNIRSGHEHNFQRLRANGVTNYGFGYDYDSIMHYGPFAFSKNGQSTIVPLKSHAKIGQATQMSPKDVQTLKRMYC

SEQ ID NO: 24610 - DNA, 3824 bp, DROSOPHILA
tgaaaagggattactgccacgtagaacacgatcattgcttgaaaatcgattaatcgatagcgacaaaaacgccgaaaagtatcgccgcagccataacatcgctgcgcgctgcgcaaatgttttgtacatcgctagatcagatcgattttagagttcgggtggagtggacggaacggagcggcgacggcggttgtttaaatcgcccgtttattattgttttagtttcgctctcgcgtgcgtcggtttttactatgttattgcacttgattatattctgcgtgcattaaaaataatacctcctttgccttgttgctgagctacatctctaattttttttaataattgttaaagctagtgctgtttttgttaaagtgttttatcccctaagtccaacaacaacaacaacaacaaccgaaaacgcattcctgcacacgaaggagaaaaaagatgcgtgtgcgtgtgtattagtgcagtctctctgcgctgcgtttgtgtgtgtgtgtgtatgctgcaactggaaaccaaaattaaccaacaacaacaacgttaaaccaagagtagtacaaaaagtaaagataaataatgaaaaacttaaccaagcgacaatgtgatgcgaaaaggcgataaaataacagcaaaaacaaagcgcgaagagaaagagaaaaaacgcggaaatgcagttgagcgcataatttttataagccaagcgacaaacgcacactgcaagaacagcaacaaaaataactcaaaggcgaagccgagaggggaagtaaataaaattcaagaagtaaaaacagaagcatcagcaaaaaagagaaagaagtagaagtactagaagaagaagcagcagcagcagcagcagcagcagcgtcaacaaacacaaatacaaaatatacctgcgtgtgctccctctctctgtctctttctccacctctctcactctgcgaatgtgtgtgtgtgtgccatgctctcgaaactacactgagcgaaaaataacaaaatgttgcaagccgctagcagcacaacaacagcaccagtgggaaatacagcagacacaggaaacagtgaaagcccgataatagcgacgccggaggagaaatcccaaagacgacgctccacattctatgtaccattggtaatagaagacgaagaggagaccaaaaaggatacgcccgcagatcatctggtccaaaagtcctcgagcaatacgagcctaagtagcaatagcaattccctaacgaattccgaaacaaaatcatcgaaaagctatagtctgcgcaaatcgagttcggtgaaaagcggcgtggccaaggttagtgctctcttcgagcggaaaactccatcgaaaatgtcgccaccttgcggcttcaattggagcatcagtggcagcgaaaatacggcccaatactccgataccgatgatgatgaggagaactccacggaggcacgtcatcgcgaacagctgctcaagaccctgcccagcggtaataataattccaccaccgcatccccatcgaaactgaaacgatatggcatcgtactgaacgtcatcagtttgaatggcagcgataacgagcagtcctcgttgggtagtaatggtagcagcatgccatccatgccatcaatgccaaacggccagaacataccaaatgcggctgcgcccaggactcatttcaatgaggagaacgacattgtcctggccacgcccccgccgcccaaacagcaggcactatccgccgctcatgagtctaacgactacgatgatgactcagaaataagtcgcatgcagacgaacacctcgacgcccataaagctaatgaaatcgcgatcgcgaaccaatatactagccgtaccgctgccatcggtggagcgtggtttggccacaacaaatacgacgcccaataataataatatcaatggtaatagtaatggtagtaccagcaatacgaccactacgacaacgacgacgacgttgattacgcttcgtgcaaaatcgaagaccctgccgcaaaatctatcgccctcagttgttttacgcgaggcagccgcactggatgagctcgagaagaagcgggagaagtatcaggagaagcaggagaagcgggaaaagctgcaggagaaacagcgtcagctgttcggcggcagtacggccagtcagatagcgggctcttcgccctacaaactgcagaacagctgttcggccacctcgatactaacgcacagttttccgccgaagaacctttttctacttaagtccacgcccaaactgtcaacggatatagccgcggccacgcccccaaatacatcggcaatctgttcgccgcccaagaaatcgctgagcttcattcgacgtgcccactccaccaaggtggcacgcagcaattcgctgcttaaaccaaatcaggctggaatcctaggatcgggcagtggatccaacggactcggagtccatcagggcgtcatgcagggagcattgtccatcagctgtgctggggacaattccagcaacaatggcagttggggcaaacacttctaccagccctacgatgtgtgtcccttgagtctggacgagctcaattgctatttccaggcggatcagtgcgagaaactgatctgcgaacgattcaagatcagggatctggccatacacatggcatccgcatccgcaattggagcggatctctctgtgaccacagagaatgagacaacggcaacggcggacgacgatgcgggacatcattcgggtaggtcgattcaccccccccccccaaaaaacgaaaattctttgtccctgctcaatgggcagcaagtactacatacataagtatttcctgtggcagacaaccgaaaaacaacccctttgcgatcccatataccatttcatttcgatcggatcgaaacaattcccgtttgtatcgagcaacggtgatcgcatttggtattcccctatctgcgcagggtcacgataagataagacataaccccgcctcttaatgacagtacgggccaaagttataggtctgcaatagatatctttatccgaagaactgagaaactaatcacaaaggtgttgggaacgtatctaaaattccctttttccattagcaagatcacttctgggtatcgaaagcgaatcccattactgtatttcaattttgctcattaatatcgttgggttttagatataatatgaggaatcttagtagatctttagtagaaaataatattgtttccatatggaatgataccgaataaccaactccacagcacaatgtcatacttgttgtttgtatattaagcagtattggtatttgttgatatttataatacttcagatacgcatcatattatatcgaatttttactattattgtacaaatctggtagacattgcctaatgatccacagatctattaactaaagtacaaagtatataacaaattgtctattaggggtgataatgactaatataaaaactccataacacaatgttatgcttgtaaattaccttctatttaatgggcagatgtttgaagggctattattatgaccgcagctgtgcccactgccccccctcccttttcgtgcgttcttcacactttctggcgtctcttattaagccttcctgtgcgtttcttttgcgacgtttaccatcatcaagcctgccagctactttatttacacacgatcagaggtgaaccctcctcccccaatcaacgccaccatatacataagcatatatatatgtatatgtatttatgtgcgcccaagtaatatgtattcttttggaacgtagcccaattgtgtggctcaattgtagctcaa

SEQ ID NO: 24611 - DNA, 1824 bp, DROSOPHILA
atgttgcaagccgctagcagcacaacaacagcaccagtgggaaatacagcagacacaggaaacagtgaaagcccgataatagcgacgccggaggagaaatcccaaagacgacgctccacattctatgtaccattggtaatagaagacgaagaggagaccaaaaaggatacgcccgcagatcatctggtccaaaagtcctcgagcaatacgagcctaagtagcaatagcaattccctaacgaattccgaaacaaaatcatcgaaaagctatagtctgcgcaaatcgagttcggtgaaaagcggcgtggccaaggttagtgctctcttcgagcggaaaactccatcgaaaatgtcgccaccttgcggcttcaattggagcatcagtggcagcgaaaatacggcccaatactccgataccgatgatgatgaggagaactccacggaggcacgtcatcgcgaacagctgctcaagaccctgcccagcggtaataataattccaccaccgcatccccatcgaaactgaaacgatatggcatcgtactgaacgtcatcagtttgaatggcagcgataacgagcagtcctcgttgggtagtaatggtagcagcatgccatccatgccatcaatgccaaacggccagaacataccaaatgcggctgcgcccaggactcatttcaatgaggagaacgacattgtcctggccacgcccccgccgcccaaacagcaggcactatccgccgctcatgagtctaacgactacgatgatgactcagaaataagtcgcatgcagacgaacacctcgacgcccataaagctaatgaaatcgcgatcgcgaaccaatatactagccgtaccgctgccatcggtggagcgtggtttggccacaacaaatacgacgcccaataataataatatcaatggtaatagtaatggtagtaccagcaatacgaccactacgacaacgacgacgacgttgattacgcttcgtgcaaaatcgaagaccctgccgcaaaatctatcgccctcagttgttttacgcgaggcagccgcactggatgagctcgagaagaagcgggagaagtatcaggagaagcaggagaagcgggaaaagctgcaggagaaacagcgtcagctgttcggcggcagtacggccagtcagatagcgggctcttcgccctacaaactgcagaacagctgttcggccacctcgatactaacgcacagttttccgccgaagaacctttttctacttaagtccacgcccaaactgtcaacggatatagccgcggccacgcccccaaatacatcggcaatctgttcgccgcccaagaaatcgctgagcttcattcgacgtgcccactccaccaaggtggcacgcagcaattcgctgcttaaaccaaatcaggctggaatcctaggatcgggcagtggatccaacggactcggagtccatcagggcgtcatgcagggagcattgtccatcagctgtgctggggacaattccagcaacaatggcagttggggcaaacacttctaccagccctacgatgtgtgtcccttgagtctggacgagctcaattgctatttccaggcggatcagtgcgagaaactgatctgcgaacgattcaagatcagggatctggccatacacatggcatccgcatccgcaattggagcggatctctctgtgaccacagagaatgagacaacggcaacggcggacgacgatgcgggacatcattcgggtaggtcgattcaccccccccccccaaaaaacgaaaattctttgtccctgctcaatgggcagcaagtactacatacataa

SEQ ID NO: 24612 - protein, 607 aa, DROSOPHILA
MLQAASSTTTAPVGNTADTGNSESPIIATPEEKSQRRRSTFYVPLVIEDEEETKKDTPADHLVQKSSSNTSLSSNSNSLTNSETKSSKSYSLRKSSSVKSGVAKVSALFERKTPSKMSPPCGFNWSISGSENTAQYSDTDDDEENSTEARHREQLLKTLPSGNNNSTTASPSKLKRYGIVLNVISLNGSDNEQSSLGSNGSSMPSMPSMPNGQNIPNAAAPRTHFNEENDIVLATPPPPKQQALSAAHESNDYDDDSEISRMQTNTSTPIKLMKSRSRTNILAVPLPSVERGLATTNTTPNNNNINGNSNGSTSNTTTTTTTTTLITLRAKSKTLPQNLSPSVVLREAAALDELEKKREKYQEKQEKREKLQEKQRQLFGGSTASQIAGSSPYKLQNSCSATSILTHSFPPKNLFLLKSTPKLSTDIAAATPPNTSAICSPPKKSLSFIRRAHSTKVARSNSLLKPNQAGILGSGSGSNGLGVHQGVMQGALSISCAGDNSSNNGSWGKHFYQPYDVCPLSLDELNCYFQADQCEKLICERFKIRDLAIHMASASAIGADLSVTTENETTATADDDAGHHSGRSIHPPPPKNENSLSLLNGQQVLHT

SEQ ID NO: 24613 - DNA, 5296 bp, DROSOPHILA
ggaagccctgcagctggggcagaggagcggcacgccggagatcttggcaacatccgagcggatgaaaacggcagggccacctttagatttgtggatccagtgctagaggtctgggacataatcggaagggctgtcgtcctaacagccaatgccgatgacctgggacgcgggggcaatgatcagagcctgattgacggcaactctggggaaaggtatgtaaatatgccccactttcagattgatcattgatttgtataactcctttcccactaggattgcgtgtggtataattgctcgttcggcgggcatcttggaaaactttaagagaatctgtgcatgtgatggggtcacactttgggatgaacgcaataagccactggctggcaaggagcgctcacaaaagctgtaaacttgtttccatctttaatcttgtaaataaaattatcttatctctaggtgtcactttccacattttgttctagaagtttctgtcgcgacaaagtccacagaacatcaattctcgttccgcaattaaaattagtatactaaaaaccacattcgtagcagttgattttaatggttttaaagttttatttaaaatatttctttgctgtttttctttttgtatttcttagttaaaattaatttgctttttaattattattatctgttttgctctgccaatgactgccggattcgtgtgatgttcgtggttaactacaatttgtttttgcggggcgttaaaaccgaagaacatacagacacttgttgtacgtgataataataataataataatgaataatattcgaaatgcctattgcatttgatattaatagatatatgtgtatataatattaatttgattcctccgttaacactacggcgcatgcctcgttccctaatccacatccgtggggtcaggtgaacgacggcatgcacgctttatatgtaaataagtggtaaaaaatatgtaaagtgtatatgcgtaggtcctaatgcttatttactgcgtttgccgggcgtatttacatatctgttggccttttgtactctacgtgcttttttcgcctcctccggctcctcaagagcctccgatccgggcgccacattgtccgttgtcgcagccacccccagattctgggacacaggactgacaatcacgccgcttcgctgatgattgccataaaacagttttggggagtagcctcccgcagctttggcagctcctgcatttccggtggccatcggctgcgattgggactgggcaacctctgctgccttcgaggtggacgctatggcattggactggctctctgatggcatcttgcgcttaagattcttggctgctgtgctcacggccagcaacttggccgtggtggactcatccggcgaggcaaactcctttagctcgcccacactaacatcgctctcggcatccacatcttcgttgatgataataaagtgctcgggatccacaccctggttgaccagcgcttgaaaatcttcaggcggcaccacaggcgccaccttttgattgcacgaactgcatacggcagggatggccggactcttcgaacgccagaactgcagctcagttttgcacttgttgagctcctgcaagggaagtaaatcaatgccaatcaatagaatgccgagcctcgactcacctgcaaaagggtggagaacttgcgagacatctcctcgttcttcttgtcgttttcgtccagacgattggcatactccagcgtctgcttttgctgctccgatattagatttgattgctcagccagctgcttgctctgctcggcggccttgcgcttgcaggtgcgaagctcggtgcgcagcaccgatagctggttattgtacatcttcatgccctgcttgatcttgcggatgcccttgcggagcaccatatggttctgaggcggcgagttgctggcgctgtcttcgagatctgaactgatggcaagcgtggctgttggtttggaaatgctgcttagttttttcgacgcctgggaaagatcaaaacacttacgtcgcttagttgtagtgggcagcgtatagaagtccttgttgaaatacgccagccccggtagcgtggcctcgatgcggtccttaaagtattccatggccatagtggagagatcgaagagctcgtcggttacccgataaggtcgctgcagcctgggcgtaatactgatataattgagaatcgcctggacttcgtctagtatctggaaataaacaaccatcttattagcgcttgtcgagttcgggtatgctattcactgcacttacggcgcccggaaagaagcaacaatggccccgctcgatgtgcttgcccatggacatctggagcagggatagacgcatgtagcatgtctcgatgatgtcgcactcgcaggccaacggatgattacgacgatgggactcccggcgcggcatgctggccttgatcgcctggaagcggctcaatgtggtcttgatctgcttggtgaaggctgtgttcagcatggccatgcaaatgtcgttcatgcggtgcgaaacctgcgagtatgcatatccgggaatcaagttaataggggggtaagtaaaacagataaaaatgtgtcgtgctttgggctaagctaagctcagattccgacttcttttttcggctgctgtgcccgcattcatccacgagctagtggttctgcctgttattaaattatatcagattacatttgtctccgctacctacgacaaataaccgtgcatacatacacaacgatttgtggatgggagacgcgggtgcaggcaaaaaattccaacgagaaacaaacaacgaagtgtagttaccctctgaaccttgaactaaagctgttctgtgaaagtgttcttggatttgtttcttacgcagtctgtatgcgataatcgtgactttaaaatggtgatatttctataattggtgtaatttgtttgaaaagtagaatattagatattcataaatgtttatctctttatttgaatgtgtataatccttcaactggcttgttcttttttcactttaatgctttctgtgtaaagctagttgtttattaaaaaaaaaagtgaatgaactcaaccattacctagtgtttttaaagccgctaaatctgaaaaatgtaatacatttgctcatacccccaaccgaagccaagattccaagttctttgctaaaaataagcattcgcaaatgcatgtgccctcgtgacaaagttttaattgcctcctgccaagggaaatccgaaatccgttgaggaaagtgcaacgcatggcgcaaaataatgctcataacagcagagcgacagaatacaccttatacatatcagaagaggcatacaagtgcaggtagtttgttggttggataacccagtcgtaccacgcttgcacttgggcaaattgctttttattgatttaatagccagcgctttgggtggaacagaggggcagcagtgcacttaccaatctgagatttgaaactttcttgtagtccacgtagctgaggatcttctcaatcagctcgttgggaagatcgtacagactgggtgcgctggtggtggtggtggtggtggccgtcggtggacgctgccgttgcatctgcatggtgtacgagtggaggcgagtcaccgcactggcggactcggccaggctgcccgccgagacgacacgataagaactgtgggcctggttaccctgatagctggtggttcgccgcaggacggaggaacggtttgctgtggactcggggggctcttgtactccagtacccgatccggatgacactgctgatccggaagccattcccgttccagaggccgatcccgaacccgcgcccccgaacggcgaaaccccctccgaagcggacgtaccgcctccactgcacatttggcgggtggacaccatttccttctgcttccagtggcgtttcggtgctaaatggacagaattcgtttgcagcagcgttttgaagttgctgcaatagcggaacacacacagaaaacaacgtatatacgcattaattcgactatatacatatatatgtagcgtctctatgctgctttttctcccccctttcgaaatttctttgaaattttgtgctacgcactttgcgactcgatttcgagatggcttcgtacccgttttagtaaatggaactattgcgattgcattgtttttggacgcgcttcgccgtggtccaatatgtctagttctttgagacgcagttcatccacgctgacatccactttaacgcagtttttcgagcacaattaaaactacatacacaatccgtggcaaaaaaagtcaaagtgtctagggctggaagcgcatcgatggcaccgacaatcgattgcgccgatagcttgcaagcagtgaagttgctgcagaaacatcgattattataggctgattccactgaaacattgctgttccaattgcgcccagcaagccatttcaaaaaataaatgtttttttcttaaccaaaagtgaaattcaagctcaattcccacataccactgaacaattagaaaacaaacgacgaataaattgtgccaacaggtgtttgaatatgtatttagcacgtcgttacaaatagatcattgcttcgttcgataacaatactcgaaaaacagtttgcagatagaatttgttcctttgactgggtaaattgtctaaatactttaacatttaatttagttgggctgaagaaccaacaattacgataatatacgaaacgttttccgctaataggtcgccagactcttcggaacggctgcaatgtagaatgaactattaacgttattcagtattcgagattcaaaattcaagaatacacgatatttggaaaaatcataagaaagaatcgactggcgagcaatataaataagttatgtatttgtgcttttttatgcgtctgtagattatgaaatactttcgtatgtgctgctgtcatgggcctcttcgtctgatcttggtaaaaaccataaaacggatcggatgcggtgccaaaacaacttaaaaagcgaacacagaaactgattcgagggtgcggataggtggacattgatgcttcgatgcagcgatggtggtgataagcggaagtggggatcagagtccggatccgagtccgcttaggcgacggcgtcagtgtcacactcctcctcgacggtgatgtacataccctcctcctcgtaggcggaatcgtgcttggccaggatgcgcagcaggggacgcaggcgcagccaccactgcttcttcgggatgcgttgactggaa

SEQ ID NO: 24614 - DNA, 2020 bp, DROSOPHILA
ttttaattgtgctcgaaaaactgcgttaaagtggatgtcagcgtggatgaactgcgtctcaaagaactagacatattggaccacggcgaagcgcgtccaaaaacaatgcaatcgcaatagttccatttactaaaacggcaacttcaaaacgctgctgcaaacgaattctgtccatttagcaccgaaacgccactggaagcagaaggaaatggtgtccacccgccaaatgtgcagtggaggcggtacgtccgcttcggagggggtttcgccgttcgggggcgcgggttcgggatcggcctctggaacgggaatggcttccggatcagcagtgtcatccggatcgggtactggagtacaagagccccccgagtccacagcaaaccgttcctccgtcctgcggcgaaccaccagctatcagggtaaccaggcccacagttcttatcgtgtcgtctcggcgggcagcctggccgagtccgccagtgcggtgactcgcctccactcgtacaccatgcagatgcaacggcagcgtccaccgacggccaccaccaccaccaccaccagcgcacccagtctgtacgatcttcccaacgagctgattgagaagatcctcagctacgtggactacaagaaagtttcaaatctcagattggtttcgcaccgcatgaacgacatttgcatggccatgctgaacacagccttcaccaagcagatcaagaccacattgagccgcttccaggcgatcaaggccagcatgccgcgccgggagtcccatcgtcgtaatcatccgttggcctgcgagtgcgacatcatcgagacatgctacatgcgtctatccctgctccagatgtccatgggcaagcacatcgagcggggccattgttgcttctttccgggcgccatactagacgaagtccaggcgattctcaattatatcagtattacgcccaggctgcagcgaccttatcgggtaaccgacgagctcttcgatctctccactatggccatggaatactttaaggaccgcatcgaggccacgctaccggggctggcgtatttcaacaaggacttctatacgctgcccactacaactaagcgacccacgcttgccatcagttcagatctcgaagacagcgccagcaactcgccgcctcagaaccatatggtgctccgcaagggcatccgcaagatcaagcagggcatgaagatgtacaataaccagctatcggtgctgcgcaccgagcttcgcacctgcaagcgcaaggccgccgagcagagcaagcagctggctgagcaatcaaatctaatatcggagcagcaaaagcagacgctggagtatgccaatcgtctggacgaaaacgacaagaagaacgaggagatgtctcgcaagttctccacccttttgcaggagctcaacaagtgcaaaactgagctgcagttctggcgttcgaagagtccggccatccctgccgtatgcagttcgtgcaatcaaaaggtggcgcctgtggtgccgcctgaagattttcaagcgctggtcaaccagggtgtggatcccgagcactttattatcatcaacgaagatgtggatgccgagagcgatgttagtgtgggcgagctaaaggagtttgcctcgccggatgagtccaccacggccaagttgctggccgtgagcacagcagccaagaatcttaagcgcaagatgccatcagagagccagtccaatgccatagcgtccacctcgaaggcagcagaggttgcccagtcccaatcgcagccgatggccaccggaaatgcaggagctgccaaagctgcgggaggctactccccaaaactgttttatggcaatcatcagcgaagcggcgtgattgtcagtcctgtgtcccagaatctgggggtggctgcgacaacggacaatgtggcgcccggatcggaggctcttgaggagccggaggaggcgaaaaaagcacgtagagtacaaaaggccaacagatatgtaaatacgcccggcaaacgcagtaaataa

SEQ ID NO: 24615 - protein, 603 aa, DROSOPHILA
MVSTRQMCSGGGTSASEGVSPFGGAGSGSASGTGMASGSAVSSGSGTGVQEPPESTANRSSVLRRTTSYQGNQAHSSYRVVSAGSLAESASAVTRLHSYTMQMQRQRPPTATTTTTTSAPSLYDLPNELIEKILSYVDYKKVSNLRLVSHRMNDICMAMLNTAFTKQIKTTLSRFQAIKASMPRRESHRRNHPLACECDIIETCYMRLSLLQMSMGKHIERGHCCFFPGAILDEVQAILNYISITPRLQRPYRVTDELFDLSTMAMEYFKDRIEATLPGLAYFNKDFYTLPTTTKRPTLAISSDLEDSASNSPPQNHMVLRKGIRKIKQGMKMYNNQLSVLRTELRTCKRKAAEQSKQLAEQSNLISEQQKQTLEYANRLDENDKKNEEMSRKFSTLLQELNKCKTELQFWRSKSPAIPAVCSSCNQKVAPVVPPEDFQALVNQGVDPEHFIIINEDVDAESDVSVGELKEFASPDESTTAKLLAVSTAAKNLKRKMPSESQSNAIASTSKAAEVAQSQSQPMATGNAGAAKAAGGYSPKLFYGNHQRSGVIVSPVSQNLGVAATTDNVAPGSEALEEPEEAKKARRVQKANRYVNTPGKRSK

SEQ ID NO: 24616 - DNA, 8567 bp, DROSOPHILA
gccatcattatctatagtgctcggaatgcaaacaaacgaaatcattgaacagagaccaaaaccaaaaaccggttaaaagcaactttaaactaaaaataacttggagcagacgcaataacaacaaagaccgcagcgcaaagtgctcttaactgatctcttagctttccactatccttcggattctctctataaatctctctggatctctttctccccatttctccggatctctcaccgatcgaggtgttctctctttatatgaaacacgtatacacccgctctcaattcgattgatctttatgattttgtgatcatgcaaatgacaaactgaatgattttcatttgctctcgttatggaaaatttccaaccaaatatctgtaaatagcgtttttctatgcacactagattctaaataaaatacatatttaatagaaccacaaaaaacaacgtgtaatcgcttggtttgtttgtttatgttttaaattcgcaaataaacagaaagcttttgatctttatattcaaaatgtaccacttcgaatacaatgtaagaccgtacttatagcactgaaagcactctaaatctaaatcctaatcaatagcataacatgatcttatcatctgaactatgtggaccaaaatgtaattagactaaatatggccaagaacccgccttaaagctctgaaccgcactgtatggtgagataaggaacgagtatctaagtaatacgtaatatgcacttgatcttaactgcacgatatgtaaatgaatgggactgcaatcgcttggttcgtaaatcaaaaagctcggtccgtagctgtcgcataaacaagagttgtggaaaaatttgcgggctcaattggaaaattgcgcgacatcgcagcgaaataaattgttactcaattctggagcagaagctatgacaactgcggagatatgccctgacccactatgtctctatatcttcccgcttaactaaagaatctgaaggttaatactcactattcgggactgtagcagccggttgtggtggcggacatcaccaggtccagggatatatcgttcatgatggtacactcgtagctgggctggaacttctcctgctccgattgcggtcgcttctggatcttctcccgatcctgtttatgtttgcgatcagctccttttagcttaaaaacctgtaagaataagcgtttaatataagcgttctaaaaggattgcacggaatatgataattggtaattttgattatcacacatttattatcaaaagagctatttgtactttgccactttaacagttaacagcttaaaaccttcacataaagatttagccttaaataatattcttgttttcattgtttggtatatctgtaagtcacagacatgaatacatgtgtagataattttaatggcccaaacaaattataaactttttactgtacttgttgtttgtgaatgcagagtagattctgattacgttctcttccgtaaaattccattggctattttcggaccgcagttggccatatctcaaaattaaaataggtcattctcttttaagatcatatcaacggccaacatacatttaacacttcaattaaacatatgtatcataaatatgaacatatatgtgtataaatttaatgaatactattaaaagcatagatagctcactgaacattaatggcttactatctttaaaaacaggatcctgtttcctctgaacggacaaaataagagactctctccgttaagcggacaatgtgatcttgttcaggtcttcttctcactcaccttgatctggcaggcagctgcgtggaccgcctgtttaccattgctgccggcactgggtgtccgttccggagatgctggtgcagcggagccactgcttccgctgccactggcgatggcgctgttgttgctgccgcccgagccgctggcggtggcactgtttgtgttttctatataggtttcaatttgcagtcggaagggcacacccttctcgccgccgtgcttctttggggtaaattcggttgaaatgcagttgaccttgatgtagacgccgacctccttcagtgggtcccagaagatctcgacagtgttcagtgagccggagctcaacggctgcgacacgtggcagaggccgtacgaaagcggtacgtccacctcaatgatgcgttcgcctgggcgggattgctgccattgctgcatctgttcgcgctccatgaactgcaggcggcgctcgtggaaacagatcttgatcacgctctgcaagagggaatcggaggggaaaatcgggggttttgtgagaagtggcaagaagtgaagtcatttggaaagtttattcgcacacgcagatttcacatgtacaatggaatggtaatgcctcgcatctctcaagtcgctcggcttaattggggcttattaaaatcaattgagccctccatatacacacatgcggtcacacagacgggatgaccaagccgctcactcgacagtcaaataattcatcgcatcacatgactctccgaatcaattggaggctgcgaacagagactttggactcaccttcagtatcttatccctatagagggacaggtctccgatcttcttcagctttatttcgtagctctggccttggttgaggtacgtcaaagtctcctcattgttcttggtggcgatcgaagtggccgctgccaaaatgtactgaaatctggaaaggcatgggtgttactaaaataatctatccttattttatctcttttgagataagccaaactgtacttcaattcaatctgatataatttcattgcaactgtaggtttttggcaaattattaaatctgtataatactcacttgtgatcctcggcatgggtagctccgttggccgaaccgatctcgattttagcaggatccaaaacgctaagttgctggggctttcccttttcgttcaactcatactcggcgttggctagtggtgaaccctgaggagagccacacccgcaggcgagtccggagtttacatcatgcttgccgtttgcggccgatcccgatccgttagccgagtcttggccagaaatagcctgcgacggcgagttctggacctcatccaacttggcaatggcgatggagggcgatgcggaggcattatccagggataccttggggctcggcttgatctgatccgtctggggctcctgcttcagggtggtcagcgtgggcgagaacgacaggaagttctcactgatcgcggtggtaaaacgtaaattagctcaaattgaatttagttcccttggtgaacgggatggggggattaacttacttgttcaaatatgagttgctgttaaactcggcgttcagatcgaagccgatatcatcgctccagctgctgcgacctgaaaattcgaagaataccaaaaactatatttcaacccgtatctatggcacgtctgcgatttcttttagattctagacgttatcacagagtgacgctctcaaaaccattgccgacctcaatccgttgacgtcaaacttgtgtgtcttagccaaaatgaacgctgtgatgaatttatagaatgcggcacttgtagggccaatttataattaattgataaacacgtaagtataattttatacagcttgaactaatgctattttgagtgcaggtccccaatataatgtcttaatttggaatacaacaactttattaaaatgttctaataaaaacaaaaaaaaaatatcaaggaatatttaagtttttatcccgagtgcaaccgtgcagcgattacaacaatcgttcataacttttaattatttctctgtttttcccatgcagatagatatcgattagaaaaaaaaaatccccgatgtgttttgctaccaacacattcatctacattcttgtcagataacttttccaattttattaatattgtaatgctgagtccaaataaattggacctaatatgtttgtggaatttacaagccattactttcaatggtttttagagaatttctcaaaaaagtgtacttcaacaacaatacaagtttgtaatgcctcgttaattgatttaatccgtccagagataggaattgtagctgtgtgggttccatcggacaattcatatctcgatcacaattgattccaagttatccaagaccgaatgacgcacatcgattgtgctgctcactcgtttcacatgcgcgatagtgtcacagccaattgtttgatacatcgtatctgttaatgtgcacatataggaatggatgctccgcttagttcccttgacaaatggcaagaggaaatggccttaaagccatctcttatataatttcgattgtgggaaaaagccaggacaaaggctgaaaccattcaagcccgttcgagtgaactcagttcctccatagccataaagatctgaatagttcgaatgatctcagtttttccacaatcgttgtggtttgcctaatagcggattgttgtacggccaaacgctagcatttagccttatctacaccaagtgccgcatgccgaatgatagataagccatcaaaaaaagagagggccgagctctagattgcagtccaaattatatggtcgggtgcccccacacaagtgcttccacctaaatctgtttgttccgaagtgtcccagtgtgccagtcactcgtttcggggtaattagtgcagggaccctgcgtgattttggagcaatctcgagggcatatctacaaagtttaaagggtttctattgggggcttgttcgggccattggaaaattaccgagcgaagattttatttcattggtggcgttctattattaaagctctattgattaacacaagcggaggtgctaagttaattactgttttacagcgggttttaaccatcgcagtctgttaattgtaatacggcttcccaactccgatattgaaagccatcgcatgtttatgagtttatgaaactatttgaagacctgatctttcaaagtgcaactccacctgcaccaaagtttgcccaacatctccaaacacgatgagcttagccctttatcgagctcaaactttaattgggatctcacgcactagtcgtataactcctgtgtctgatagatacagagtaattagcgatcatcttccattgtttatacaccacttagcacccaacaacagagagtctcacatttgtcttacggatgatcgatcgaattagtcgttatatcgaatacatctgtctaggcatttcaatacccatatactcatacttgcacggaggtgtataatcaaagaggcactactcggaaacgggtttctcaattacgacggcttctaatttgcacacatgggtttccgactcgctctcggattccagatgcaatcccagaaagaagtattaagtcagttcgagccgtttttcattcttgctgccttactttcattgattacattttatgcaaatcactgagctaattcaatgaccaacaaaattatggggacacatttttgtataatctttctgtcatcttctatactttcatcgaatttatactgtttgtagcaatttaaatcatttcagacgagagcatggaataatacattcaaaattttttgaattaatgggcttagaatcaaagtagtttgaattttatcataaatatcggaacatgaagttagcattccataacttctgggcttaaaaaatcacaaaaacacatttatcgactttaattgacatttttacaaaatgtaatctgtaggtggagtcaaagagctagtcactatcttggtaattgggagaaattacaaaagtatcctaatactatattgtatgattgttcttcgctttggggaattcctatccataccgcatttgcatattatttatgtgtgtgttattcttgaaacatttagactgatttcattaatttgatcctattctacttcgacaacagagaacttgattgaaaacgattgagttataatccttacccgagtgcttctcgcgcttgtgcttttccttctcctgatgggccactttggagggcaagtcgccgctctgcgatgctgtgggtgagttctcactttggccaatgtccaaagagtcccaatccattcgtcttttgcgtgagccgctgttcaggtaaatggtctgcacgtcgatgatctgcggtcccggcgagtccttcgactgtccgtctacgacaatcgtaatttgttcgattagcgagctgctctctacgagatcgatagatgtggaagttgatggtgatggggatgagctgaggtgagctgactgatctgggtgcactgatagcggcagccttacctgtccacgattcctctgagtttggcggcgagtcaacaaagttgatcacttgctcatagtccgatccaatatgctgatggtggtagccgctgatgaagtggcggttttggatctggaaaatccgaaacgtatgggagtttagttcgaaaacggaatttcgacggcttaatcaattatagaaccgaatcagagccacagaaccagcagcaaagcgtgtctagccgccaacgaggctatgccctctcaacattatctctacagtccagctggaatactgtatatgtaggtccgaaccttgctgataaggtcgccagcaatctcgcctgagctctaccaacccctctttctccctgacccgagagagggagtgggcataaacacccatcgattcatgtttatttgcctatgaggactcgaactcagactcggactcggtttgattccacaaaataatgctttcccaagataacttcaagcatgctcgatgtgtgtaaacaaacggagagtgctcagtctaaagagctggccaaagaagacctagaacgagcggcgttatatataaagatacatccaaatataaaggaagataaaacacaaatcgatggggcgagtgaatcggactgttgacgtaacatttgcaactatttattaagcgctgttctgttgtttttcccactatctgtctaccacaaattcgttatatgatacaccccgccatatagtataattagcaattgaactatatatttatatgtgcctcaaggcaaacggatttcgcttgaaaaatgtagtcactcaattgtagggagctttaaaggcggctgtttcgatttacgaaacaaactatggtttaaaaacaattgtacaaatattgctagctgtaattagtttagattctctggtatttcaaattttctcgatggtctagctataacgtagagaaatgctttacactgaggaaaagaaattatatatataatggtattatattggcttatagataatcgatttatatttgtgatgccaattctacctgatgaaaatcagtagcaattatttataagcctataaatgtttaaccatacatatatctgatttttccccaaaaaacttacctgatttagattttcactgataccgttagtggtgttggtattgttgttggagttttgattattgctgatactgttgttattattattattctgatattgactgcgatttaaattgttgaattccatttggtcgagttcgttgaacaggttcaaatcgaactttgttgaaagggtgcgttcttgttgatgttgttgaatttgctccgcttgttgttgtagttgttgattttggtgttgttgaatgtgatgttgagggtggtggctcaaatgtagtagttgttgttgttgttgttgatgatgagtatattgtggatcgaatatgctttgtaaatccaacagaccggagttttgggatagaaacgaaagcgccattcggtacgtgagttaacggcgttagaatcgcgttctggtctctattagtccaagcttattgttgtttgttgtttgatatcctcctgaattatttgaccgtgatcgctctcacccgtattacgaaacaccacttccgaccggagtaatttcgccagcaattttgctcaagttttttggtgcaatgcgaaatgcaacaaaagtgattgatggtaatagtaatattcgaagtagaaaccgtatattgatcgaccaacacttactgattacttgcttaggctaacattttggcttggcttgttcaaaatgctcatatgacacacttatttacttaatcgttcgttcgtcgcacagcactttggatatacgagggctaaccatatgcacttgacgtgagttctactaacaaccaaataatatctctagtttattcatatatttatttaacgtaggtataacatgtataacttgctttcttgtaactttttctaacttggctcacagttgagtggaattgtaaattttgcttttgtgcgttttgtgttcttggggccttttgagagggttcgggactggccgggggggcaaattaaaacaatacgaaaaacgaattgtatagtttcttgataccggtggtctcgcgctgacgatggcttcgaagtagggtattctcgatttttaacagcatcttggtccggaggtacatatagctcgattgcgactgatattcattagacatgcgttgcagtcgtatttc

SEQ ID NO: 24617 - DNA, 1740 bp, DROSOPHILA
atggaattcaacaatttaaatcgcagtcaatatcagaataataataataacaacagtatcagcaataatcaaaactccaacaacaataccaacaccactaacggtatcagtgaaaatctaaatcagatccaaaaccgccacttcatcagcggctaccaccatcagcatattggatcggactatgagcaagtgatcaactttgttgactcgccgccaaactcagaggaatcgtggacagagagcagctcgctaatcgaacaaattacgattgtcgtagacggacagtcgaaggactcgccgggaccgcagatcatcgacgtgcagaccatttacctgaacagcggctcacgcaaaagacgaatggattgggactctttggacattggccaaagtgagaactcacccacagcatcgcagagcggcgacttgccctccaaagtggcccatcaggagaaggaaaagcacaagcgcgagaagcactcgggtcgcagcagctggagcgatgatatcggcttcgatctgaacgccgagtttaacagcaactcatatttgaacaatgagaacttcctgtcgttctcgcccacgctgaccaccctgaagcaggagccccagacggatcagatcaagccgagccccaaggtatccctggataatgcctccgcatcgccctccatcgccattgccaagttggatgaggtccagaactcgccgtcgcaggctatttctggccaagactcggctaacggatcgggatcggccgcaaacggcaagcatgatgtaaactccggactcgcctgcgggtgtggctctcctcagggttcaccactagccaacgccgagtatgagttgaacgaaaagggaaagccccagcaacttagcgttttggatcctgctaaaatcgagatcggttcggccaacggagctacccatgccgaggatcacaaatttcagtacattttggcagcggccacttcgatcgccaccaagaacaatgaggagactttgacgtacctcaaccaaggccagagctacgaaataaagctgaagaagatcggagacctgtccctctatagggataagatactgaagagcgtgatcaagatctgtttccacgagcgccgcctgcagttcatggagcgcgaacagatgcagcaatggcagcaatcccgcccaggcgaacgcatcattgaggtggacgtaccgctttcgtacggcctctgccacgtgtcgcagccgttgagctccggctcactgaacactgtcgagatcttctgggacccactgaaggaggtcggcgtctacatcaaggtcaactgcatttcaaccgaatttaccccaaagaagcacggcggcgagaagggtgtgcccttccgactgcaaattgaaacctatatagaaaacacaaacagtgccaccgccagcggctcgggcggcagcaacaacagcgccatcgccagtggcagcggaagcagtggctccgctgcaccagcatctccggaacggacacccagtgccggcagcaatggtaaacaggcggtccacgcagctgcctgccagatcaaggtttttaagctaaaaggagctgatcgcaaacataaacaggatcgggagaagatccagaagcgaccgcaatcggagcaggagaagttccagcccagctacgagtgtaccatcatgaacgatatatccctggacctggtgatgtccgccaccacaaccggctgctacagtcccgaatag

SEQ ID NO: 24618 - protein, 579 aa, DROSOPHILA
MEFNNLNRSQYQNNNNNNSISNNQNSNNNTNTTNGISENLNQIQNRHFISGYHHQHIGSDYEQVINFVDSPPNSEESWTESSSLIEQITIVVDGQSKDSPGPQIIDVQTIYLNSGSRKRRMDWDSLDIGQSENSPTASQSGDLPSKVAHQEKEKHKREKHSGRSSWSDDIGFDLNAEFNSNSYLNNENFLSFSPTLTTLKQEPQTDQIKPSPKVSLDNASASPSIAIAKLDEVQNSPSQAISGQDSANGSGSAANGKHDVNSGLACGCGSPQGSPLANAEYELNEKGKPQQLSVLDPAKIEIGSANGATHAEDHKFQYILAAATSIATKNNEETLTYLNQGQSYEIKLKKIGDLSLYRDKILKSVIKICFHERRLQFMEREQMQQWQQSRPGERIIEVDVPLSYGLCHVSQPLSSGSLNTVEIFWDPLKEVGVYIKVNCISTEFTPKKHGGEKGVPFRLQIETYIENTNSATASGSGGSNNSAIASGSGSSGSAAPASPERTPSAGSNGKQAVHAAACQIKVFKLKGADRKHKQDREKIQKRPQSEQEKFQPSYECTIMNDISLDLVMSATTTGCYSPE

SEQ ID NO: 24619 - DNA, 4826 bp, DROSOPHILA; identical to SEQ ID NO: 15658

SEQ ID NO: 24620 - DNA, 1522 bp, DROSOPHILA
ttgctaaccgaaccggtcggatttctgaatcttaagcaccgagtacctcggaaattcttttatatatattattagacgaataaacaaggctacctgtggatcggataattcgctatatagttaataatcggaaaactgtgttaaccgcgcagataaaacaaaagctgttatcagcagcaacccattttctaatataaataacaaataagtgctgcagaaatgacttggggatttgtaacctgcggccccaacgaggctttagttgtctctgggtgctgctacatgaagccgcttttggtgccgggaggacgagcattcgtttggccagtgggccagcaggttcagcgaatttcgttgaacacgatgaccctccaggtagagagtccttgcgtgtacaccagccaaggagtgcccatctcggtgacaggcattgcacaggtgaaggtccagggtcagaacgaggacatgctgctgaccgcctgtgagcagttcttgggcaaatcagaggcagagatcaaccacatcgccttggtcaccctggaggggcatcagcgtgccatcatgggttcgatgaccgtggaggagatctacaaggaccgcaagaagttcagcaagcaggtgtttgaggtggcctccagcgatttggccaacatgggaataaccgtggtttcctacaccatcaaggatttgcgcgatgaggagggcgactcaaagggctacctgaggtcattgggtatggcccgcacggcggaggtgaagcgcgatgcccgcattggcgaggctgaggcccgagcggaggcccacattaaggaggccattgccgaggagcaacgcatggccgcacgcttcctcaacgataccgatattgccaaggcccagcgcgactttgagctgaagaaggcagcatacgatgtggaagtgcagaccaaaaaggccgaggccgagatggcctacgagctgcaagcggccaagaccaagcagcgcatcaaggaggagcagatgcaggtgaaggtgatcgagcgcacgcaggagattgccgtccaggagcaggagatcatgcgccgcgagcgagagctggaggccaccatccgccgaccggccgaggcggagaagttccgcatggagaaattggccgaggccaacaagcagcgcgtggtcatggaagccgaggccgaggctgaatcgatcaggattcgtggtgaggctgaggcctttgccattgcggccaaggctaaagcagaggccgagcagatggccatgaaggcagaggcctatcgtgagtaccgtgaggctgccatggtggagatgctcctggacacactgccaaaggttgccgccgaggtggctgctccactgtcacaggctaagaagatcacgatggtgtccagcggaactggcgatatcggtgctgccaagctgaccggcgaggttctgtcgatcgtcaacaaagtgccagagctggtcaagaacataaccggcgtggacattgctcggtctgtgcatgctggctaaaaaagtaccc

SEQ ID NO: 24621 - protein, 430 aa, DROSOPHILA
MTWGFVTCGPNEALVVSGCCYMKPLLVPGGRAFVWPVGQQVQRISLNTMTLQVESPCVYTSQGVPISVTGIAQVKVQGQNEDMLLTACEQFLGKSEAEINHIALVTLEGHQRAIMGSMTVEEIYKDRKKFSKQVFEVASSDLANMGITVVSYTIKDLRDEEGDSKGYLRSLGMARTAEVKRDARIGEAEARAEAHIKEAIAEEQRMAARFLNDTDIAKAQRDFELKKAAYDVEVQTKKAEAEMAYELQAAKTKQRIKEEQMQVKVIERTQEIAVQEQEIMRRERELEATIRRPAEAEKFRMEKLAEANKQRVVMEAEAEAESIRIRGEAEAFAIAAKAKAEAEQMAMKAEAYREYREAAMVEMLLDTLPKVAAEVAAPLSQAKKITMVSSGTGDIGAAKLTGEVLSIVNKVPELVKNITGVDIARSVHAG

SEQ ID NO: 24622 - DNA, 2646 bp, DROSOPHILA
aggttaatttaaaaattaattgaattttaggacggcttatatttgaaatatactacaaaaacataaaacttggtaaatttatgaacggtctgctttcggaatttcagcagaatcggttggcaagcaattcacaacgaagagctatcagagcaaaccgaaaacacaaatcaacaatgttgcagcaagagttaatacgttggtgtaagtttacaaatcagtattcattaaatctagatagctctttgcgctaagagtgcgtaaaacaaacagttaccatatctgggttgtgtaaaaatactgaggacagaccgttcgtcaagaaatactgacagttgtataattaggtttattgaaaattatcgaattatcggacggctgatatttgacatatactaaaaacataaaatttggtatatttatgaacggtctgctgtcggtatttcatcagaatcggttggcaagcaattcacaacaaagagccatcagagttaaccgaaaacacaagccttttatgcagcaagagttaatacgttggtgtaagtgtacaaatcagtagggaccacaaattaacgttcttttacgtatacaatatttcagataaatcccacaggtatggaacaccataaagacaccggtcaattgcaccactacgtgcagtacggactttccgaaagtgcacagattttcggatgcgcaaaagagcatcacatcttgaagacgctctgaggaaaactgctccaaatctagtccaccagcattaaactaccggtggcttcaatctggtttaggaagaagaccacaataaagtgatcaaagataatcaggtcttcaccaatttaaagtctactacttcaacgaatgagatagtcgtcctgcaggcaaggagtcataccagttggccgagcaatatcaacagcagcagatggaatcgcgtgatgaatctagtatctccgtcaggaagacgggcacgtgtacagcgaggacaacagtgattttggagtggaacaggtggaaaaccaatcccagttgaaaaccaatcccagttcgatcccaatgttgtggcctttgtgcctagctttgacgcacagaaatcctctcccccgcagcctgttgcggaagtttatctacttggtgttcagccccgctaacttttaccgcatggcacccttgacgaccttgttgtggaaagtctgcgtaaagaatttcaaaatttctggaaggggaaacctgtagatgcagctgagctgttaaatgatttacaaacaagccgacatctcgggaaccattaaagagacatttaaagtcaaaaagtggccaactgaaacccgttaaaatccgcttgcgaccgcaacttggcccgactaaggcaaaaaataacataatcctgtcaagtcatgcagacagggcgatttacattataattttaaatggcaatggattagtcatcatcagtacctgcttatctggttttcctgatttttaaatcaaatctgtgactgtatctcttacctttcctcttgtacctcgttattataaaatgcgaaaaccctctgccaaaggacactataaaacgaattttttaaaagacgccaaacaaaatggcactttttgttgagaagaaaatatgccgataagaacgttttacttgtaagacgctgcagaaagattaggaacgaaaactatcgacaatgtttacttgtataatctgagctttctaaaacacaaaaatagtgtacttttaccatacgcttaatttcgaaattaatccgggatatacagttggggatccagattttaaattcgtgaacacagctgctggagtagggcatttcctgatcgatctgttagttttcggacttttactttggttgttgtaaacaatatccgcaagtttctcgcaaagtgggttgcgttgtgccgtgcctcagtagagcactacacactaccttcgattgagttcgctgggatttggatttcgttcacagtccaagtttggaccgtgctaggagaagataatgatccgatcactcaattaacttcatgcacccagtgacgtcatcagtgctttactattcggtgtctatatagtctattttgtttaatttcttacaccctacatttcgatacgattcgattttcgtttggaaattgtctgaaggtaaacaagcataaattggacgttcaagcgtaaacaaatcggttttcggagcaaaatacaaaaatcgtcagttgagaaagtctctcaaatggcgcagttctgcattcttggagtcctcctcattctttctggaacacactgctcgtggggattccatgaagagacacattatccgtgtgcctttatcgatacggcaaacataacggggagctacggcttagatggcccatttgtgcacaactggacggtgattccccgtcacttcgtagccgtgtacgactttgtcatcgaaaatggcatccgcatccccgcaagcaggcatctcagagcctgtgtctgtaagaccaaaccctgtgtacggatttgctgtttacggggagaaatctacgacctggagaagaggcagtgcttagtccctgtggccggggtgtccagccttccctcccatagccatatggaggtggagttgggcaacggcagtctgcgtc

SEQ ID NO: 24623 - DNA, 646 bp, DROSOPHILA
tggaacaggtggaaaaccaatcccagttgaaaaccaatcccagttcgatcccaatgttgtggcctttgtgcctagctttgacgcacagaaatcctctcccccgcagcctgttgcggaagtttatctacttggtgttcagccccgctaacttttaccgcatggcacccttgacgaccttgttgtggaaagtctgcgtaaagaatttcaaaatttctggaaggggaaacctgtagatgcagctgagctgttaaatgatttacaaacaagccgacatctcgggaaccattaaagagacatttaaagtcaaaaagtggccaactgaaacccgttaaaatccgcttgcgaccgcaacttggcccgactaaggcaaaaaataacataatcctgtcaagtcatgcagacagggcgatttacattataattttaaatggcaatggattagtcatcatcagtacctgcttatctggttttcctgatttttaaatcaaatctgtgactgtatctcttacctttcctcttgtacctcgttattataaaatgcgaaaaccctctgccaaaggacactataaaacgaattttttaaaagacgccaaacaaaatggcactttttgttgagaagaaaatatgccgataagaacgttttact

SEQ ID NO: 24624 - protein, 59 aa, DROSOPHILA
MLWPLCLALTHRNPLPRSLLRKFIYLVFSPANFYRMAPLTTLLWKVCVKNFKISGRGNL

SEQ ID NO: 24625 - DNA, 9032 bp, DROSOPHILA
cacaccataccagggacccgaggtggactgctggtcactgggcgtgctgctctacacgctggtctacggctctatgcccttcgatgggtccaatttcaagcgactggtgaagcagatcagccagggtgattactacgagccaaggaaaccttcgcgagcctctactctcatccgggacatgctgaccgtgtgtccgaggaaacgggccagtatcgagcaaatctgctcgcactggtgggtcaacgagaacgataatgtgtcctgtctggatctggccgaggatctggccaatcagaccccagtgcgattggatgtcctgctttcccttacgccagccacaatcaccgcggatcagttggtggtgccatcggcggagggagcagctgctgccaaggcggcggccaatgaacgcgttcctcgctcgcattcggtgggctcgatccgggacatgggaccgccgaacacggaggcggaacgtcgcatcctggacatggtggccggtgagtcgatgtccattctcctgcttgacgcttctgaaatcgcttgagtggtccccagtgtgtgagatagaagtcccagtgcagcaacccgcgcatatatgcttctgtaataggttggatcgatttgggcggacataacaaatgtgcaatctatgggattaaattcaagtgttgtttgattgtttaattgaagatctcagaagacttcatagattacaatcttgtgcagactatggtccatcaaatcattccaccctattgtgtatataaatggagactaactggctgcccaatacacaccaacaccaaccgacctatacccactaactgatcctactcctggaaccgaaatccaaccacataatcccatcacttgcgagtgtactaaaccatatgaaactaaagtcatttaaccaaactcattaaaccacgccaccctttctctctctctctctttctctgtctgtttcgtgtttccagctggaggagaagccgccttgatgccctcacccaccaggaccataacccccgcccagagtccggtgcagacgaagaggaaactgcagcccactgtttctacggagaatgcagccggaactacagccaaaaagaaggagaagccggccaatagctcgtttgtgatcagcaaggatggtgcaccactgactgaagcgccaccgaccatcatcgaaccgcaagctacgctcatggaggcggagacgattgccaatatacccgaggaggttcctgttcccagttactcccagaaagacatgcaagcggtgggtgatatttgcgatctgctgatgggcaccgccacaactccagcccctgcaccaccggcacccacacctgttgctcgccagcccaccaggggaaaactggatgccgttgttgaaactcctgaggaaaaggatgccaccaaagtgatcaagaagtttgtgaacaagcacaagaccgcggatctggtaaatgccatcaatgaaagtgcctccaaggccgcagcgccggtgagcgcagtggcccctccacccttcgtccgcaagtgcagcttgcaggatgagtccacactgaataaattcaatgcggagcgtcggaaatcgcgaatcctagaaactgcagagaagttccagccaccgccaccagttgctgcagcacctcccgaaaaacccaagaagctcagcataccgggtgtcagtgtgggcagttttaagaaggagttcgagaagaaggccaccaatccaccggctgcagagggacctacgcccggtgaattaagggctcaggagcaggttgcagcagctgcagcggccgcccaggaagccgaaaccttaagcaccccgccaccatcgccagtggtggcccaatcgctagagggcagcgattccaagaactctgtggcctctatttcgctggacgaggctcgccgctccatggagaactccattgccttgctgctccaggcacaaaacgagtccagcaaggaggtggaccagttgtgtgcccaaacggagaccattggcgtcagtgaaccggctactcagcaggagcgcgagcgtaagttgaagaacgcccgcgccataatcggaaatgccatacaaccaggtgagtgctattggcatgatagattctaagactagtgattctagtgataatgatatccgtacctaagttaagctaaaccacgcagcgcttacaagttgactactagcattacttagcactagtatccaggatctggttgtgcgtcagggtgcaagtcaaacgccattaagtgtgaaaaccaacaaagacttattattgatccgaatttacactattgaatccataattcttatttaaaaatcagtttttaattccaaaacgtacagtatgttttagtttagtgtttgtttagaacttaactagaactaccgtttgacttgtacttgcccaagacctggtgtcatcgtcttgttttctatatttactttggcatatatatttaattcctttccattttcaatgtgtatgtgaacgttttgcaagccgagtgctgcatggattatatttggcttttggaatataatctcctgctcacactcaccgaacttcatctgaagagccaacaaatcgaagcgaatcctcctttccaatttgcaatttcgcttggccaatccataaagccaaaaaaaaaaaagaaaatgaaatcctcaagcaaaatatacactcgtcatcatcatcatcttcatcgaactcacctgtcttttgtctttcgttccctcttgtgctgactacctcattgttttggggtggatcgattcgtatgaatttaaatatttaaaagaaaattatttaaaaaaatattaaaagtcatattattattatcaacgaaaattaagactgtattcaaatttatgtctttacttcatatttaaatttcttaaagataaacttcatcacgatttatgtttcaatttccttgtgtaaaatatgatttaatgtaatgtaaacggagaaatttaaagagtattgttagaatttccgcaaatttttttgtactgatcgatccaccctatcctgccatacatgctcatcatattcattgactcatcatcttaattttagtgatacgcaggccaacaccgttttatggcatcggcaacggctttggcaatggcatgggtggtgctgttggagcaagtggtgcgacagtgaacaatgcacccaaacgcgcacagagtggcagcagttttatgggctattcgggggccacatcaccgggcaccgcagcaacatcgccaccgatttctggaccccaaacggcaccgccagtgctaatatcaccgaatgcattggctgtggccaagcaaacgatacaacaacggattttcggaggtggactgcccagtcccaataatcagccagcaaatcgaaggccagccacctggcaaccgcaggcatcctacagcacggccagcatttttcagccgccacaaagtcagagtagtcccttcaagatgctgcagcagcaatatcagcagcgttgtcaggaggaccagaagcaaagttgcccattcacgccgcctccatcgccacaaaatgccgccagccacgcctacgccgcccaagccaacagcaacaactatggaggcaacagcaacagcggtgccagcggcggcagcagcagcaacagcagatgcaacagcagcaacataggcaactgcaacacgatgccttatgtcaattacaatgtcaattcgcgcacgagaccatttaatcataatcaagctcaagacacactcaataccaatgccaataccagtgccagtgctacatgtgccttgcctgtggctatgtggctgaaatgtaagtcttggcagcggctccaaaaaacagaaaccccaccgaatccgtatccgtatccgaaaccaatacaaccaacaacaaaaaacatgtgctttgtgctgtgtgcctgctacaaaaaaaaaaaaaaaaaaaaccgaagcaatccactcaatccatttccgtttcctgttgcgttcctcgattatttgtattttttccgctccctttgctatatgaacactggctgaccttgggaaaaagtccaaggttaatcagttagtaattatcctggcttggtactcctggcttttccctatccaacaattcaaaagcggaaaaaacccaaatctttggctctaccttttcccttggacgttgtttgttctcgatgtgtggttgtagttctcgttgttgaagttgatgttgctgctgctgctgttgcagtcgttgttgttcgtgctcgttgttgttctgactttcaagtagtagtctcggcttaaccccctaaaaacacttaggcgcgccttaaccctcgaactgcattcctttggcctcaatgacatgttactattgttgtgttctcttactgttactgatgctttaattgcttacttgttcctcttgcaccattcaccacgtatatatattcgattcgattaacttcaagtaattgttatactctttaatctgcagcttcaccgggtgcagaaggaccgccaactcctcccggagcggtgaagacatcgacggcttcgattaccctgaaatcggccaccctgccgcgtcgcaagattaacgccaaggcggaggttcagctggacattaagccgcgaatcccggaacaaggagccccaccccagccggccatgcgattcagcaccgagatgcaacatccggtggccgatctgcgcagtgccccgccccgcgagggccccatcccctacagtcccatcaagacaacgctgcaggcgagggccactagtctggagcccaaggagcacgtcatcaccatccagcgaccgcccacgcagcatgcctatgggcgaaccagttccaacacaaccacgcggtgagtacggaataagagacgatggtcatataattcccactttattgcctttattcctcactctcgcctcgtaaagaaaattcgatgtaattgcttaaatgggcgtccaaattaaggggttcaggcttacagttctcgtatgacttcccatttgattcggtaccgtttgcttaaagttaaatatatgtagagatgagagaagactgctaaaattgttaaatatgatcgaaattgaaaatttattcatatacgctttaaatactaaatcaacgccttaatttcctgttgtaagcttatgattgattatgcatgtttcatgaccttttgcagttccggctcgctgtcacggcagtcgacggtggaatccgagtctgaggggacaaccacggccacgaacatgtcgcaggccaccattacgagcacctcgcagcccatcaagaagagtccgcgggagtttatcatcccgattgccgtcgagggaggcggcttcattacgccccgggaacgcagcgtggagccatcggaatcgagccacaccaccagcagccgctccacgttcacccgcctgcgtccttcccgtcgcattgggtaaggctttaaagtttaagtttcgcttggcctgtgcagttttcctgactgaaatttcatttcgtatgcagctcactgttaagcgaggcaggcttcgatgagggctcgccattccaaaagatgcgcaccacgtcgataacccgggatggcgtcagcggaggagccgaggaggaggcgcgcttcactccgcaccgactcaggtttgccaacattcttaacttccgattatccctatctttatcagatagcttttcctctggcctgcgttaagggaaattgtattcgttttcaaatatctcaaaccaattgggattaaatattttcaataattgattatagttattcaattaaaagtaaaatatctttaatttgaacagatatatagaaatatatttatagttattgtaatactttttctttgagtgcatggcatgaatacgtaacaggattgctaaattgaatcctcgcagcctccttgactgccgtttgattcggttattctcatccttatgcaaatcttctttttctcctatttgacacacccgcagaagctcaagacctgtcaagaaaattagtcaagacaacgattcgcaaagctccaacgaggaggacgatgacgacgatgatggcttcgagatactcacggcggagaatctgttctcgactttgctgcagcgggtaagacgtcatctgtctgccataatgtggcccatctctcatcgggatcccatcctcctttgcccacttctaggtgcgggccctgacgaatcgcctgaatgtcaacagtgacctgacggccggattccccagccattctagtcgcctgctcacggacatttcgcggcaggcccaaagtcacagtccattctggagcccgggcagtccctttgccaggtgagtgtacccccgcaacggtggggaattgaggttgaagtggaccggagttggagttggagtggccactgaaagttgattgccatccagccggctgccagtcagttagtcaacttatgcaaacgtgtcacggcactggctctagttaataatttcattaaattcagctggagctgactctgccggaaagtgagttgactaagagccggcttctgttggccaaagacgagtgcgatctgctattcagctttaagtcctagcctaaccattgaatgactgctttaactccatccaccaacattaactgcaaatttgttgtccatttcttacatgctgccctccacatgccttccatctaacaatttaaacaaaaaactcaccaaccatgcttaaactaattatccgcaaagtgtgcttagatctcaagttagttatacctatagcgaaacggtcgagaagaagaaagtgtaagtaccaaggctcgaaacgactttttaattggtcaagagcttttaaccccatgctaaaaatacagtgtgaccgatgaccaaatttaaacgattgtctaagattgatgagcttcttataatattcatgaatttagctgattttaaaatcaatatcatttaaaaggcttgtccttcttttgcgattaaatttggtaataaaacttactgtatgctgcctttaaaccatcctaaatcacacatcagcctcgcacaatttaaccaccatccatcaatccatcaatccatccattcatccattgcgccctatacctggctatctctcacctgctcctgcacctcctcctccttctaggtgcggggagcgctggctgagggccttggacattacggagcggctgcgtcgttggctgggccacgccccccaatgctgcctgtaagttggcaacgtgtaacgtagcgtagcgtgtgtaatgtgcaagtccctcggcagaaagttcgattagcagtgaattccctgatgcattgttctcacctgtgtccaaccgtttccatctatctgatatcctttacagccgcctgaacagcagcaacagcagcggactgggagctccgtggcggcacagcatgtcccgggatctgggcagcgacatggaatcgatgttctcgcgcacgggggccactctgccaagaggtgaatatcacagaataaagagtaaatacctagatcagtagtgagacacgccattcagtgccggaaaagtgccggcgatctgatgccgcaacgatgaagccacacagacaaacaaaaaaagaaaagaaaaacaaatagtagaactaaagaaaagcgctgcaacgtatgctacgtaattaagagtactttcaatttcaatatgcctatatcgtatacttaaacctgttttatttcaagtagtttttgatgtctgctaaacaaaacaaacaatcaactgaacacagatcacagatcacaccgatcaagtgaattaccttgtctaattagtctaaaccttatattgtcccacaaatccagataaaacaatagccaaacaagaaatacacatcgattaatcataagtgtctactgtaattatcaagtgaaaatgccaattaatacttaaacaatgacaaaccattatttccgttgaagactatatttatttgatttactgttttgtgtgcgcgcacagttcttaatagcataattcaatctatatcaatattcactctatatctatctctatcaagtgaactatctataactatataatctaaatgctgtctgtcttagaacaccactcttttgttattaacccataatgccgctgacgcttacaaacctaaatctatttattgctctacataagaggcaaagtccaccccacttcctcctttaacttatgcactatttatttatttattattatttacccccgtttataatttgcctttcaaatttttgttctgcactcatgcaatgatgatgaaataaagttacaaagcaaggaagagccaagattttgttaagtcaataaaagtgtaatcaaatcgtattcaaagttctgtatgccagcgcagtaacatatagagaaacgctcaaggaatatatatattcatgtatggcgaacccgaatcaggcttaacccttgacctaaatgttgttatgcgaactgagatgatgatgaaaatgagaatgaaaatgttgatgacgacctgagaagattgtacttattgttaacaatgaataaactaaagcgaatgaaaccaacacctaataactttactacgttttgcagtgagaacagccacatagatgacaataaaaaaaaaaacgaaagaagacaaaaccttttcttattttatttgaggtgaccactgagattttgttttcgcaaccaaaagaattgttcgatataaactttctttggtaaattaattgttgtacagttttttatgcaaatggccccgctaccttaaatttgttttagttttaccaactcgttatatacaaatatatatatatatatatttcttgatatatatatctatccctcaccaacaacaaacaaacaaacgaactacaagttttctaatgcgctaacccaaaaaccaaagacaaagtttcaagttgattttcccagttcttcttattttttgatgttttttatt

SEQ ID NO: 24626 - DNA, 3575 bp, DROSOPHILA
atgccctcacccaccaggaccataacccccgcccagagtccggtgcagacgaagaggaaactgcagcccactgtttctacggagaatgcagccggaactacagccaaaaagaaggagaagccggccaatagctcgtttgtgatcagcaaggatggtgcaccactgactgaagcgccaccgaccatcatcgaaccgcaagctacgctcatggaggcggagacgattgccaatatacccgaggaggttcctgttcccagttactcccagaaagacatgcaagcggtgggtgatatttgcgatctgctgatgggcaccgccacaactccagcccctgcaccaccggcacccacacctgttgctcgccagcccaccaggggaaaactggatgccgttgttgaaactcctgaggaaaaggatgccaccaaagtgatcaagaagtttgtgaacaagcacaagaccgcggatctggtaaatgccatcaatgaaagtgcctccaaggccgcagcgccggtgagcgcagtggcccctccacccttcgtccgcaagtgcagcttgcaggatgagtccacactgaataaattcaatgcggagcgtcggaaatcgcgaatcctagaaactgcagagaagttccagccaccgccaccagttgctgcagcacctcccgaaaaacccaagaagctcagcataccgggtgtcagtgtgggcagttttaagaaggagttcgagaagaaggccaccaatccaccggctgcagagggacctacgcccggtgaattaagggctcaggagcaggttgcagcagctgcagcggccgcccaggaagccgaaaccttaagcaccccgccaccatcgccagtggtggcccaatcgctagagggcagcgattccaagaactctgtggcctctatttcgctggacgaggctcgccgctccatggagaactccattgccttgctgctccaggcacaaaacgagtccagcaaggaggtggaccagttgtgtgcccaaacggagaccattggcgtcagtgaaccggctactcagcaggagcgcgagcgtaagttgaagaacgcccgcgccataatcggaaatgccatacaaccagtgatacgcaggccaacaccgttttatggcatcggcaacggctttggcaatggcatgggtggtgctgttggagcaagtggtgcgacagtgaacaatgcacccaaacgcgcacagagtggcagcagttttatgggctattcgggggccacatcaccgggcaccgcagcaacatcgccaccgatttctggaccccaaacggcaccgccagtgctaatatcaccgaatgcattggctgtggccaagcaaacgatacaacaacggattttcggaggtggactgcccagtcccaataatcagccagcaaatcgaaggccagccacctggcaaccgcaggcatcctacagcacggccagcatttttcagccgccacaaagtcagagtagtcccttcaagatgctgcagcagcaatatcagcagcgttgtcaggaggaccagaagcaaagttgcccattcacgccgcctccatcgccacaaaatgccgccagccacgcctacgccgcccaagccaacagcaacaactatggaggcaacagcaacagcggtgccagcggcggcagcagcagcaacagcagatgcaacagcagcaacataggcaactgcaacacgatgccttatgtcaattacaatgtcaattcgcgcacgagaccatttaatcataatcaagctcaagacacactcaataccaatgccaataccagtgccagtgctacatgtgccttgcctgtggctatgtggctgaaatcttcaccgggtgcagaaggaccgccaactcctcccggagcggtgaagacatcgacggcttcgattaccctgaaatcggccaccctgccgcgtcgcaagattaacgccaaggcggaggttcagctggacattaagccgcgaatcccggaacaaggagccccaccccagccggccatgcgattcagcaccgagatgcaacatccggtggccgatctgcgcagtgccccgccccgcgagggccccatcccctacagtcccatcaagacaacgctgcaggcgagggccactagtctggagcccaaggagcacgtcatcaccatccagcgaccgcccacgcagcatgcctatgggcgaaccagttccaacacaaccacgcgttccggctcgctgtcacggcagtcgacggtggaatccgagtctgaggggacaaccacggccacgaacatgtcgcaggccaccattacgagcacctcgcagcccatcaagaagagtccgcgggagtttatcatcccgattgccgtcgagggaggcggcttcattacgccccgggaacgcagcgtggagccatcggaatcgagccacaccaccagcagccgctccacgttcacccgcctgcgtccttcccgtcgcattggctcactgttaagcgaggcaggcttcgatgagggctcgccattccaaaagatgcgcaccacgtcgataacccgggatggcgtcagcggaggagccgaggaggaggcgcgcttcactccgcaccgactcagaagctcaagacctgtcaagaaaattagtcaagacaacgattcgcaaagctccaacgaggaggacgatgacgacgatgatggcttcgagatactcacggcggagaatctgttctcgactttgctgcagcgggtgcgggccctgacgaatcgcctgaatgtcaacagtgacctgacggccggattccccagccattctagtcgcctgctcacggacatttcgcggcaggcccaaagtcacagtccattctggagcccgggcagtccctttgccaggtgcggggagcgctggctgagggccttggacattacggagcggctgcgtcgttggctgggccacgccccccaatgctgcctccgcctgaacagcagcaacagcagcggactgggagctccgtggcggcacagcatgtcccgggatctgggcagcgacatggaatcgatgttctcgcgcacgggggccactctgccaagaggtgaatatcacagaataaagagtaaatacctagatcagtagtgagacacgccattcagtgccggaaaagtgccggcgatctgatgccgcaacgatgaagccacacagacaaacaaaaaaagaaaagaaaaacaaatagtagaactaaagaaaagcgctgcaacgtatgctacgtaattaagagtactttcaatttcaatatgcctatatcgtatacttaaacctgttttatttcaagtagtttttgatgtctgctaaacaaaacaaacaatcaactgaacacagatcacagatcacaccgatcaagtgaattaccttgtctaattagtctaaaccttatattgtcccacaaatccagataaaacaatagccaaacaagaaatacacatcgattaatcataagtgtctactgtaattatcaagtgaaaatgccaattaatacttaaacaatgacaaaccattatttccgttgaagactatatttatttgattta

SEQ ID NO: 24627 - protein, 1040 aa, DROSOPHILA
MPSPTRTITPAQSPVQTKRKLQPTVSTENAAGTTAKKKEKPANSSFVISKDGAPLTEAPPTIIEPQATLMEAETIANIPEEVPVPSYSQKDMQAVGDICDLLMGTATTPAPAPPAPTPVARQPTRGKLDAVVETPEEKDATKVIKKFVNKHKTADLVNAINESASKAAAPVSAVAPPPFVRKCSLQDESTLNKFNAERRKSRILETAEKFQPPPPVAAAPPEKPKKLSIPGVSVGSFKKEFEKKATNPPAAEGPTPGELRAQEQVAAAAAAAQEAETLSTPPPSPVVAQSLEGSDSKNSVASISLDEARRSMENSIALLLQAQNESSKEVDQLCAQTETIGVSEPATQQERERKLKNARAIIGNAIQPVIRRPTPFYGIGNGFGNGMGGAVGASGATVNNAPKRAQSGSSFMGYSGATSPGTAATSPPISGPQTAPPVLISPNALAVAKQTIQQRIFGGGLPSPNNQPANRRPATWQPQASYSTASIFQPPQSQSSPFKMLQQQYQQRCQEDQKQSCPFTPPPSPQNAASHAYAAQANSNNYGGNSNSGASGGSSSNSRCNSSNIGNCNTMPYVNYNVNSRTRPFNHNQAQDTLNTNANTSASATCALPVAMWLKSSPGAEGPPTPPGAVKTSTASITLKSATLPRRKINAKAEVQLDIKPRIPEQGAPPQPAMRFSTEMQHPVADLRSAPPREGPIPYSPIKTTLQARATSLEPKEHVITIQRPPTQHAYGRTSSNTTTRSGSLSRQSTVESESEGTTTATNMSQATITSTSQPIKKSPREFIIPIAVEGGGFITPRERSVEPSESSHTTSSRSTFTRLRPSRRIGSLLSEAGFDEGSPFQKMRTTSITRDGVSGGAEEEARFTPHRLRSSRPVKKISQDNDSQSSNEEDDDDDDGFEILTAENLFSTLLQRVRALTNRLNVNSDLTAGFPSHSSRLLTDISRQAQSHSPFWSPGSPFARCGERWLRALDITERLRRWLGHAPQCCLRLNSSNSSGLGAPWRHSMSRDLGSDMESMFSRTGATLPRGEYHRIKSKYLDQ

SEQ ID NO: 24628 - DNA, 6831 bp, DROSOPHILA
aatgattttattattggccgtttacacacgttttgtacttactttcgtttacagttggtttaactactttaactactactaccacgcccacaaagcatgttataaccattaaccagagtccgttcagaaccgccaacaaatcgcatccgggccattacgccacggccacgaccacggccaaaacggtggccgtagccgttgccggagtaccgaagcagctaacaataaccactacgaccaccaccaacagcaattgcagcagtaacaacgcaaacgccaacggcaggagcagaccgccaacaatcatcccggccataaccacaaccacaccccagctggccaaaaccactagcagtagcaccaccgccaccatcaccgccaccgcaaccgaaggcccaaggaagccataagcgaagccaccaagtgggtggatgtgtaggtggctgggtggtgctgctcctattagactgcccaaaaaaacaagttccattttttatgttgccaaaattcgattagcatatctgttcgttgtttaaatacttgttttcacttttgctatttaattgaaaaactttttaattaactgcgccagccagccagccgagcagctggaattcgacttttaactgttattatattttttaaaattgaatggaaaaccgtgtaatttttatttaaggcagcagtagcgcaaccacattccctcagtacaatgaatattgtattattgtgattttgattttaaaattaattttaaacctcaacgagttactcatactccagtcatttttactcaaatccattcgcctcagtcaagcaattcctctggcgcaaaagcttcaagcataccaactaagcaatacttttacttaatatctattactaaaatcggtagatgaaaactgaatacccaaaaactgataaccgagaactaaacacttaatccgaagaaccataatatatgaaactatttttataccaacaccaagtgaaataaaacatgaaatccaaattgaccagcatttttgttaccgcccgttttcgtattcctgcacgtaagctaatcccagttgttttttgattttgttaacctttgttggatatttgtaatcctacatcctgcaagtttgttaagtgttcgagttaaagcttctccgctttgattgcgtctctgaaaagtaattcttttggttgccaaaacaaaaaaggagaaaagttttcagatctctggggctgatgaagtggggcagtcaatcaatcaatcattgcactcgccatgtaagtaaccctgaataattgaactctatcagttaatttggcaagtaagtggagttatttttcaatcatatagacgtttgttttgtgctctatgagataggccacatcattatattgtctatggcatcttaaccattcacaggccatcatcaaggcaagggcaagcccagttcagctcccgcccaagtggaaaagggtgccgccacggtgtgttcagcaagcactgcaaaaagcgaggagcccttggacttggcggatctggatctatcgagactacgtctcagcaagaaggatttggaaaccctgtctagcataactcctggattgcccaagtgtttccaggaacagttacttgcaaaactgccacccactcaagctcgcaagctatcacgcaccctaagcgttcagaccagtgcacccagtagtgcctccactcccaaggtttacaagcgcagtcaaagcagtggaaggggttaccagccggagcaacagccacaagaggagctggctaaaccactaaccactgacgcacccaagacgacttcagcgagtacagcgatttacaggcgaagcctaagtcgtagtcaggcacccacgccaaattctggtcaggatgccgacagccgagcagccccaacgcctaaaagccgcagcagcagtgtctgtcgagatgactatgggaaatcctcactctgcagcagcagcacttacaccagcgacattagcgaaaagtacaagtactactcgccgtatctgagcaagtccagcaatgtaagtccatcgatagcttcaaaggatgccccagagaagcggtacagtggtggactaggacgtcccccgagtggctgtctctcgcctccaccgcaattgccgcaagttgctgccactgagggcacaagttccttgagggctggacgttcatcgcagcgtcggatttcccgcttcctgcgtcccgacttctttgacgaacctagggatcgggaaacccagagcatgctcagggaaatacgagaaaagtccatcgatcgccaggatcaggagcagacccagccacaggacttgagacgtcgcaagcatagtttgcctaatgtggagcaagcggagcaacctgctgaaacggcacccattagatcctccatgcgccattcacgcaacaaaagcatggagttgtttacagaagccgaatcaaatggccaagttagggatactgtgaagacatcaacatcccggcaacgaagtgtttcgaaggctcgagaattggaaacggaactggacaaacacgaactggcggataaaatcctccaggagctgcagctactgtccgctgtaagaagccaacatgagcagactcaggagtcggagaaagcagaagagacatccaccattaaaaagataaagaagttgaaacccacggaatccaacgagccagaggcaacgaaaatcgcgtcaacaactacctcaagtacaaccactttggttaggaaggttaagaaggttgttaagaaaaccgacgaggcccccaagacaactggatctgaaaatgcagacctcgctagctctgcaccaaaggaaacgaaattaaagcgtcccaaatcctatcccatgaaagatcttggattaagtcttaaatcatcaaccgatctaccagaaccgactacatcgcttctacccactaaattacccagcaaactcccttcagggaacaccaatgaatccgcagtagaaccagctcctcgcgagagtcgcctgatgaggccgaaaagctacccggccaccaaactagccactcccaaggaactgcgcaaagttacacgaagtggagttgccatacccacaataacagaagctatacccactccctcggctatgccaacgtcgactagctccaagtccacttcggaggagaaatcgacgtcggccacaccaaccggaactatgtctgccgtaactgatgccaaggatatagtatcctcttccagcgactcgcggcccacgaccattaagaaaatcattaaggtgtcgaagaagtccaagctaatgccacccacgccagtgacaccaaccactccaaccacgactgctaccaccactgcaagcaccacaccagtagaaagctctaaggagtctagtccggtcattaagcccaaggagaagtcaccggaaaagaaacccagcaagggtttgctttacgctttgggacagaagtttgagaaactacgagactccgccatgagcaaggagaaaaaggctggttctactggagcagcagcatctttggcctgcacccaaaagcaagggtctcccgaagaacgcagctctccagagaagtataagaagaacgtttcggatacagagaagtcccaacaaactggactctccgacgacaaacgggtggataagcgatcccggtttgacaccatgctacgctctttaagagagagatccgtacccagatcacaacccaatggaggcgtgagtcccaagcgagctgccagtgtggaggagctgcacgccggatgcccagaggggcagggaaaacaaggcggagcagttaacaagatgttcggcggtttgttgcgtcgatttgacagggaaagcagtgaacaacgccgggtgagaagctcccgatccaccagcaacatagagcgacaggttcgcgaagaacaggatcagctgctggacgcctcgctaccaacatcgccaatctatcagaatgtggttaagagcacaaaaagcaaagtctcttcaacggcaaatggcgaagagaattgcaattgcgaaacagcttgcccagattgcaggcaaaacaatggacagaacgtaaccaccagcggtgctccaaccaacacaacaatgccaagcagcaaggagaagcgaaagggtctgatgcttgatctggccagcgcaaatgtgtccgccagtggtgcccccagctcggtgaccaccgccaccacaactaccacaagtggaagcagctatcggggatctaaaaccaatccggctttgatcaatggaaatggaggactgggaatgggcatctactcgaatctgccaccctatccgggagccatgaaaagtgccagctccaacaacagctccagccagcagtccatggagaacgccaccaacaataactcaacaaataccaataataattgcagttcgcaaacttctggctatagaacctcatcggcacatgagattaatcggaataatccgctcttgacgccatccttcgaaaacattgccaactactcctcggactcaaggagctaccaagatgactgcgcctccacctcgactttcctatcgcccaccgaagagccggagttgtattttgacaattggtccatatgctccgaggacaactatatgttgcacgcgacgccctcgcccacagtttcccggttgtcaagagcttcattgtcctcgcccactcgttgctccgagagctctgatcccaacgagagtgtgatcgacaggattaaacggcgtagcttctacagtcgattcaatgagcagaaaaaaccacgacgcactagcagcatagtcggaccatcggctgtgagggactactaccgggagcaacaagcggcagttaaggcgcgctccagtaacaaactgcatgctccggacatggatccaccaccaagagctcattcaccggacatagcccagcagttctttagacccctgaaactgagtcccgtgggaacggagctaaagccccctgtttaccgctccactttggactactctgcatcatcggcgggggccaccagcaagccaagaaagagtctgaatgacattaggaatacctcgccctctttcctcagcaaacgttacgagaccaccgattacagttcggtgccaatgcgatacaagagctcctccagttcgagtccaagtaatggagccattgccagcggctattacaacacctacaatccaaagcgtagatcttcgtatacgctcaatggtagtctgcctacagcgaccagtggaagcagtgccgcagggagcagccacctggatggatacgccaccctgggcaggagatcccttcgtccatacgaccatcgaacgatgtccctgctggagccaccgacctcgagcagcagtcgtagtggtgaaggggtttcctaccaaaggcgtgaagcaaggacaccggttagagactacacatccagtatttcgcggtaagttaaatgactttcaagaggaattagtgattacaacttgatatgtattctagatctgggtcgcgttaccgcacttcatcggccactcgcagtccaacaaacatttgatgtaccacaccgcagaatggcttctgcatcttctgctactactccaaacggaagaagacgagtcccggccacggaatcggaagtgggcacggacatggccaggccatgagcacgccgcccaataccacagcctcatcgtcatcctcgcgtgccagcagcggcggcaccaagaagcaacagcttcatcccgcccccatccaaaaccatcattaccaccacccaaatgaacagcacaagttctagactggagccccgaggttccctgcgatccgatcccagatcccctataccataatacccaataccaaacttaggcataaagatttttgataattttttaatggaacttagccaaagttatactctagtgcagacttttgagcgctgcccctagtcgtaggtttgttgtagtttggatatagcggagtttcagccatagatcgtgactcaataatgcacatttgcatacatatatatacgattttcaaatgattgtgccttggttccttcggtggttttagatttaaccaatagccataaaacgttgattttaatctataagtgtgtaagcggaacggaagcggaaacagaaagggaaaaagggagacagggagaccggaagtaaacaagagacgtgtttcacaatatatgtatatgtattttctatgctatttttgtgaggataccttgcgccgaaaatgcgttaaaatttctattatataaattttaacaacaatttttttttgcattatacagaactgatggattgttttcaagatttgaatagagtttaataacgacaactttcgtttgctaggtctattgatgttattgcaaaataatagaaaatatgcgagttggtagcgaaacggaagagtgttaggtaatcgtagcaacaaacaataagcgaatttaaaaagcaaattaacagaaacacggaacaaaaaataatagatctagagttttgggtagcattcgaattcgaagttcaaattgtaattagagcgtgagcacgaaaagtgttttctaaaaataaataaaaaccaagtcaccaattgaatggctcttatttgcattttttcccacgatcagctttgcttctggagcttgtaagtcggcatgaacggaatatagtaggtccacttccaacgacgaatggcatccatgccaagtggaaaatcgtagtcggtggctgtgccatcattaacattatcatcgcccaggggcatctcgtttgcccagt

SEQ ID NO: 24629 - DNA, 4311 bp, DROSOPHILA
atgaaatccaaattgaccagcatttttgttaccgcccgttttcgtattcctgcacgccatcatcaaggcaagggcaagcccagttcagctcccgcccaagtggaaaagggtgccgccacggtgtgttcagcaagcactgcaaaaagcgaggagcccttggacttggcggatctggatctatcgagactacgtctcagcaagaaggatttggaaaccctgtctagcataactcctggattgcccaagtgtttccaggaacagttacttgcaaaactgccacccactcaagctcgcaagctatcacgcaccctaagcgttcagaccagtgcacccagtagtgcctccactcccaaggtttacaagcgcagtcaaagcagtggaaggggttaccagccggagcaacagccacaagaggagctggctaaaccactaaccactgacgcacccaagacgacttcagcgagtacagcgatttacaggcgaagcctaagtcgtagtcaggcacccacgccaaattctggtcaggatgccgacagccgagcagccccaacgcctaaaagccgcagcagcagtgtctgtcgagatgactatgggaaatcctcactctgcagcagcagcacttacaccagcgacattagcgaaaagtacaagtactactcgccgtatctgagcaagtccagcaatgtaagtccatcgatagcttcaaaggatgccccagagaagcggtacagtggtggactaggacgtcccccgagtggctgtctctcgcctccaccgcaattgccgcaagttgctgccactgagggcacaagttccttgagggctggacgttcatcgcagcgtcggatttcccgcttcctgcgtcccgacttctttgacgaacctagggatcgggaaacccagagcatgctcagggaaatacgagaaaagtccatcgatcgccaggatcaggagcagacccagccacaggacttgagacgtcgcaagcatagtttgcctaatgtggagcaagcggagcaacctgctgaaacggcacccattagatcctccatgcgccattcacgcaacaaaagcatggagttgtttacagaagccgaatcaaatggccaagttagggatactgtgaagacatcaacatcccggcaacgaagtgtttcgaaggctcgagaattggaaacggaactggacaaacacgaactggcggataaaatcctccaggagctgcagctactgtccgctgtaagaagccaacatgagcagactcaggagtcggagaaagcagaagagacatccaccattaaaaagataaagaagttgaaacccacggaatccaacgagccagaggcaacgaaaatcgcgtcaacaactacctcaagtacaaccactttggttaggaaggttaagaaggttgttaagaaaaccgacgaggcccccaagacaactggatctgaaaatgcagacctcgctagctctgcaccaaaggaaacgaaattaaagcgtcccaaatcctatcccatgaaagatcttggattaagtcttaaatcatcaaccgatctaccagaaccgactacatcgcttctacccactaaattacccagcaaactcccttcagggaacaccaatgaatccgcagtagaaccagctcctcgcgagagtcgcctgatgaggccgaaaagctacccggccaccaaactagccactcccaaggaactgcgcaaagttacacgaagtggagttgccatacccacaataacagaagctatacccactccctcggctatgccaacgtcgactagctccaagtccacttcggaggagaaatcgacgtcggccacaccaaccggaactatgtctgccgtaactgatgccaaggatatagtatcctcttccagcgactcgcggcccacgaccattaagaaaatcattaaggtgtcgaagaagtccaagctaatgccacccacgccagtgacaccaaccactccaaccacgactgctaccaccactgcaagcaccacaccagtagaaagctctaaggagtctagtccggtcattaagcccaaggagaagtcaccggaaaagaaacccagcaagggtttgctttacgctttgggacagaagtttgagaaactacgagactccgccatgagcaaggagaaaaaggctggttctactggagcagcagcatctttggcctgcacccaaaagcaagggtctcccgaagaacgcagctctccagagaagtataagaagaacgtttcggatacagagaagtcccaacaaactggactctccgacgacaaacgggtggataagcgatcccggtttgacaccatgctacgctctttaagagagagatccgtacccagatcacaacccaatggaggcgtgagtcccaagcgagctgccagtgtggaggagctgcacgccggatgcccagaggggcagggaaaacaaggcggagcagttaacaagatgttcggcggtttgttgcgtcgatttgacagggaaagcagtgaacaacgccgggtgagaagctcccgatccaccagcaacatagagcgacaggttcgcgaagaacaggatcagctgctggacgcctcgctaccaacatcgccaatctatcagaatgtggttaagagcacaaaaagcaaagtctcttcaacggcaaatggcgaagagaattgcaattgcgaaacagcttgcccagattgcaggcaaaacaatggacagaacgtaaccaccagcggtgctccaaccaacacaacaatgccaagcagcaaggagaagcgaaagggtctgatgcttgatctggccagcgcaaatgtgtccgccagtggtgcccccagctcggtgaccaccgccaccacaactaccacaagtggaagcagctatcggggatctaaaaccaatccggctttgatcaatggaaatggaggactgggaatgggcatctactcgaatctgccaccctatccgggagccatgaaaagtgccagctccaacaacagctccagccagcagtccatggagaacgccaccaacaataactcaacaaataccaataataattgcagttcgcaaacttctggctatagaacctcatcggcacatgagattaatcggaataatccgctcttgacgccatccttcgaaaacattgccaactactcctcggactcaaggagctaccaagatgactgcgcctccacctcgactttcctatcgcccaccgaagagccggagttgtattttgacaattggtccatatgctccgaggacaactatatgttgcacgcgacgccctcgcccacagtttcccggttgtcaagagcttcattgtcctcgcccactcgttgctccgagagctctgatcccaacgagagtgtgatcgacaggattaaacggcgtagcttctacagtcgattcaatgagcagaaaaaaccacgacgcactagcagcatagtcggaccatcggctgtgagggactactaccgggagcaacaagcggcagttaaggcgcgctccagtaacaaactgcatgctccggacatggatccaccaccaagagctcattcaccggacatagcccagcagttctttagacccctgaaactgagtcccgtgggaacggagctaaagccccctgtttaccgctccactttggactactctgcatcatcggcgggggccaccagcaagccaagaaagagtctgaatgacattaggaatacctcgccctctttcctcagcaaacgttacgagaccaccgattacagttcggtgccaatgcgatacaagagctcctccagttcgagtccaagtaatggagccattgccagcggctattacaacacctacaatccaaagcgtagatcttcgtatacgctcaatggtagtctgcctacagcgaccagtggaagcagtgccgcagggagcagccacctggatggatacgccaccctgggcaggagatcccttcgtccatacgaccatcgaacgatgtccctgctggagccaccgacctcgagcagcagtcgtagtggtgaaggggtttcctaccaaaggcgtgaagcaaggacaccgaatggcttctgcatcttctgctactactccaaacggaagaagacgagtcccggccacggaatcggaagtgggcacggacatggccaggccatgagcacgccgcccaataccacagcctcatcgtcatcctcgcgtgccagcagcggcggcaccaagaagcaacagcttcatcccgcccccatccaaaaccatcattaccaccacccaaatgaacagcacaagttctag

SEQ ID NO: 24630 - protein, 1436 aa, DROSOPHILA
MKSKLTSIFVTARFRIPARHHQGKGKPSSAPAQVEKGAATVCSASTAKSEEPLDLADLDLSRLRLSKKDLETLSSITPGLPKCFQEQLLAKLPPTQARKLSRTLSVQTSAPSSASTPKVYKRSQSSGRGYQPEQQPQEELAKPLTTDAPKTTSASTAIYRRSLSRSQAPTPNSGQDADSRAAPTPKSRSSSVCRDDYGKSSLCSSSTYTSDISEKYKYYSPYLSKSSNVSPSIASKDAPEKRYSGGLGRPPSGCLSPPPQLPQVAATEGTSSLRAGRSSQRRISRFLRPDFFDEPRDRETQSMLREIREKSIDRQDQEQTQPQDLRRRKHSLPNVEQAEQPAETAPIRSSMRHSRNKSMELFTEAESNGQVRDTVKTSTSRQRSVSKARELETELDKHELADKILQELQLLSAVRSQHEQTQESEKAEETSTIKKIKKLKPTESNEPEATKIASTTTSSTTTLVRKVKKVVKKTDEAPKTTGSENADLASSAPKETKLKRPKSYPMKDLGLSLKSSTDLPEPTTSLLPTKLPSKLPSGNTNESAVEPAPRESRLMRPKSYPATKLATPKELRKVTRSGVAIPTITEAIPTPSAMPTSTSSKSTSEEKSTSATPTGTMSAVTDAKDIVSSSSDSRPTTIKKIIKVSKKSKLMPPTPVTPTTPTTTATTTASTTPVESSKESSPVIKPKEKSPEKKPSKGLLYALGQKFEKLRDSAMSKEKKAGSTGAAASLACTQKQGSPEERSSPEKYKKNVSDTEKSQQTGLSDDKRVDKRSRFDTMLRSLRERSVPRSQPNGGVSPKRAASVEELHAGCPEGQGKQGGAVNKMFGGLLRRFDRESSEQRRVRSSRSTSNIERQVREEQDQLLDASLPTSPIYQNVVKSTKSKVSSTANGEENCNCETACPDCRQNNGQNVTTSGAPTNTTMPSSKEKRKGLMLDLASANVSASGAPSSVTTATTTTTSGSSYRGSKTNPALINGNGGLGMGIYSNLPPYPGAMKSASSNNSSSQQSMENATNNNSTNTNNNCSSQTSGYRTSSAHEINRNNPLLTPSFENIANYSSDSRSYQDDCASTSTFLSPTEEPELYFDNWSICSEDNYMLHATPSPTVSRLSRASLSSPTRCSESSDPNESVIDRIKRRSFYSRFNEQKKPRRTSSIVGPSAVRDYYREQQAAVKARSSNKLHAPDMDPPPRAHSPDIAQQFFRPLKLSPVGTELKPPVYRSTLDYSASSAGATSKPRKSLNDIRNTSPSFLSKRYETTDYSSVPMRYKSSSSSSPSNGAIASGYYNTYNPKRRSSYTLNGSLPTATSGSSAAGSSHLDGYATLGRRSLRPYDHRTMSLLEPPTSSSSRSGEGVSYQRREARTPNGFCIFCYYSKRKKTSPGHGIGSGHGHGQAMSTPPNTTASSSSSRASSGGTKKQQLHPAPIQNHHYHHPNEQHKF

SEQ ID NO: 24631 - DNA, 6060 bp, DROSOPHILA
tacggaatgaacgacttgtgggctttattaattaggcaacttttaactgccgatttaccttttatacagttttgcacgcattttcattacgcctcatttttcacccatacactctcacacgcacgcacgcacgcacagacacagttacacacgttcggaccgaatattgaaatttgcaactcgatttgctactgtgcgctcgtcgatttctggataacaacttagttcactactttttataaattaagctgggcttgtgtttaactgattttctacgaaacaatcctcgaaagaccaaaaaacgcacgcaagagagcacgagaaaaatggtgcgattttttcccctgcctgcaaacacacacacacacgcttatacatggacagagacggagtaagaccgtatagaaaaacgagggaaatactctaggctgatttaatgctgattactggtaaaagaaaaatgggataatttaattagcttttcccgtttattttaaacagatacttatatacttgtgctaaagacagaacttacctaaagccctctttacataaaagatgtttaaacataattatgaaataaaaatactgtttaaaatactgttgctggcgaaaccaattagccggtaaatttgtttatctactctttaaaactgtataggcccacggtaatatctttcgcgtttaactgataatttgtttttataatattataaattttatcttatttattggtcctggatccaaggatttctcggcaattggtatagacatttacacttcacattgtctaaatttgtaacttattcaacaactgtgtaccatgcaatatattttgctctaatttatttagtgtataaaaccttttcaatattttaattataattacgttcgacactgtttttgcggctgatttgggactaaaaaacgaatctgcccagttctagggtgaccatacaaaaacctctaatgaaataccgaattctgaaataccgcatctgcaacacgtgcgagtttagctctctctccaacaagtaaataaattttatattatatgcgatttgtacagggaaacatcatgccaggaaagttggtaagattgtctagatctttatggaaactatttggcctataacatactttgtttaggtgggctctccgaagggagctgctcgaacaggtacccaagcaattgcacatgccggggatcacagcgaccttgatgaaccaaaacccaaaatcgccaagagcgacccaccatccactgccataccaaagaagaacaacttcaagcagagagaaggtaccaagaatgtaaagccgcccactttggaggagatgaaggagctacgagacacccaaaatctcttccactccaatctctttaagcttcaagttaaggaaatgctggaggagctgcagttaaagcagaaatacacagatttcattgaaaactggcttgaatcctttacggcctttacccgacagctaaaggatggcttgatggagcgtacccacttggaagttccaatgaagctttctgaaaagccgaccggatttgttttctccaagcccaccagggaaccttatctgatcggagccgccgccacgggcactttgctgggtcccaaaattgtagtggatgtggccctggagatgccaaaagaatccctgcacaaagaagattacctaaaccttcgctatgaccagaagcgagctttgtatcttacttatgtgacggagaggatgatggagtccccagattatgcagaagatcagtttaatttcaactactatgctaacaacccgcttaagccggttctggaattgatcccagttactaagcaagtaaacaagcacctgcaagtgcgtctgttcatcactgccccattaagcagttttaagccaggcagatttgttccctggaacaacaatattcggccctcgttttacggtgacgaatgggacgagaaagatccgctgccctccacccaacactacaacgcaaacgtactgtttgatctaactttgtccgagaaccaggctcaattggataaggcctttaagagcaggcgtaattttcaggacggcctgctgctccttaaagtatggttgcgtcagaggcaactggacataggttacagtgggtttggtgcccacatcttagccgcttttattgtgtacctaaatacgcagcgcattctgcatcagtcaagcagcagttaccaagtggcacgcactgtatggaaccaactggcgaacacggactggacgaaaggcattagcctgtctgttgctcccattcaaacggaagaattaaacaagtttgccgaacactatgacgtttgctttatagacttcactggacagcataatctatgcgcaaatattccgctttacctgtatcagagagttcgagaggaggccaaactggcggtggaactactgaacgacatgaagctaaacagtttcccgcttatctttatgcaaaagtgtccactgtacagcagggtggataatatcttaaagtatgtgaagctaaaatgttagtttttcaattataaactttatttttccccaggatttccaattattcatgcataaatcaaatgcttacactgcattcgcatcctcgaattaagtacgattttgctaattatggttacccgcagctgctacatttactgactgagtgagttaactaagctaaacaggcaacttacaaagaaataataatcataactttaggctccttaaaaagggacttgctgaacgtgtccactccatactacccttagaaactgcgacagccgcctggcctgtggaaaaaaaagcgcccgttattgggaagtatattcaactgggccttatacttcagccagagcacgcataccaggtgttaaacaaaggacctgctgccaacgatgatcatgagggagctgaggaattccgacggttctggggagagaaatcaaacctacgtcggtttcaggatggcagcatcacagaagctgtggtttgggggaccgcccaggattcacccgccaagaagcgactaattgttcgccagattgtgctgcatctattggagcatcacctacaactggacagcaaggaagtacaatacattggcggcgagttggaccaagtctaccagctgtctccttggtttaaggtcaataagctaaagaccaagctgccattgggtcaagataccgacgcagaggcacttagtccgcacgtcatccgctgctatgatgagttggcacgccaactacacgggctgaatgatcttcctctagagatagtctccatatcaggcgtctcgcccattttccgctactgcgagccgcagcccgttctcccacaggcgcttctggtagaaaaccgcatcctggcaagcagcattcagcgtgtggtaatccagctcgggcaaagcggcaagtggcccactgaacttggtgcactgcgtgctcttaaaactgcatttcttatcgaaattggcgaaaagttggaagcgcagtgccggcttcattgggtgatgtccgccgacggtctgctcgtactcaagcaaggttactgcttccttatagagctggcacacaacaaggagctggcgctgctgaagcaggaagttactgagcgtggcataactacatatatagacaatgcagccagtcgttccttagagcgtcaacattatattctacccaaagtaagtggggctctacattcgcttcatcaaacttacagcgcatttggttccactgtgctgttggccaagcgctggctggccacacaactgctggacgatggcttgtggcctgatatggctactgagctactggtggcgcatctctttcagcagcggtatgcaccgcagtccatagcggcacctcaaactggattcatacgtttcctgcagctgctttcccatagcgattttaatggcgaactcttcctgctaaacttcaacaatagctggcagggtaagttctttgttaccactccataatgttataaaataattcaactttacgttctcaagaacaacaaattgccgatctggagcacaactaccgcagcaaccgtcaaagttatcctcctttggctgtggccacctcttacgatatgcagcatgccggacgattgtggacctcggatcagtcacccagtcaacgggtgcttggacatgtgacgcgactggcccgccatgcgctcgagattattgaaaccagcctgatgtcgaaagatctgaggtttgtgcggccggcccaattatttcgagcttccaacgagggatacgatctggttatccaatttaagccagatctcgtgccgaattccttaagctacgatctggggtcaccatttgtttcatttagccagccaaactttagcttgccccgcgcaggatcagattacattgctcgaattgtgggactactaagagtaagatgttataaagcagccagctttgtatttgaaaattctcatttcccttcttttttccgctagtctgcatactccgactttgctgcgttcttttacaatccgcacggaggcaaggaactgggcattgtatggcggccaccaacggaattcgctgcaaagccatttaaggtcacagagctgcaggcatgcagtccttgtggtaataaaaaggttcaagttctcaaggaaacactgctcgaggacttcaaactcttactgaaagatttctacctgcgcatcgccacaccagaggagctcaaacgggaacagcgcgagcatcagaagcccatgcggtactttgatgccaacaaggcagaggaggagtcgaagccaaagccgaaaaagcataggcaacgcaagggcaccgggaaaaaagcactacccaaaaggaaacgcctaataaaaagctcaacccttaaggtcttgaaatagttatagaaatatgtagctaaaccgttactaagttaaaaaaatagctttaattttggtttaaaaaaaaatggcatatagcagcataagaaatcgcgaaaaacggtgatataaaaactatagcattactgatgtttacttatggacgcgttttgactgagctcctgctgaagtatttcgtgatcaggattgagattcgtccaacccgtatgtttggagactgatggcttggagacttgagctcgcggatagggattttggcccaacggtatcgttctatagaaatgaggttccacatgaggttcaaagttattaacctgggtgcagagatcaaagcggatatgtctagatgtgcaaggctgctcctgtggtggtacgggcgactgaacttgaggttgcattggtactatcaacgtctgatccgtgcaggtcggttgtgacttacagtgctgacaggtgctttccaccgatgaagtgtaatcacattcagctgatgtgtaagactctgctgaggtcgtttcaaataggtcgctatatgtaccgcacccggtggagtttgtgttgcgctgagcctggcatctcgagttagcgggctcgttcttcatataggtattttcactgagacagctctgagtttggcaacccacattctgtggagccttcacaatagaagttctagttggggtggcggtgtccttcgtttggcaactcgcattccgaggcatctcgcgctccacagttgtctgcgttttggcaaacatttgagtttgacagctcgagtgctgcgtctcgcacttggggcagtgctggcatccagtgtttgtcatcaacccggatgtcgaggtgccggcatcgtagcaaagtggtaaacggtgttcagatcccgactttttctttgaccaaaccaattgagtagacacacttgcaactgtcttcagcgggttcgaggtttcctgtagaaaaagacatgtatcattggtcgactttgcagggttcacatcctcttcgatgtccattcgcatacagacccttttgtcagaagcattgcggagaagatcatccaaagtgcagaagtgcgtggtgtttggcggggggaaataaaccgcacctggcgaagaagtatccaagggaagaaac

SEQ ID NO: 24632 - DNA, 3593 bp, DROSOPHILA
gcaacacgtgcgagtttagctctctctccaacaagtaaataaattttatattatatgcgatttgtacagggaaacatcatgccaggaaagttggtgggctctccgaagggagctgctcgaacaggtacccaagcaattgcacatgccggggatcacagcgaccttgatgaaccaaaacccaaaatcgccaagagcgacccaccatccactgccataccaaagaagaacaacttcaagcagagagaaggtaccaagaatgtaaagccgcccactttggaggagatgaaggagctacgagacacccaaaatctcttccactccaatctctttaagcttcaagttaaggaaatgctggaggagctgcagttaaagcagaaatacacagatttcattgaaaactggcttgaatcctttacggcctttacccgacagctaaaggatggcttgatggagcgtacccacttggaagttccaatgaagctttctgaaaagccgaccggatttgttttctccaagcccaccagggaaccttatctgatcggagccgccgccacgggcactttgctgggtcccaaaattgtagtggatgtggccctggagatgccaaaagaatccctgcacaaagaagattacctaaaccttcgctatgaccagaagcgagctttgtatcttacttatgtgacggagaggatgatggagtccccagattatgcagaagatcagtttaatttcaactactatgctaacaacccgcttaagccggttctggaattgatcccagttactaagcaagtaaacaagcacctgcaagctcaattggataaggcctttaagagcaggcgtaattttcaggacggcctgctgctccttaaagtatggttgcgtcagaggcaactggacataggttacagtgggtttggtgcccacatcttagccgcttttattgtgtacctaaatacgcagcgcattctgcatcagtcaagcagcagttaccaagtggcacgcactgtatggaaccaactggcgaacacggactggacgaaaggcattagcctgtctgttgctcccattcaaacggaagaattaaacaagtttgccgaacactatgacgtttgctttatagacttcactggacagcataatctatgcgcaaatattccgctttacctgtatcagagagttcgagaggaggccaaactggcggtggaactactgaacgacatgaagctaaacagtttcccgcttatctttatgcaaaagtgtccactgtacagcagggtggataatatcttaaagatttccaattattcatgcataaatcaaatgcttacactgcattcgcatcctcgaattaagtacgattttgctaattatggttacccgcagctgctacatttactgactgagctccttaaaaagggacttgctgaacgtgtccactccatactacccttagaaactgcgacagccgcctggcctgtggaaaaaaaagcgcccgttattgggaagtatattcaactgggccttatacttcagccagagcacgcataccaggtgttaaacaaaggacctgctgccaacgatgatcatgagggagctgaggaattccgacggttctggggagagaaatcaaacctacgtcggtttcaggatggcagcatcacagaagctgtggtttgggggaccgcccaggattcacccgccaagaagcgactaattgttcgccagattgtgctgcatctattggagcatcacctacaactggacagcaaggaagtacaatacattggcggcgagttggaccaagtctaccagctgtctccttggtttaaggtcaataagctaaagaccaagctgccattgggtcaagataccgacgcagaggcacttagtccgcacgtcatccgctgctatgatgagttggcacgccaactacacgggctgaatgatcttcctctagagatagtctccatatcaggcgtctcgcccattttccgctactgcgagccgcagcccgttctcccacaggcgcttctggtagaaaaccgcatcctggcaagcagcattcagcgtgtggtaatccagctcgggcaaagcggcaagtggcccactgaacttggtgcactgcgtgctcttaaaactgcatttcttatcgaaattggcgaaaagttggaagcgcagtgccggcttcattgggtgatgtccgccgacggtctgctcgtactcaagcaaggttactgcttccttatagagctggcacacaacaaggagctggcgctgctgaagcaggaagttactgagcgtggcataactacatatatagacaatgcagccagtcgttccttagagcgtcaacattatattctacccaaagtaagtggggctctacattcgcttcatcaaacttacagcgcatttggttccactgtgctgttggccaagcgctggctggccacacaactgctggacgatggcttgtggcctgatatggctactgagctactggtggcgcatctctttcagcagcggtatgcaccgcagtccatagcggcacctcaaactggattcatacgtttcctgcagctgctttcccatagcgattttaatggcgaactcttcctgctaaacttcaacaatagctggcaggaacaacaaattgccgatctggagcacaactaccgcagcaaccgtcaaagttatcctcctttggctgtggccacctcttacgatatgcagcatgccggacgattgtggacctcggatcagtcacccagtcaacgggtgcttggacatgtgacgcgactggcccgccatgcgctcgagattattgaaaccagcctgatgtcgaaagatctgaggtttgtgcggccggcccaattatttcgagcttccaacgagggatacgatctggttatccaatttaagccagatctcgtgccgaattccttaagctacgatctggggtcaccatttgtttcatttagccagccaaactttagcttgccccgcgcaggatcagattacattgctcgaattgtgggactactaagatctgcatactccgactttgctgcgttcttttacaatccgcacggaggcaaggaactgggcattgtatggcggccaccaacggaattcgctgcaaagccatttaaggtcacagagctgcaggcatgcagtccttgtggtaataaaaaggttcaagttctcaaggaaacactgctcgaggacttcaaactcttactgaaagatttctacctgcgcatcgccacaccagaggagctcaaacgggaacagcgcgagcatcagaagcccatgcggtactttgatgccaacaaggcagaggaggagtcgaagccaaagccgaaaaagcataggcaacgcaagggcaccgggaaaaaagcactacccaaaaggaaacgcctaataaaaagctcaacccttaaggtcttgaaatagttatagaaatatgtagctaaaccgttactaagttaaaaaaatagctttaattttggtttaaaaaaaaatggcatatagcagcataagaaatcgcgaaaaacggtgatataaaaactatagcattactgatgttt

SEQ ID NO: 24633 - protein, 1134 aa, DROSOPHILA
MRFVQGNIMPGKLVGSPKGAARTGTQAIAHAGDHSDLDEPKPKIAKSDPPSTAIPKKNNFKQREGTKNVKPPTLEEMKELRDTQNLFHSNLFKLQVKEMLEELQLKQKYTDFIENWLESFTAFTRQLKDGLMERTHLEVPMKLSEKPTGFVFSKPTREPYLIGAAATGTLLGPKIVVDVALEMPKESLHKEDYLNLRYDQKRALYLTYVTERMMESPDYAEDQFNFNYYANNPLKPVLELIPVTKQVNKHLQAQLDKAFKSRRNFQDGLLLLKVWLRQRQLDIGYSGFGAHILAAFIVYLNTQRILHQSSSSYQVARTVWNQLANTDWTKGISLSVAPIQTEELNKFAEHYDVCFIDFTGQHNLCANIPLYLYQRVREEAKLAVELLNDMKLNSFPLIFMQKCPLYSRVDNILKISNYSCINQMLTLHSHPRIKYDFANYGYPQLLHLLTELLKKGLAERVHSILPLETATAAWPVEKKAPVIGKYIQLGLILQPEHAYQVLNKGPAANDDHEGAEEFRRFWGEKSNLRRFQDGSITEAVVWGTAQDSPAKKRLIVRQIVLHLLEHHLQLDSKEVQYIGGELDQVYQLSPWFKVNKLKTKLPLGQDTDAEALSPHVIRCYDELARQLHGLNDLPLEIVSISGVSPIFRYCEPQPVLPQALLVENRILASSIQRVVIQLGQSGKWPTELGALRALKTAFLIEIGEKLEAQCRLHWVMSADGLLVLKQGYCFLIELAHNKELALLKQEVTERGITTYIDNAASRSLERQHYILPKVSGALHSLHQTYSAFGSTVLLAKRWLATQLLDDGLWPDMATELLVAHLFQQRYAPQSIAAPQTGFIRFLQLLSHSDFNGELFLLNFNNSWQEQQIADLEHNYRSNRQSYPPLAVATSYDMQHAGRLWTSDQSPSQRVLGHVTRLARHALEIIETSLMSKDLRFVRPAQLFRASNEGYDLVIQFKPDLVPNSLSYDLGSPFVSFSQPNFSLPRAGSDYIARIVGLLRSAYSDFAAFFYNPHGGKELGIVWRPPTEFAAKPFKVTELQACSPCGNKKVQVLKETLLEDFKLLLKDFYLRIATPEELKREQREHQKPMRYFDANKAEEESKPKPKKHRQRKGTGKKALPKRKRLIKSSTLKVLK

SEQ ID NO: 24634 - DNA, 5050 bp, DROSOPHILA
attgggcaggggcatttgatatgctgccacctcggccttggtgtccacatcctttaagctggcagccagcagctgatcgccacttaggcagagcaacactgtcacgcagaatccggtgatgcccagaataatgagattgcgctgacaacgcggtagctgattccaagcctgaaccgtgagacaaaagatcgtacttataagttctgggtttcttgaggatgtcccaggaccccagcaactggacttctgccaggttgctacctacccgacgcaggctcttcctgccccgctcgtccgtcgtcgccgctgatcccggcgggagtgtgagcgttatgtgaccgccgtccttcatagtgtttcactaaatgccgccgccggaattcagagtgtgggaaagttggatgggaaattccacagcattcgcctcgaataaaaatcgattgctgtgcgccgctggccgcggaggaatcggagctaactaaccaaggttggtccaactactacctcttttatgccttaatcatctctatacgtgccagtgcattaatttatatatgctagttctggcccacactatgcaaaattacaaataagaaattctaaaattatttcacgagagctgcatttttgagctgcaatgctgccaacttgttcttcaacagtccggccaaaactaaagatggggctagcaatcatttacttttgaaatacctcttaaataaaaaaaaagcaaattaaattatattttagatattatcactactttataaaagaatttttctaaagaatatatattaatacgaagtggctaattttttcgaaaatccagctaacacagtatgaatttagccaaatctagagtggccaacactagtcccacttaacagtgatttatttggcagccctggtaagctccaagtgtgcccacaatacggcattaaagtggtcacatctggtcacatcccattttcacatcaaaatttcgacggaagtcggtgcgtaaacccatagcccatttttagttagataatagcacttaaaacccaaaaaataacacctacagccggcaacgatagcgatagacccataggaaagcgaaccgcaaaccgacgatgctccgaacccgactcatccaggcggccagctccgcccagcgagcgttctccaccagccagaaggccctggcggccaagcagatgaccgtgcgagatgccctcaacagcgcattggacgatgagctggcccgcgacgaccgcgtcttcatcctgggcgaggaggtggcccagtacgacggtgcttacaaggtgagatctgcgacttttcctgcccctgcgcgattacgtaaacagcaagcaggcggttgcgacgacgacagctgatgcaggtggccgggatgggggaagttggtggtcagcggggtgatatatgcgtgctatatgtaactactgatagtgattccgaacaggtcgacgcgaatccgaatgcgtgatcggagtgggcaaggtcacgcagaatatgtgtgaccgactgtctgctgattatatagattggcccataaaacaacgatttgtttacccatttgaggtggattgataaccggcgttagcaattctatcctattagattcatttaaactatgattgtggctactggtgtaacaactagataggacacgcaaagtacaatacaattacctgttagaataatggtatttcctgaagaaatcttagttaatgagttatcagcttggaaagttttacaaacagataaaaggttcccatcctgaataagccctacatatttttctggtatcctaacattctattaatcatttaatgccctttttaggtttcccgtggactgtggaagaagtacggcgacaagcgcgtcatcgacacgccaatcacagagatgggctttgccggcatcgctgttggcgctgccatggccggtctgcgtcccgtgtgcgagttcatgacctggaacttctccatgcaggccatcgatcacgtgagttgcctcatccttgtcctaagaaccactccccgcactccagcagtaggctaactactcatattatctcattgccaacaaaacgtaaaccaaaagaaagaacacgacaatccaatacaaatgcctcacaactccaacagctagcaaatagaccaattcaagtgcaatatgcagcggcgcttaatgggataatatgggtggattagctcctgccccaagtcatagatcggacctcactaatccccacccatattatccgattatgtgcaggcaaagatactcgattgcgccaagccgccagtcggtgatcgccctctgccaataagcctcataattgaaagtccacgctcaacttggctgaatgagatcaacgacatcctgcacagagatcgagtcggcgaggtgattgcgccgccgctggacaagagcaagtcggacaagatggaggcggcccgcctcatcgtcattcggcggcgcaagatgaagaagcacaagctaaagaagctgcgtcgcaagatgaagttcgagtgggccaaggtgcgccagcgccgcgagatgcgcaaagagaaggccttccaagcaaagctgatatcccagatcaagcaggcggaggcattcagtgcggagcagcacgtggcggagatcctgcggcaggccaacgagacgccgctgccgcgtttctggaagggacgccgcctgccggcatttatcattaagcagaaactaggcattaagtaaagatcaagacggaacagaaaggagtgcatcaaataaagcgtattaacttgaattggcgaatttgcagtttgatggaacaggcatccacactgagcattattttcattcatttttcactttattatttctaagtcatattacacattcataataatatggattgctaaaatatatccctttaaaatttcaaatcttagatcatcaactcggcggccaagaccttctacatgtctgccggtgccgtcaatgtgcccattgtgttccgtggtcccaatggagccgcttccggtgttgccgcccagcactctcagtgcttcgccgcctggtacgcccactgccccggcctgaaggtcctttcgccatacgatgccgaggatgcccgcggactgttgaagtccgcaatccgtgatcccgatccagtggtcttcctggagaatgagctggtctatggcacggcattccctgtggccgataacgtggccgacaaggacttcttggtgcccatcggcaaggccaaggtaatgcggccgggcaaggacattaccctggtggcgcattccaaggcggtggagacatcgcttctggcagctgccgagctggccaagaagggtacggcactgttttactttgaatgacgcgaaaagtagctaaccttctcttatatgtttaggtattgaggctgaggtcattaacctgcgctccattcgtcctctggacacggcgaccatcttcgcctctgtacgaaagacccaccatctggtgaccgtggagaacggctggccccaacacggtgagtgggaaattcagctaattgaaagcctagcgatatttataaatttttaccctcttaggcgttggagctgagatctgcgcccgcataatggaggaccagaccttcttcgagctggacgcccccgtatggcgctgcgccggcgtggatgtgcccatgccctatgccaagacgctggaggcccacgccctgccccgcgttcaggatctcgtggaggcgactcttaaggtcttgggtggcaaagtgggcaaggccgctgcggccaacaagtaggaactcaggactagccagcctcccgatcggaacccccagctaactaaatttatagtccaagtcgaaacgctgcctctggtctaaccgagctgcccccataatagtgcaccgaactggaaattgaatgttctgaaaataaagcactaccgctttcgggttttgattagttttcggacgttctagtttaattatttggttatagaaatctcttgtgaaaaataaacgaaaacataaatacattttgagtgcttatattttggtatagttaatgatataatatcagaagataaaaaatatataattcttatcgttaatgattgaagtttaaaaagtgcgcgcaccgatgaaaacgttttcctattgaacgctgtccaacactgacgacatctattttttcgatatcagcctatcgtttagcaataggtgtcctcatatcgatagcgataatagcaaagttaacaataacaaaagatataacataacaaataattgcaatgctttggctgtaatggcaaacagctccagctccgacgaaagctgcaaggcccccgacaactttcgcatctcgagcgcctccacaaacggcgaggacgaggaatcagatgtcgcaggatacacaacaaagcgcaggccaacggcagcgacgaaggaactgttgaaggatgcgaacgccaaggataggaacgccaccacgggaatgggtgcccacatgcggtgcccactgtgccacagctgcagcgccagccgattccactgtcgcaattgcgtcagaaacggaaacattactcacagccaggcggaaaggcccgaaaggtttgcccaccttacactactcaccttatctgaaccacacatgtaaactgaatcgatcttacaatatttcagcctgacggagaagcagcagcgctacatcaacctgcaggcgggcctcaaaaccttcagcacgcgctacgaacgccttatcgggcagcaccgctccaatgaagatcgcctgatggccatcaaggccaagcgaaagcaactggagctcctacagcaactaatctccggcacgggacagagactgcgcgtcctcggcgagcgacgcgatgaattgcgtcgcgccaatgccgagaagcggaagaacctacctaaatacccggacaaggtcaagatgctcgaaaactacgtgttggatcgagtggagaaaatagagaaactcagggagacccatctgggtcttctggacagcataaa

SEQ ID NO: 24635 - DNA, 1797 bp, DROSOPHILA
taaacccatagcccatttttagttagataatagcacttaaaacccaaaaaataacacctacagccggcaacgatagcgatagacccataggaaagcgaaccgcaaaccgacgatgctccgaacccgactcatccaggcggccagctccgcccagcgagcgttctccaccagccagaaggccctggcggccaagcagatgaccgtgcgagatgccctcaacagcgcattggacgatgagctggcccgcgacgaccgcgtcttcatcctgggcgaggaggtggcccagtacgacggtgcttacaaggtttcccgtggactgtggaagaagtacggcgacaagcgcgtcatcgacacgccaatcacagagatgggctttgccggcatcgctgttggcgctgccatggccggtctgcgtcccgtgtgcgagttcatgacctggaacttctccatgcaggccatcgatcacgcaaagatactcgattgcgccaagccgccagtcggtgatcgccctctgccaataagcctcataattgaaagtccacgctcaacttggctgaatgagatcaacgacatcctgcacagagatcgagtcggcgaggtgattgcgccgccgctggacaagagcaagtcggacaagatggaggcggcccgcctcatcgtcattcggcggcgcaagatgaagaagcacaagctaaagaagctgcgtcgcaagatgaagttcgagtgggccaaggtgcgccagcgccgcgagatgcgcaaagagaaggccttccaagcaaagctgatatcccagatcaagcaggcggaggcattcagtatcatcaactcggcggccaagaccttctacatgtctgccggtgccgtcaatgtgcccattgtgttccgtggtcccaatggagccgcttccggtgttgccgcccagcactctcagtgcttcgccgcctggtacgcccactgccccggcctgaaggtcctttcgccatacgatgccgaggatgcccgcggactgttgaagtccgcaatccgtgatcccgatccagtggtcttcctggagaatgagctggtctatggcacggcattccctgtggccgataacgtggccgacaaggacttcttggtgcccatcggcaaggccaaggtaatgcggccgggcaaggacattaccctggtggcgcattccaaggcggtggagacatcgcttctggcagctgccgagctggccaagaagggtattgaggctgaggtcattaacctgcgctccattcgtcctctggacacggcgaccatcttcgcctctgtacgaaagacccaccatctggtgaccgtggagaacggctggccccaacacggcgttggagctgagatctgcgcccgcataatggaggaccagaccttcttcgagctggacgcccccgtatggcgctgcgccggcgtggatgtgcccatgccctatgccaagacgctggaggcccacgccctgccccgcgttcaggatctcgtggaggcgactcttaaggtcttgggtggcaaagtgggcaaggccgctgcggccaacaagtaggaactcaggactagccagcctcccgatcggaacccccagctaactaaatttatagtccaagtcgaaacgctgcctctggtctaaccgagctgcccccataatagtgcaccgaactggaaattgaatgttctgaaaataaagcactaccgctttcgggttttgattagttttcggacgttctagtttaattatttggttatagaaatctcttgtgaaaaataaacgaaaacataaat

SEQ ID NO: 24636 - protein, 482 aa, DROSOPHILA
MLRTRLIQAASSAQRAFSTSQKALAAKQMTVRDALNSALDDELARDDRVFILGEEVAQYDGAYKVSRGLWKKYGDKRVIDTPITEMGFAGIAVGAAMAGLRPVCEFMTWNFSMQAIDHAKILDCAKPPVGDRPLPISLIIESPRSTWLNEINDILHRDRVGEVIAPPLDKSKSDKMEAARLIVIRRRKMKKHKLKKLRRKMKFEWAKVRQRREMRKEKAFQAKLISQIKQAEAFSIINSAAKTFYMSAGAVNVPIVFRGPNGAASGVAAQHSQCFAAWYAHCPGLKVLSPYDAEDARGLLKSAIRDPDPVVFLENELVYGTAFPVADNVADKDFLVPIGKAKVMRPGKDITLVAHSKAVETSLLAAAELAKKGIEAEVINLRSIRPLDTATIFASVRKTHHLVTVENGWPQHGVGAEICARIMEDQTFFELDAPVWRCAGVDVPMPYAKTLEAHALPRVQDLVEATLKVLGGKVGKAAAANK

SEQ ID NO: 24637 - DNA, 5036 bp, DROSOPHILA
catagaagtttaaactcactcactcttttttgaagtattaaccgaccactttagtgccctgctgactaacaaaagtgcttccgccaaataatttaaagaatcccctttacatatagtttatgtatttaataaatgtttacataaatcaatgtacttcgttcaatatacacaaaatgcgttcttctacgggctaatgacccattgcaaaatagtttaaaagtgttgaaggattggccctcaaattcaaagggggggagacaaaggaggtggaaagatttacgatatctgtgtatatatatatatatttatgggtcctttataattttaataatcaggtgcattttgagcctgtatattgttcactttagttaactgtacgttctaagcatggacaatcagttaagcatggagtacatatgtataagtggcttcctctacttattgtttaactttgtgtaattgagtgggtagctgctgcctttgctctggctgtttttctgacctccggctggtggtcggattgctcgcctatggacaaaaatacactcgtggtggttgtggtgtgcaagttcaaggaactatttaagattaaagcatttatccatgagtgttgcacgactgtgctcgcggtctctaaaaaataatatgctctgccatgttcgaagcgcaccaaaagtgtccataaaaatatacacatcccattttgacattcaaaatctaggtgcattgtctaaaatattgcttaacattcactttacatctgcttgccccttcagtttgctactcgtagtcctcctcgtcgcggtccagtggttttcatttgcttgcgtacaacctacagtatttgattgtgttcgtggactcgggattttttaaaaacaactacttggaatatctgaaggttttttcccaaaagctcggctcaaactcttttcgttatctagatcacaaaacataagggctgctctgtagttacagtaataataatcagttggttgtgtaaatcagtttatctaattaaaagtaaattaaactagcggtaagctttaggtacacgtactcactacacatgcatcatatacaatatcaatatcaatatctctggggaagtcttacaaacgttcacaacgaaacttagccgaaaaaaacagtggagcattaacaataaacggtaataatataggacacgatcccacagatctgccaactatctaactagctaaatggttatatcttcgctttgcttttgcctaaaccgtactcaaatgtttctctccacatcggaacctgtccctaaatcaatttgtcttattttcttgtaactagaaaaaacgaaaaagaaataaagaatacaataaattaaatgcaaattgtaaatcaaatgacttttggtagttctttactcgtcctcagcttcggtgattgtggaattcattatgtgcgtctcctttttgaacagtaactgtcgatgatgctgcgggaataaggattgcttagtgtcaattgttatattaaatatacagaatattgtatattacttcttcgttttgaatcataacgatacggtgctccagttgtggcgccaaatcgcatgtggactgctccaggtcatccaaggacgcacgtcgtaacatctttaagggagtaaatatttcatttcagatatttcatttatatatagttattattcaatcgcgaataccttttgagaatttccatgtgtcaaatccatcgacttgttgtgatggcccacggacaatttgcgaatgggcgatggtccatccagatccatactatccaggcactgcaccagactatgcctccgggaaagggtcaccagcgactggcggtgcttagtgttttgtccacacttcctcgaattgatggccttgaaatggttctgcagagttattcccaactccgggcaagcatcatcatccatctgcaatggggtaatagttgcttgaaaacgagaactttatgcaaatgaaaagccacgactcaccagcacagttgcatccttgaacatggtgtagccatcacagcccatgaagatataactcttgacgcacaacttgtatgattgctccaggttaaggtactcatcgcccacctggataagttgcggatcaatacgtttgccaggctccgcctgcggatcgaaggcgaaactgatgcccgacacctgggggaacctgccctccagcttgggataggcagacactccgttctccagtgcttgccagagtattttacccttcacttcgagcaggattagtgggtcacgcatgggaataacgttcaccagatcgcccatggtaaaggcacccaccggatgcactcgatccgaacggaaggtgccaccattcaggatgaccacatcggcgccaacggcggcaagcaccacgtcgcacacccagttgcccagatttgtttcctgggttcgtacgcgggaaaaacggccatccaattccacgctaaagacacccatgacatccgaaagcttgctctcgatgaactctgtaaggaacaaggaactcgattagcttgatttagtaatttaaaatcttaatctttccttcaaaaagtagcctgccgaaaataaattccgtaaacaaaactaaactaaaacccaaaaatgatgttctttccacctactggcatatttggagagctcctgtttcagttccggatcctccggaattttggccgtcacatcgaagcacttgacgtccgttgtgaaatgttcacgattggcggcatcccgctcgatagtgatgacggagaattgctggaagtccgtgcctgatttgacaatcattttgccattgatttcggtgacctcgcggacgtgatcgtgaccaccgagtataatatcgatgccgttgcatttctcggccagattaatatcgttgggagtacgcatgtgggtaagggcaatgatgaggtcacatccctcgtttctcagctcgcgggcaagcttatttcccgcctccacgtaatcaatgtaggtcacctcattcggatcgatggtgggcagagtctccaaccattctcgctccaccagtccaatcaagccaatggatatctgattgtgtagtatgaagtgcgagatcttgccaccacccaatggacgaccggtttcattgtccaccacattggacatgagccaggggaattctgtctgtttgatcagtttgaccagcacatccaagccgtgatctggagaggattataagttagaaaatgccttctaaaactcatcttcttcataccaaaatcgtggttgccaaagacggcacagtgagttcccaccgtattgagcacaggaatcatctgttctccttgggtaaaggtgctcactgcaagttacaaaacatatatcattccacttcaaaagcaatttatttccattcaatacttacacatactcggcgagaaggcatcaccgctgaagagcacgagcggattaagatgcgcgaaactcttgatggccgtggcaaatctggccgcacctccaacgggttccgtttccgccatagactcaatattgtagacatcgttgtagtgcagaatggtcagtggcttgtcctcgccctcggtcattttcagtagcttcttggtcttctccagctgcgaggatatcgatgtggagcgtccggtcaggccgtgtgtgattattcgtgatccggaaacggacccgcaccccgatccccgatgtcttggactttgtggttggctgacggaggcgtaggcgcgtgtgggtctcgtcaggagttccctggcatcaagtggcgtcagcgattggcttcctccggcagctgaaccttcctctggttcctctggtccaaattgcagcgttgagccactcaacgaggcggtggcactggctggagcagctggaatttcgctggaggtgggtgtggttggtgtgggcgtgcccagagataggtccagggatcgaaagttggggttgctgctctgcagcatcgacaaagttcgtgtgccggcgtctcgcacttcaatggaagcctgcaaaagatgtggaaattatgcattaatcaacaaatgctcagaggtaatccttaaagacatcgaaggacattaggggcaatagaagaatcaggcgggtggatacaacacaaaagctaaggggtgcaggtatatcatagtgtttctgggtgtacactgtgtatcgtgctgggtggttcaacatcgattcggatatcacattttggattttaggatttggacagaacctgcttcagccagcccaccacattgcccatggcggcggctcctcctgaacgaccactgcctgtcaggtggctcaggcggcgagtggatccatggccagtgggtggtggcgttgtgggcggcactgttgttgatcccgatcctccgactccgccgcctcctcctcctcctcctccgtccattcccgcattgctcatcctacagacgctgcttggttaggaaagatcaaaatggaaacggcacacaagagattgatgatagactcgacttgagaggcaatcttaatggttcgttttcatgatctgattgctcatatggttttaattagtaaatcgtcagctaatcgtaatattattttaaggcgcctacttattatttaatgcatttatcgtacagataccaaacctttttttttatttaataaaagatttagtttggtaattcctaagaatatttttccaccctgtgatgttaagatacaatattatgatgtacggattcttcacttaataaataataatttaaaaaaaaaataaaagattcagtatacaaataagtaagtattattacaaaatagctacgaagagaatttaaagagtacatgtcacgtatatgttgtagttaattagaattccaatacttctgatgtagttaataaagtctcaaaacgcagttggtcattttatctttatttggtttttattaagcgagtgtacattccagatctattcctgatttataactaatcttagtgtggtctacaggcagatctcttgtga

SEQ ID NO: 24638 - DNA, 2506 bp, DROSOPHILA
gcaggcttccattgaagtgcgagacgccggcacacgaactttgtcgatgctgcagagcagcaaccccaactttcgatccctggacctatctctgggcacgcccacaccaaccacacccacctccagcgaaattccagctgctccagccagtgccaccgcctcgttgagtggctcaacgctgcaatttggaccagaggaaccagaggaaggttcagctgccggaggaagccaatcgctgacgccacttgatgccagggaactcctgacgagacccacacgcgcctacgcctccgtcagccaaccacaaagtccaagacatcggggatcggggtgcgggtccgtttccggatcacgaataatcacacacggcctgaccggacgctccacatcgatatcctcgcagctggagaagaccaagaagctactgaaaatgaccgagggcgaggacaagccactgaccattctgcactacaacgatgtctacaatattgagtctatggcggaaacggaacccgttggaggtgcggccagatttgccacggccatcaagagtttcgcgcatcttaatccgctcgtgctcttcagcggtgatgccttctcgccgagtatgttgagcacctttacccaaggagaacagatgattcctgtgctcaatacggtgggaactcactgtgccgtctttggcaaccacgattttgatcacggcttggatgtgctggtcaaactgatcaaacagacagaattcccctggctcatgtccaatgtggtggacaatgaaaccggtcgtccattgggtggtggcaagatctcgcacttcatactacacaatcagatatccattggcttgattggactggtggagcgagaatggttggagactctgcccaccatcgatccgaatgaggtgacctacattgattacgtggaggcgggaaataagcttgcccgcgagctgagaaacgagggatgtgacctcatcattgcccttacccacatgcgtactcccaacgatattaatctggccgagaaatgcaacggcatcgatattatactcggtggtcacgatcacgtccgcgaggtcaccgaaatcaatggcaaaatgattgtcaaatcaggcacggacttccagcaattctccgtcatcactatcgagcgggatgccgccaatcgtgaacatttcacaacggacgtcaagtgcttcgatgtgacggccaaaattccggaggatccggaactgaaacaggagctctccaaatatgccaagttcatcgagagcaagctttcggatgtcatgggtgtctttagcgtggaattggatggccgtttttcccgcgtacgaacccaggaaacaaatctgggcaactgggtgtgcgacgtggtgcttgccgccgttggcgccgatgtggtcatcctgaatggtggcaccttccgttcggatcgagtgcatccggtgggtgcctttaccatgggcgatctggtgaacgttattcccatgcgtgacccactaatcctgctcgaagtgaagggtaaaatactctggcaagcactggagaacggagtgtctgcctatcccaagctggagggcaggttcccccaggtgtcgggcatcagtttcgccttcgatccgcaggcggagcctggcaaacgtattgatccgcaacttatccaggtgggcgatgagtaccttaacctggagcaatcatacaagttgtgcgtcaagagttatatcttcatgggctgtgatggctacaccatgttcaaggatgcaactgtgctgatggatgatgatgcttgcccggagttgggaataactctgcagaaccatttcaaggccatcaattcgaggaagtgtggacaaaacactaagcaccgccagtcgctggtgaccctttcccggaggcatagtctggtgcagtgcctggatagtatggatctggatggaccatcgcccattcgcaaattgtccgtgggccatcacaacaagtcgatggatttgacacatggaaattctcaaaagatgttacgacgtgcgtccttggatgacctggagcagtccacatgcgatttggcgccacaactggagcaccgtatcgttatgattcaaaacgaagaacatcatcgacagttactgttcaaaaaggagacgcacataatgaattccacaatcaccgaagctgaggacgattacaagaaaataagacaaattgatttagggacaggttccgatgtggagagaaacatttgagtacggtttaggcaaaagcaaagcgaagatataaccatttagctagttagatagttggcagatctgtgggatcgtgtcctatattattaccgtttattgttaatgctccactgtttttttcggctaagtttcgttgtgaacgtttgtaagacttccccagagatattgatattgatattgtatatgatgcatgtgtagtgagtacgtgtacctaaagcttaccgctagtttaatttacttttaattagataaactgattta

SEQ ID NO: 24639 - protein, 732 aa, DROSOPHILA
MLQSSNPNFRSLDLSLGTPTPTTPTSSEIPAAPASATASLSGSTLQFGPEEPEEGSAAGGSQSLTPLDARELLTRPTRAYASVSQPQSPRHRGSGCGSVSGSRIITHGLTGRSTSISSQLEKTKKLLKMTEGEDKPLTILHYNDVYNIESMAETEPVGGAARFATAIKSFAHLNPLVLFSGDAFSPSMLSTFTQGEQMIPVLNTVGTHCAVFGNHDFDHGLDVLVKLIKQTEFPWLMSNVVDNETGRPLGGGKISHFILHNQISIGLIGLVEREWLETLPTIDPNEVTYIDYVEAGNKLARELRNEGCDLIIALTHMRTPNDINLAEKCNGIDIILGGHDHVREVTEINGKMIVKSGTDFQQFSVITIERDAANREHFTTDVKCFDVTAKIPEDPELKQELSKYAKFIESKLSDVMGVFSVELDGRFSRVRTQETNLGNWVCDVVLAAVGADVVILNGGTFRSDRVHPVGAFTMGDLVNVIPMRDPLILLEVKGKILWQALENGVSAYPKLEGRFPQVSGISFAFDPQAEPGKRIDPQLIQVGDEYLNLEQSYKLCVKSYIFMGCDGYTMFKDATVLMDDDACPELGITLQNHFKAINSRKCGQNTKHRQSLVTLSRRHSLVQCLDSMDLDGPSPIRKLSVGHHNKSMDLTHGNSQKMLRRASLDDLEQSTCDLAPQLEHRIVMIQNEEHHRQLLFKKETHIMNSTITEAEDDYKKIRQIDLGTGSDVERNI

SEQ ID NO: 24640 - DNA, 5039 bp, DROSOPHILA
cgacatagaagtttaaactcactcactcttttttgaagtattaaccgaccactttagtgccctgctgactaacaaaagtgcttccgccaaataatttaaagaatcccctttacatatagtttatgtatttaataaatgtttacataaatcaatgtacttcgttcaatatacacaaaatgcgttcttctacgggctaatgacccattgcaaaatagtttaaaagtgttgaaggattggccctcaaattcaaagggggggagacaaaggaggtggaaagatttacgatatctgtgtatatatatatatatttatgggtcctttataattttaataatcaggtgcattttgagcctgtatattgttcactttagttaactgtacgttctaagcatggacaatcagttaagcatggagtacatatgtataagtggcttcctctacttattgtttaactttgtgtaattgagtgggtagctgctgcctttgctctggctgtttttctgacctccggctggtggtcggattgctcgcctatggacaaaaatacactcgtggtggttgtggtgtgcaagttcaaggaactatttaagattaaagcatttatccatgagtgttgcacgactgtgctcgcggtctctaaaaaataatatgctctgccatgttcgaagcgcaccaaaagtgtccataaaaatatacacatcccattttgacattcaaaatctaggtgcattgtctaaaatattgcttaacattcactttacatctgcttgccccttcagtttgctactcgtagtcctcctcgtcgcggtccagtggttttcatttgcttgcgtacaacctacagtatttgattgtgttcgtggactcgggattttttaaaaacaactacttggaatatctgaaggttttttcccaaaagctcggctcaaactcttttcgttatctagatcacaaaacataagggctgctctgtagttacagtaataataatcagttggttgtgtaaatcagtttatctaattaaaagtaaattaaactagcggtaagctttaggtacacgtactcactacacatgcatcatatacaatatcaatatcaatatctctggggaagtcttacaaacgttcacaacgaaacttagccgaaaaaaacagtggagcattaacaataaacggtaataatataggacacgatcccacagatctgccaactatctaactagctaaatggttatatcttcgctttgcttttgcctaaaccgtactcaaatgtttctctccacatcggaacctgtccctaaatcaatttgtcttattttcttgtaactagaaaaaacgaaaaagaaataaagaatacaataaattaaatgcaaattgtaaatcaaatgacttttggtagttctttactcgtcctcagcttcggtgattgtggaattcattatgtgcgtctcctttttgaacagtaactgtcgatgatgctgcgggaataaggattgcttagtgtcaattgttatattaaatatacagaatattgtatattacttcttcgttttgaatcataacgatacggtgctccagttgtggcgccaaatcgcatgtggactgctccaggtcatccaaggacgcacgtcgtaacatctttaagggagtaaatatttcatttcagatatttcatttatatatagttattattcaatcgcgaataccttttgagaatttccatgtgtcaaatccatcgacttgttgtgatggcccacggacaatttgcgaatgggcgatggtccatccagatccatactatccaggcactgcaccagactatgcctccgggaaagggtcaccagcgactggcggtgcttagtgttttgtccacacttcctcgaattgatggccttgaaatggttctgcagagttattcccaactccgggcaagcatcatcatccatctgcaatggggtaatagttgcttgaaaacgagaactttatgcaaatgaaaagccacgactcaccagcacagttgcatccttgaacatggtgtagccatcacagcccatgaagatataactcttgacgcacaacttgtatgattgctccaggttaaggtactcatcgcccacctggataagttgcggatcaatacgtttgccaggctccgcctgcggatcgaaggcgaaactgatgcccgacacctgggggaacctgccctccagcttgggataggcagacactccgttctccagtgcttgccagagtattttacccttcacttcgagcaggattagtgggtcacgcatgggaataacgttcaccagatcgcccatggtaaaggcacccaccggatgcactcgatccgaacggaaggtgccaccattcaggatgaccacatcggcgccaacggcggcaagcaccacgtcgcacacccagttgcccagatttgtttcctgggttcgtacgcgggaaaaacggccatccaattccacgctaaagacacccatgacatccgaaagcttgctctcgatgaactctgtaaggaacaaggaactcgattagcttgatttagtaatttaaaatcttaatctttccttcaaaaagtagcctgccgaaaataaattccgtaaacaaaactaaactaaaacccaaaaatgatgttctttccacctactggcatatttggagagctcctgtttcagttccggatcctccggaattttggccgtcacatcgaagcacttgacgtccgttgtgaaatgttcacgattggcggcatcccgctcgatagtgatgacggagaattgctggaagtccgtgcctgatttgacaatcattttgccattgatttcggtgacctcgcggacgtgatcgtgaccaccgagtataatatcgatgccgttgcatttctcggccagattaatatcgttgggagtacgcatgtgggtaagggcaatgatgaggtcacatccctcgtttctcagctcgcgggcaagcttatttcccgcctccacgtaatcaatgtaggtcacctcattcggatcgatggtgggcagagtctccaaccattctcgctccaccagtccaatcaagccaatggatatctgattgtgtagtatgaagtgcgagatcttgccaccacccaatggacgaccggtttcattgtccaccacattggacatgagccaggggaattctgtctgtttgatcagtttgaccagcacatccaagccgtgatctggagaggattataagttagaaaatgccttctaaaactcatcttcttcataccaaaatcgtggttgccaaagacggcacagtgagttcccaccgtattgagcacaggaatcatctgttctccttgggtaaaggtgctcactgcaagttacaaaacatatatcattccacttcaaaagcaatttatttccattcaatacttacacatactcggcgagaaggcatcaccgctgaagagcacgagcggattaagatgcgcgaaactcttgatggccgtggcaaatctggccgcacctccaacgggttccgtttccgccatagactcaatattgtagacatcgttgtagtgcagaatggtcagtggcttgtcctcgccctcggtcattttcagtagcttcttggtcttctccagctgcgaggatatcgatgtggagcgtccggtcaggccgtgtgtgattattcgtgatccggaaacggacccgcaccccgatccccgatgtcttggactttgtggttggctgacggaggcgtaggcgcgtgtgggtctcgtcaggagttccctggcatcaagtggcgtcagcgattggcttcctccggcagctgaaccttcctctggttcctctggtccaaattgcagcgttgagccactcaacgaggcggtggcactggctggagcagctggaatttcgctggaggtgggtgtggttggtgtgggcgtgcccagagataggtccagggatcgaaagttggggttgctgctctgcagcatcgacaaagttcgtgtgccggcgtctcgcacttcaatggaagcctgcaaaagatgtggaaattatgcattaatcaacaaatgctcagaggtaatccttaaagacatcgaaggacattaggggcaatagaagaatcaggcgggtggatacaacacaaaagctaaggggtgcaggtatatcatagtgtttctgggtgtacactgtgtatcgtgctgggtggttcaacatcgattcggatatcacattttggattttaggatttggacagaacctgcttcagccagcccaccacattgcccatggcggcggctcctcctgaacgaccactgcctgtcaggtggctcaggcggcgagtggatccatggccagtgggtggtggcgttgtgggcggcactgttgttgatcccgatcctccgactccgccgcctcctcctcctcctcctccgtccattcccgcattgctcatcctacagacgctgcttggttaggaaagatcaaaatggaaacggcacacaagagattgatgatagactcgacttgagaggcaatcttaatggttcgttttcatgatctgattgctcatatggttttaattagtaaatcgtcagctaatcgtaatattattttaaggcgcctacttattatttaatgcatttatcgtacagataccaaacctttttttttatttaataaaagatttagtttggtaattcctaagaatatttttccaccctgtgatgttaagatacaatattatgatgtacggattcttcacttaataaataataatttaaaaaaaaaataaaagattcagtatacaaataagtaagtattattacaaaatagctacgaagagaatttaaagagtacatgtcacgtatatgttgtagttaattagaattccaatacttctgatgtagttaataaagtctcaaaacgcagttggtcattttatctttatttggtttttattaagcgagtgtacattccagatctattcctgatttataactaatcttagtgtggtctacaggcagatctcttgtga

SEQ ID NO: 24641 - DNA, 2590 bp, DROSOPHILA
gcaggcttccattgaagtgcgagacgccggcacacgaactttgtcgatgctgcagagcagcaaccccaactttcgatccctggacctatctctgggcacgcccacaccaaccacacccacctccagcgaaattccagctgctccagccagtgccaccgcctcgttgagtggctcaacgctgcaatttggaccagaggaaccagaggaaggttcagctgccggaggaagccaatcgctgacgccacttgatgccagggaactcctgacgagacccacacgcgcctacgcctccgtcagccaaccacaaagtccaagacatcggggatcggggtgcgggtccgtttccggatcacgaataatcacacacggcctgaccggacgctccacatcgatatcctcgcagctggagaagaccaagaagctactgaaaatgaccgagggcgaggacaagccactgaccattctgcactacaacgatgtctacaatattgagtctatggcggaaacggaacccgttggaggtgcggccagatttgccacggccatcaagagtttcgcgcatcttaatccgctcgtgctcttcagcggtgatgccttctcgccgagtatgttgagcacctttacccaaggagaacagatgattcctgtgctcaatacggtgggaactcactgtgccgtctttggcaaccacgattttgatcacggcttggatgtgctggtcaaactgatcaaacagacagaattcccctggctcatgtccaatgtggtggacaatgaaaccggtcgtccattgggtggtggcaagatctcgcacttcatactacacaatcagatatccattggcttgattggactggtggagcgagaatggttggagactctgcccaccatcgatccgaatgaggtgacctacattgattacgtggaggcgggaaataagcttgcccgcgagctgagaaacgagggatgtgacctcatcattgcccttacccacatgcgtactcccaacgatattaatctggccgagaaatgcaacggcatcgatattatactcggtggtcacgatcacgtccgcgaggtcaccgaaatcaatggcaaaatgattgtcaaatcaggcacggacttccagcaattctccgtcatcactatcgagcgggatgccgccaatcgtgaacatttcacaacggacgtcaagtgcttcgatgtgacggccaaaattccggaggatccggaactgaaacaggagctctccaaatatgccaagttcatcgagagcaagctttcggatgtcatgggtgtctttagcgtggaattggatggccgtttttcccgcgtacgaacccaggaaacaaatctgggcaactgggtgtgcgacgtggtgcttgccgccgttggcgccgatgtggtcatcctgaatggtggcaccttccgttcggatcgagtgcatccggtgggtgcctttaccatgggcgatctggtgaacgttattcccatgcgtgacccactaatcctgctcgaagtgaagggtaaaatactctggcaagcactggagaacggagtgtctgcctatcccaagctggagggcaggttcccccaggtgtcgggcatcagtttcgccttcgatccgcaggcggagcctggcaaacgtattgatccgcaacttatccaggtgggcgatgagtaccttaacctggagcaatcatacaagttgtgcgtcaagagttatatcttcatgggctgtgatggctacaccatgttcaaggatgcaactgtgctgatggatgatgatgcttgcccggagttgggaataactctgcagaaccatttcaaggccatcaattcgaggaagtgtggacaaaacactaagcaccgccagtcgctggtgaccctttcccggaggcatagtctggtgcagtgcctggatagtatggatctggatggaccatcgcccattcgcaaattgtccgtgggccatcacaacaagtcgatggatttgacacatggaaattctcaaaagatgttacgacgtgcgtccttggatgacctggagcagtccacatgcgatttggcgccacaactggagcaccgtatcgttatgattcaaaacgaagaacatcatcgacagttactgttcaaaaaggagacgcacataatgaattccacaatcaccgaagctgaggacgagtaaagaactaccaaaagtcatttgatttacaatttgcatttaatttattgtattctttatttctttttcgttttttctagttacaagaaaataagacaaattgatttagggacaggttccgatgtggagagaaacatttgagtacggtttaggcaaaagcaaagcgaagatataaccatttagctagttagatagttggcagatctgtgggatcgtgtcctatattattaccgtttattgttaatgctccactgtttttttcggctaagtttcgttgtgaacgtttgtaagacttccccagagatattgatattgatattgtatatgatgcatgtgtagtgagtacgtgtacctaaagcttaccgctagtttaatttacttttaattagataaactgatttacac

SEQ ID NO: 24642 - protein, 713 aa, DROSOPHILA
MLQSSNPNFRSLDLSLGTPTPTTPTSSEIPAAPASATASLSGSTLQFGPEEPEEGSAAGGSQSLTPLDARELLTRPTRAYASVSQPQSPRHRGSGCGSVSGSRIITHGLTGRSTSISSQLEKTKKLLKMTEGEDKPLTILHYNDVYNIESMAETEPVGGAARFATAIKSFAHLNPLVLFSGDAFSPSMLSTFTQGEQMIPVLNTVGTHCAVFGNHDFDHGLDVLVKLIKQTEFPWLMSNVVDNETGRPLGGGKISHFILHNQISIGLIGLVEREWLETLPTIDPNEVTYIDYVEAGNKLARELRNEGCDLIIALTHMRTPNDINLAEKCNGIDIILGGHDHVREVTEINGKMIVKSGTDFQQFSVITIERDAANREHFTTDVKCFDVTAKIPEDPELKQELSKYAKFIESKLSDVMGVFSVELDGRFSRVRTQETNLGNWVCDVVLAAVGADVVILNGGTFRSDRVHPVGAFTMGDLVNVIPMRDPLILLEVKGKILWQALENGVSAYPKLEGRFPQVSGISFAFDPQAEPGKRIDPQLIQVGDEYLNLEQSYKLCVKSYIFMGCDGYTMFKDATVLMDDDACPELGITLQNHFKAINSRKCGQNTKHRQSLVTLSRRHSLVQCLDSMDLDGPSPIRKLSVGHHNKSMDLTHGNSQKMLRRASLDDLEQSTCDLAPQLEHRIVMIQNEEHHRQLLFKKETHIMNSTITEAEDE

SEQ ID NO: 24643 - DNA, 3137 bp, DROSOPHILA
tccgccagctggggaaggatgtgctcgtatatatccatttcacgggtgtagacaccatagtggatgagcacatcgccggctggatcccggtcagcgaatgtggtcttaaccagaaatgtggtggactgtttccctttcgataccttggtcgtgtactccacattgatgcgggtcatcacgctgccgtagtttcctccattggccacggctggctttgtatccaacgtcgccagcttcagtgagctatccttgaagtaggtgcgcaacttatcctgcacatattccgaggtgagccaaactggcgctgggtgaactttgtgggtagatttctcagtcatgatcctatccgtaactcagggctttcgcttctgcgacattgcgaacggagtccgaccacttttatagccaactttagtgtatatatgataagtttagtgcaagtatctcgtggcaactggcttcgtcatggacaaacaacacttgaacaatttcgagtctggtcgaacgctcacgttttttgcaatgcactttttattaagtattcctggtaaccaaaatttcgcaacttatcaccatatacagattcatcgcaacaaatttataattaattcattttgttttacatttcccaaagaagagaaatacaacttaatattttttattgtttgttatcgaatatcgtaaaaagtaagtgaattaatttagtgggttgccttgatagtttttccaagaattcccccgtatcgtcgtctgtagctaattttaatgtcaatatcaacaaaaacaattagaaaactttttaatacggattttgtcccgttttcatgttttctaaacatttacctacaattagcacctgtgaattgtcattcataagtgcatacacaattaataaaagttagtaatagcagggaaagtaatcgaaattattttgtatttattatattttataagcaaatataaaatctataattacgataataatattactattttcgctttacatcacgtctagtaaacccaaatgatcaagaaagggcaaagtgagacgcatctttttcctggtctcctccgcctgaaatgcgtcatccttaaagcgcattcccttctccgaaagggatattatctgatccattgatgcctcttccttgcccgtgtacgtcatcgttggttcaaagatcagtgatgcgaaggcagctgaatgataacataaatgaatataaattccttaaccaggcacgttagtatacccaccatagaaggatctgttcctgaactgctgatggaagacgaataggctcggaacatttccggaatactggactttcttcaaggcagcattcagtttgtaatagtagaactggaccagctctggctgtttcttcagtcgaatatcagcctgcaaggccgttgaaaagaagtagtgtagatcgatggccggcgagttccaagcactgaactgaaagtcgataaagatggcatttatgggatgtcctttgtcgtcgtattggaacataatattggtggtccagagatccccgtgagccagggtcaaaaagtcaccgggaacaatggtcgtcgatcgttctccgtactccattacgttctccaccagtcgatcgatctttgcctggtaacgctgacacagatccggctccagctccagggatcgggacaaagccatcaaaagattcttcatgatgggctcgtagccgcgggtatgctggttaaagaatccacgatcgaaattcttcgcaaagattccaggctggcgctcagccaaggctgctccggcagcatggaaattggccagcttctcgagtaccagatgagtgtgctccagatccagtttcttgagccgatcggccactctgtaattctccagggacatatcctcgaagatgatcgagtcccgtttccgatcaacataaacagtgcctgcaaatagtttccgggaatctgccagctcatttcgcaccacttccgccatctggggcaggatgcgctcatacagatccaattccctgttgtacactccgtagctcaggagaacctgcgccgccggacctgcgtcggcaaatctggtggaatctggtggattgtttatcctttgatttatccgtcgtatactccacatagatgcgagttatcacgcttgagtagttctccccgttgccaagggccagcttgatgtccaggttcaccaggcggagggagtcatttctaaagtaggaacgcagcttctgctccacatagtcgcgagtgagccaagcgggcaccacttgtgcgcttctattgatttcctggtgatcaacactgcggatttttcatcggtggggttccgcttttatacctcgtcggttaggtaagtacacatttattattcaagtcttatctatcattctatctgacattcctgttatctttcaattcaaccatttgaattagctattagaaatcgtcattgagcttattacatacatatccatttgatgccagcgaactactagaaatttctaaacaattaattgctaaaaataacgaaactatttttaagctaaatttctaggtagatagcagtgataatttgattaattgacttatactgataaggagcatttatttattgtgtggagcattttcttacatttcgtctagtaagcccagttgatcaaggaacggcagagtcaggtgcaacttttttaggttctcctccgtctgatacactgcatccctcagtcgcacgcccttctcatcgctggtcatgaactgctctatggacggctcctccttgccattgtagaccatagtgggctcaaaaatcaacgacgcaaacacagctgagtaaaataaagaaattaaaaattgtataacattttatatacttcgcaaacttaccataaaaacctttggtccgaaactgctgttggaactcaaataaactcggaaccttacccgaatatttcaccctttctagagccaccactagtttatagaagtagaactggaccagctcggtctgacgctccagacgaaggttttcgtggatcgaggttgagaaaaagtattgcagatcgatggccggagaattccaaacgctgaactggaaatcaatgaagatggcattaactggatga

SEQ ID NO: 24644 - DNA, 1080 bp, DROSOPHILA
atgtggagtatacgacggataaatcaaaggataaacaatccaccagattccaccagatttgccgacgcaggtccggcggcgcaggttctcctgagctacggagtgtacaacagggaattggatctgtatgagcgcatcctgccccagatggcggaagtggtgcgaaatgagctggcagattcccggaaactatttgcaggcactgtttatgttgatcggaaacgggactcgatcatcttcgaggatatgtccctggagaattacagagtggccgatcggctcaagaaactggatctggagcacactcatctggtactcgagaagctggccaatttccatgctgccggagcagccttggctgagcgccagcctggaatctttgcgaagaatttcgatcgtggattctttaaccagcatacccgcggctacgagcccatcatgaagaatcttttgatggctttgtcccgatccctggagctggagccggatctgtgtcagcgttaccaggcaaagatcgatcgactggtggagaacgtaatggagtacggagaacgatcgacgaccattgttcccggtgactttttgaccctggctcacggggatctctggaccaccaatattatgttccaatacgacgacaaaggacatcccataaatgccatctttatcgactttcagttcagtgcttggaactcgccggccatcgatctacactacttcttttcaacggccttgcaggctgatattcgactgaagaaacagccagagctggtccagttctactattacaaactgaatgctgccttgaagaaagtccagtattccggaaatgttccgagcctattcgtcttccatcagcagttcaggaacagatccttctatgctgccttcgcatcactgatctttgaaccaacgatgacgtacacgggcaaggaagaggcatcaatggatcagataatatccctttcggagaagggaatgcgctttaaggatgacgcatttcaggcggaggagaccaggaaaaagatgcgtctcactttgccctttcttgatcatttgggtttactagacgtgatgtaa

SEQ ID NO: 24645 - protein, 359 aa, DROSOPHILA
MWSIRRINQRINNPPDSTRFADAGPAAQVLLSYGVYNRELDLYERILPQMAEVVRNELADSRKLFAGTVYVDRKRDSIIFEDMSLENYRVADRLKKLDLEHTHLVLEKLANFHAAGAALAERQPGIFAKNFDRGFFNQHTRGYEPIMKNLLMALSRSLELEPDLCQRYQAKIDRLVENVMEYGERSTTIVPGDFLTLAHGDLWTTNIMFQYDDKGHPINAIFIDFQFSAWNSPAIDLHYFFSTALQADIRLKKQPELVQFYYYKLNAALKKVQYSGNVPSLFVFHQQFRNRSFYAAFASLIFEPTMTYTGKEEASMDQIISLSEKGMRFKDDAFQAEETRKKMRLTLPFLDHLGLLDVM

SEQ ID NO: 24646 - DNA, 5749 bp, DROSOPHILA
ggtttaaaaattagcgctctatttttgattacgcgtaaactcatctagacgcttctcattctcccgaacgaagctcgatttgaaggctttgcaggttttctctatgctgcctttaacgacggttccaagaatttccagaaattgtgatacctgcaagaattatacacaagtttaggatgccagctggattcgggagtcatggggaacatacggttaaattcctttcgggacacgatagcttggcgaactcgcattggggtgcatgtttcacgtgctccttccacggatcatcttcgggctcccagccatccagggtctttccgcacacaaaacaagtggcagtgtcgttttcccgcttggtgcccgtccaatagaatcccgcctcggccatctgtggtgcatggaatatagatgcagttaatatagatggtcatttgggtattcaaaaaatctcagcgacttgcttaccttcgaaatgctgcaggatgcggtctccggaaagggccaactcttgtagctctccacgcgatgctgttccaggaggttcagcttgcgaaagacctccagcttttcaccgcccaagctggctgcaacttcgtttaccactggcgattccatatccttttaataaacagttttaaagcgaaatacttattttgggttttttatcgcaaacagcgcgtcgttgttgctgtgccttcaaaaacagggttgccatataaaaccaaaataatcgatagtttgtaagcccggttattatcgatatccgagtaagaatttaaaaatataatagaatgttttatgccactcatagagacttctacagtacggataaaactcttaaaatgttcctttgctccattaaaacggttacttttaaacaatgtttaatgtaacgtgagcgccaggctttgaatgcgcaggtgtggcagcactgtcccactgttatggccaacagtcgtctgttacagcagctgtttcagttattgtcataccccagttgtgtacacactgttttgacgttaagatttttgctgactttttatttataaacagaaacacggaaaaacatggtgtaaaccgtgatccaaacaccaacacacaccgcccacgtttttgttgttttgcactttgcaattgcgaacagcgagtatcgcctccggtactccatagattaggcacccaagttttacgctgcatagaaattgattcgaagagaagaaggaaaggcaaccaagcggagatacagagagagaaaaagaaagtgttcggacggccttgggctgaaaaacgggagcagcgataagcaacccaattaagtagcccaggctggtgggttcagtaggtcactgccgcaccgttttcgcaagggggcagtggcccaaggacatccgggaggaggccatacaccatccaccacccacccatctacacccactgcaaaggatatagagccagccacccatcaattggcaatgagacggtgcgctggcaatgcgctcacttgaaggcagccgtcgtcgacaggtcgagcagctgcatctggttctggaagccaaggatcaggatcaggagctcaatacccgacaagagcaggagcagtcagtcgcacggccatcgatggccaacgaacgcaagcagagcagtcccaaggtggagctaacaaagctcagtcacgacctgatcgaggaatgtaaacgcagccaggaggactcgctgctgtcgcgccacctgcgccacgaactagaaaagtatgtccctgtaattggcttccacgtgtagagcgtttcgtaatgaacaagtcctttaaatggttccgtggctccattccataccattcttcatttcaatgaccaataactaggttttcctaaatcaataataatagtgtctgcagtgaaaccagcatatatttgacttccatcttagggatacagtactttaattcctgctaatttgaaagcaacaacatttggctgaaacttataataaataatttacaatgccaccatctgtctttgcgtccctagacgaaggtcctttgcacgaactattccataagtagaaacaattcatttcttaaactttttctacaaaagattttggtcagtgttgttatgattacctctaaacaccaatattaaacagacggacaaatggaactaatcgaatcgcctgactttactgataaataaagtattaaaattatagggaagccacctttttcaaaacaacggcacctcataacttaatctttcgttatagacttacgaatactgcgtattatacatgttataatcgttctcgaaatttgattacctcattaagcagattttataatagataaatgactgtcctgttgatttgatatatatatatatatatatatatatagcttcattggtttaaggcttttgtaacatccaaatattttctgcaatcacaaatacctgattaaattcaaatgtgtgaattctcggctgaaagctcgatcttatcaacaaatggtcacaaaatcattgcccctgcacgtgctgatcaagagcttccgattctctaccctaccttgcacagaaagaaattccgaagaatattcgaagaataataattattttaaagtttatttacatcgattcgttatctcctttcaggctaccccgcgattctcgtcgcgagttggtgcgaaagcagcgaaatggctgcgcgcccctctttatcgcctgtaaacgaggtgccgtggacatcgctgagtatctgatcaccatttgcgaggcgaacatcgaacagaggggccacttcgaggtgccggaggacaatagctttcactatgtgtcgccactatgggcggccgtcgtttcggggaagttgtccatggtcaagtacctggtacgtatcggttgcgacatcaatgccacctccgattcgggatcgacgcccgtgcgaagtgcttgctacatgacccacgttgatatcggtgagacgtttacaatattaaagctaatctatcataatcaatatgcattgcctaaccttgcagtcaagttcctggttgaaaacggagcagacatcaagcgacccaacatcaatggcggcacctgcctgattaactcggtgcagtcggtgcagttgtgcttgtatctagtgcgcaagggggcagacattaatgctagggacattcaggacaagacggcgctccactacgcaatccaggagcaccggctggatacgacgaaactgttgattgagcaaggcgcagacccatatgccaggagtcggtacggtgacgatgcccttcgaactgcatgccttaagggagcacatcacatcttcgacttcttgaaaaagcagctgcactacacgcctgctaggctcgcagaagcccacgagctgatgggatccacgttcctcgatgagcacaacgagtcgagggtgtgcatcctgcactggcgcatggcgcaccacatccgggcagcttattcaccgtatatagagaaaaagccgcaggttcctttgcgcactgcttacgagaatgcagtggagtttagtacgctggaggagctggataacattgccaccgacatggatgcaatgcggacgcagagcctacttatttgcgagcgtgttctgggactgacccataaggatatgctcttccgcttaactttcaggtgattacaaatcaattattttccataatacacccaacttcaaatctctcaattcaggggtgcttcgtatgcggactcactccagctgcaacgctgcattgatctgtggcgttttctgctcgaagtgcgcgtatccaactggtctatcctgcattttgaaacttgttttgcggcacaggcgctggtgcgtttaatgttggacttgcatgtccagaactcaagtcatataagaagcgatgccagagcaaggtttgtccatcaggataaagtgctgcccaggttcgaggatgtgcttggtgtatttcgaacactgtcggaaagcgccattgtcgtgaagcatctgctgctcttgaggcctgttttcaggagacagcaggagaattacgaccgggtgatgaggtgcttggctcaccttatctatttgctgatcaataccgtccacacggaggcgcagaacaaactcatctgccaggcggtccacgaagcggtggtggtgggaaacttgcgaagtgccagcaccgccgacaccatgctccatctctgcgcctctcggctaaatgtaattaagagcggctacatcactgatgacaactttgccgatgtgcgtagatgctaccaattgccattcgacattcttattgaacatcctctttattctttcgcagaagactgtgttccccaatgcggatgtcatcaaactgctcatccagtgcggcgttgatgtcaacacaaagaacgaagccaaatccactcctctgcatgtggcctgccagccatacaactatgacaatgaggtaagggaggcattcaaattcttgaacaatgcaattatttaatgctcaacttttgcccgcagattgttcaccttttgctcaagtgcggaggtgacatcgatcagccgaatcgcgctgacaagcggccctacgacttaatagcctccaatcccaccagcaccattccactgctcaactttgtaaccctgcagtgtttggcggccacggcgataagcaaacaccggataccctaccacaatcagctgcacaggcagctcgagaagttcgtgcgaaaccacgaaccgtaaggagatagtttagctggaaaaaaaagctgaatcgaagccggatatgtgtttaatgtctatgtcttgtctaaattaaggcgtttcaacctaggatgcttacctccttatggaattttcaaaatttcaccagtgtcggtaactttgtttcgctctatatattaaatacagatatctatatacctattgttaaatcggctctacgtagtttaatactccaattgagttcagaagatatagatgcaaaatcagaacaaatattgtaacagaacaagcaaaaagtgtaaacgatgaacgtgatattaaaaactatatatatatatatatagagtgtatcggaaatattaatattttagagaacttacaaagcggatggcggattttagtatttaacaaactctgctctgctgtttgattattagatcctagagagagcaactcattgtaacgccaatacagtttacacattatctaaatacacaaaattacgcctgaaacataaactaaacatactataaacatatacatatatatatatacacgcaactagaataactaattgaacacttgttgaaccactaatatcgaattcgatagctgaatgtgaattgcaaattgtgagagggccaaagtcaccgaatctgttcgacagcatttgtcccttaacttcttatgaatgccgcgctttctagacctatgtactactatgtgtgggtcattatacttaacattattatcttggcctacagcaagtattttaacaatcgtttctgtgagaccgatggcttgagttcgtttagcacgcgtgttgcataagccggatcgaataattatctaactaattttgagtaaaacgccagtctaatcaataaattgaatagttaacagtttactgtcaataaattgattgatatcatttaattgggtgtctaaaggatccaaaaatacctatcaaaatttcatatttatgttgcttatacttgaaacgaataagaaactatcc

SEQ ID NO: 24647 - DNA, 2666 bp, DROSOPHILA
ttgtgtacacactgttttgacgttaagatttttgctgactttttatttataaacagaaacacggaaaaacatggtgtaaaccgtgatccaaacaccaacacacaccgcccacgtttttgttgttttgcactttgcaattgcgaacagcgagtatcgcctccggtactccatagattaggcacccaagttttacgctgcatagaaattgattcgaagagaagaaggaaaggcaaccaagcggagatacagagagagaaaaagaaagtgttcggacggccttgggctgaaaaacgggagcagcgataagcaacccaattaagtagcccaggctggtgggttcagtaggtcactgccgcaccgttttcgcaagggggcagtggcccaaggacatccgggaggaggccatacaccatccaccacccacccatctacacccactgcaaaggatatagagccagccacccatcaattggcaatgagacggtgcgctggcaatgcgctcacttgaaggcagccgtcgtcgacaggtcgagcagctgcatctggttctggaagccaaggatcaggatcaggagctcaatacccgacaagagcaggagcagtcagtcgcacggccatcgatggccaacgaacgcaagcagagcagtcccaaggtggagctaacaaagctcagtcacgacctgatcgaggaatgtaaacgcagccaggaggactcgctgctgtcgcgccacctgcgccacgaactagaaaagctaccccgcgattctcgtcgcgagttggtgcgaaagcagcgaaatggctgcgcgcccctctttatcgcctgtaaacgaggtgccgtggacatcgctgagtatctgatcaccatttgcgaggcgaacatcgaacagaggggccacttcgaggtgccggaggacaatagctttcactatgtgtcgccactatgggcggccgtcgtttcggggaagttgtccatggtcaagtacctggtacgtatcggttgcgacatcaatgccacctccgattcgggatcgacgcccgtgcgaagtgcttgctacatgacccacgttgatatcggtgagacgtttacaatattaaagctaatctatcataatcaatatgcattgcctaaccttgcagtcaagttcctggttgaaaacggagcagacatcaagcgacccaacatcaatggcggcacctgcctgattaactcggtgcagtcggtgcagttgtgcttgtatctagtgcgcaagggggcagacattaatgctagggacattcaggacaagacggcgctccactacgcaatccaggagcaccggctggatacgacgaaactgttgattgagcaaggcgcagacccatatgccaggagtcggtacggtgacgatgcccttcgaactgcatgccttaagggagcacatcacatcttcgacttcttgaaaaagcagctgcactacacgcctgctaggctcgcagaagcccacgagctgatgggatccacgttcctcgatgagcacaacgagtcgagggtgtgcatcctgcactggcgcatggcgcaccacatccgggcagcttattcaccgtatatagagaaaaagccgcaggttcctttgcgcactgcttacgagaatgcagtggagtttagtacgctggaggagctggataacattgccaccgacatggatgcaatgcggacgcagagcctacttatttgcgagcgtgttctgggactgacccataaggatatgctcttccgcttaactttcaggggtgcttcgtatgcggactcactccagctgcaacgctgcattgatctgtggcgttttctgctcgaagtgcgcgtatccaactggtctatcctgcattttgaaacttgttttgcggcacaggcgctggtgcgtttaatgttggacttgcatgtccagaactcaagtcatataagaagcgatgccagagcaaggtttgtccatcaggataaagtgctgcccaggttcgaggatgtgcttggtgtatttcgaacactgtcggaaagcgccattgtcgtgaagcatctgctgctcttgaggcctgttttcaggagacagcaggagaattacgaccgggtgatgaggtgcttggctcaccttatctatttgctgatcaataccgtccacacggaggcgcagaacaaactcatctgccaggcggtccacgaagcggtggtggtgggaaacttgcgaagtgccagcaccgccgacaccatgctccatctctgcgcctctcggctaaatgtaattaagagcggctacatcactgatgacaactttgccgataagactgtgttccccaatgcggatgtcatcaaactgctcatccagtgcggcgttgatgtcaacacaaagaacgaagccaaatccactcctctgcatgtggcctgccagccatacaactatgacaatgagattgttcaccttttgctcaagtgcggaggtgacatcgatcagccgaatcgcgctgacaagcggccctacgacttaatagcctccaatcccaccagcaccattccactgctcaactttgtaaccctgcagtgtttggcggccacggcgataagcaaacaccggataccctaccacaatcagctgcacaggcagctcgagaagttcgtgcgaaaccacgaaccgtaa

SEQ ID NO: 24648 - protein, 723 aa, DROSOPHILA
MRSLEGSRRRQVEQLHLVLEAKDQDQELNTRQEQEQSVARPSMANERKQSSPKVELTKLSHDLIEECKRSQEDSLLSRHLRHELEKLPRDSRRELVRKQRNGCAPLFIACKRGAVDIAEYLITICEANIEQRGHFEVPEDNSFHYVSPLWAAVVSGKLSMVKYLVRIGCDINATSDSGSTPVRSACYMTHVDIGETFTILKLIYHNQYALPNLAVKFLVENGADIKRPNINGGTCLINSVQSVQLCLYLVRKGADINARDIQDKTALHYAIQEHRLDTTKLLIEQGADPYARSRYGDDALRTACLKGAHHIFDFLKKQLHYTPARLAEAHELMGSTFLDEHNESRVCILHWRMAHHIRAAYSPYIEKKPQVPLRTAYENAVEFSTLEELDNIATDMDAMRTQSLLICERVLGLTHKDMLFRLTFRGASYADSLQLQRCIDLWRFLLEVRVSNWSILHFETCFAAQALVRLMLDLHVQNSSHIRSDARARFVHQDKVLPRFEDVLGVFRTLSESAIVVKHLLLLRPVFRRQQENYDRVMRCLAHLIYLLINTVHTEAQNKLICQAVHEAVVVGNLRSASTADTMLHLCASRLNVIKSGYITDDNFADKTVFPNADVIKLLIQCGVDVNTKNEAKSTPLHVACQPYNYDNEIVHLLLKCGGDIDQPNRADKRPYDLIASNPTSTIPLLNFVTLQCLAATAISKHRIPYHNQLHRQLEKFVRNHEP

SEQ ID NO: 24649 - DNA, 6369 bp, DROSOPHILA
acggctagacaatttacaatgtatgtacacaataagactgaattgtaatttatgaaaaagtcttagcgattccaggcagggccgtcacatgagcgcggttttaatttaagatcgtggagttcgattgcccgttttctcatgatttttcagtaggtacataaagaaaagtaattcgtcagaagactgaatcaattggtcttagttttgcgtaccctgagcgtacgattccgatccgagtttatggtgattttaagacaacaaagtctgtaaaccaatttggatttttataacctgtattttgcctcgatagaatcgagtcgcccatagatccaatattcaaatgattaacgcgaatcaattaacgcccatttggtgttgatgttcacaaatactacatgtctacattcataattttattgttagttaatttggacgataatctgctgacatggaataagcaacattactgaacattcaaattaacatttatactgtcttactacccagtttccacactatacatgcatatatagatatgtgcaagtgtctacacacgtacaagcgttttattaaaatgtaatcaaacaatgcctccgggggttttcgcaaatcttggactgacgaaattcccaagaaaatgatgtcgcttgcaggccttgtctatgttttatcagaggagttcccttaagcaaaatagcgcctactgtatctaaattggggtcttcgttacatagactttacttaatcaaacaccaataaagagtaggaaatcgtataaaatcttagggcctaacaaccgaatatgaccttgtctcactcattatcagaacatttaaaggtcttctgtagtactactgtattgccatcgtaagccttaacatgtgcgcctttagtttaattgcaattaaactaagataaggatatcaggatttaagtgctttaaagtagttatactgtaggtttctgtgttactactctgaccttttaatctttcaggtggatgcgagacctgttcaagcgaggcctccagggaccgctgacggacgaggagctgtatcaacatagaaagaccctggatagtgaaagagtgacgaacaaatttgcggaactgtgggaggatgagctaaaacgaagtaatcccagtgtggtgaggatgatccttcgagcatatggcaagattttcgtgcccatggggctggcgttctccataagcgaaacgatttgcaagtaggtagaaacggatgctaatttaactcccgtgctaatcccatttactttttgttcgttcagatctctcatgccgctattcctgggcggtctggtcggttactttgccacaaatcagacggatatcagtgaaaacacagcatatttgtatgccatgggaattgtgatttgcatgctggtgcctgtgataacgttccaccctttcatcttctacatatttcaagtgggcaccaagctgcggttggccctttcgggtctcatctaccgcaaggtcctgcaggtctcgaagagcagcagtaacgatggtctgcgaggaagagcaatcaatattttgtccaacgaccttgggcgcttcgacgtggcgctgtgtttccttcatgatacatggaaagggccgatggagtcgatactgattggctttctcatgtaccgtgaaatcggtatatcggctgtgatcggtgtgtcctttatgctcagctttatcccactgcaagcgtgggcagccaagaaagccgcctactatcgccaaatgacggcagagcgaacggatatgcgtgtcaagctgatgaacgagatcatccagggcattcaggtgatcaagatgtatgcgtgggagaaaagctttgcccgggtcatcgccgaagttcgcctcaaggaggtgaaggccattcgaggcactgcctacatccatgccgctcttggttgcacctccatgatatcgccgctatctgtgttcctggccctctgctcctacgtttaccttggtgatcccttgaccgcccaaaaggtttacacagtttcatcctatttcaacatgcttaacgattctatggtaaccttttggcctatgtctatcacgtttattgccgaggccttggtctcggcgaaacgttgcaaagattttctactagacggagacaaagcggaggtgcccataaacttggaagcaaatcaacaaacaggcaaaaacaagcgcaaaatcagcaaaaaggacaaacaaaagaacgtagagttaaacggttccttgctgtccaatggccaagtccaccacaatcgtctaagggattatgatccggaggcaacgaaaaaatgtgtggtgcttaaaaatgtatctgcttcctgggacaccagtgatggtcatgccaactgtgccatcgaggactttagcacggacataaaggaccaaactctggctgctgtcgttggacctgtgggtgccggcaagtccagctttttgaacgtcctgcttggcgaagtcggcatcgataagggtgaagccatggtccacggcaagatctcgtatgcctcacaggaaagctgggtcttcgagggaactattcgagacaacattgtttttgttgaggattacaacgagagacggtacaagaaggtggtgaaggtgtgtggcttggagcgggatatggagttgttgcctcgcggagatttgacagtggttggagagcgaggagtgagtctcagtggtgggcaaaaggcgcgagtgagtttagctcgagcagtctaccgcaaggcggacatatatcttctggatgaccctctgtctgctgtggatacccacgttggcaagcacatcttcgatcgctgtatacgcgactttctgtccaacaagattagaattctagtcacccatcaggtgcaatatctgttcgatgtggagcacctgctgttgatggggtccggaaagattatggcccagggcagctaccaggaactccagcgctcccgccagtttcaattcctagagcagacgcagcacgacgagagcggcatcgatactcacagtgtcagcagctatttgtctcgtagcgattccgagaagagcatggagcatcagcacaaccagctgcttcgaccggacgagcatgtagaggacgtcaaccaggagcagcaaactgtgggttccatcaaaatgcacgtctacgcctcatacatcaaagccttggatagtacctttttgttgggcattgttatttctttgttcgtctgcgccaggattatgttaaccggagtggattacttcttgtctagatggtaaactatttaaaaattcattttggatttctattactaattaataaacgcatattccagggtcatttgggaagagcaaatagctgttaatcgcactacaacgctactaaacgaaaccgacacgacgattgccaatgatacgctgccgattaatgccacggatccatatatagcgcctttattagctagcgatatccaggcaggcattcgtcaggagcttgtactcttctatgccaccatactgggcgccacactgatagtctacctgattcgcacctttggcttcttcaaaatgtgcctgcgcatctctctgcacctgcacgacaggctcttccggggaatcactcgggccagcatgtacttcttcaatacgaactcctcaggacgaattctgaatcgcttctccaaggatataaggacagtggatacggatctgccgcacacactgctggactgcctcgccttcattatcgatgtttctggcgttgtcattattgtggcgattgcaaactattggctcctgattccagctgccatcattggtgttattctgggcatgatacgctacctctacgtaaacaccagtcgcagtgttaagcgcttggagtctatatgtaagtatgaattgtgtaattgcggctcagtacaacagtaaggttttattagaattggcaaatagtcatatttttgttatatttccaatttttgatgagttcaaaaacctaaagcccttttttgcatttcttttttttccagctcgcagtcctgttttctcgctgactaaccaaaccttccagggtctcaccaccatacgcgctttgcaggcccaaagcgccttggagcaggagttccatgagtaccagaacaccaacacctccgcctggtttctcttcctttcctgcactcgtgcctttgccttgtggtcagacgtgctgtgtatcgtctatatgacggcggtaacattcagctttctgctgcttaaggacgagttcgacagcggcgacgtgggattggccattttgcactccaccacgatgactggaatgtgccagtggggcatgcggcagacagcggagctggaaaaccagatgaccagtgtagagcgagtgctcgagtatacggaacagccgtcggaggcacttctggagacgccggagaaattcaagccaaagagcgagtggcccagcaagggacgcatcgagttcataaacttcaagttgcgttactcacccaaagaagcacccgtgttaaaggatcttaacttcactatagaaccgcgcgaaaaaataggaattgtggggcgcactggcgccggtaaatcgtccatcatccagtccatcttccgtttggcctgcaacgagggtatgatccgcattgatgacgtggacattgagcatataggcttgcacgatctgcgcagtcaggtttcaatcataccccaagatccggttttgttttccggcactttgcgctacaacttggatcccatggacgagcgttcggacgaggagatgtggaaggctctgggcgatgtggagttgcgttcctacgtgtcaactttaattggtggactgaactgccgtatgtacgacgggggttccaactttagcgtgggccagaggcagttagtgtgcctggcgagagccatcctaaggcacaataaaatactgattatggacgaggctacagccaacgttgatccagagtaagtaacggagataaagaagtttatttgtatatagtatataaatttttataacccttgcagaaccgacaagcttatccaacagaccattcgctccaagtttgcgcactgcactgtattgactatagcccatcgattacacaccgtgatggacagtgaccgtgtgctagtcatggatgccggcgaggtacgcgagctggggcatccgtacgagctgctgcagcgcactggaggataccttcgccagctggtggacaacacgggcgcagccacctcctttgccctgcaacaggctgcggagcaaagttacagcaagcagatcctgggagatgatacggccgccgaggacttgaacatcacccttgcgatggaggagaagacccagtgaccgagacgcacactcatctacttgtagatttgcttaaggtttagatcataagaactgaaagtattatgtacatagcaaagttgtacttaaagctaacgaaatacctattgccttgtacttacggaatatttgtaagcttgattatcgccacgaatttatgtatgtatatgttccatagcgtactgagtaatgtatatgtatcacctatgttttgtacgtcatgtgttcaattggcaaacctatcgaaagcaattcgcaaacgccgtgcacaaatcagagcaagttcaattaaacgaagacaaatagtgatttaggtacttttttaaaatatgtagctaatgtaggattaccacatcgtacttatagatacgtacaatctcaataaagtgcctgagaattattacttacaaatgaaacaaaagagtgaagtgttttaatcaccttctcggcggcactcgcctttcatcttcaacatgcgattatcggcgcattaacccattgatgagcacttttgtttgggaaatacagataatatattttttaacagttcaatatccttcttctaatatacataaagaataatccattttcagtatgtgaattcatcgactggttggaattgaactaaactcttggccatgcctgtcaagatcagagtgaatcatgcgtggatcgataaggatgaacccgtccgtagctccaattaaaattgtcaattgctgaaaagtgtaatcaaagtaagtctacacggtagctgtgattacgataagataccggctagggtccaccgttgcccgtagcaccgcaccggagcactgcccaccgggaccgggatatcccgaccgcggccaaaaactctcgcaaacaacagcgaaagccacttaggcaaaaatcgtggccagagttgctgcatcgtctgcttctgctccgatgtcgactgatgggtggctgtcagtgggcattaagataaaactggtctgcccctggccgatagggcgga

SEQ ID NO: 24650 - DNA, 4041 bp, DROSOPHILA
atgcgagacctgttcaagcgaggcctccagggaccgctgacggacgaggagctgtatcaacatagaaagaccctggatagtgaaagagtgacgaacaaatttgcggaactgtgggaggatgagctaaaacgaagtaatcccagtgtggtgaggatgatccttcgagcatatggcaagattttcgtgcccatggggctggcgttctccataagcgaaacgatttgcaaatctctcatgccgctattcctgggcggtctggtcggttactttgccacaaatcagacggatatcagtgaaaacacagcatatttgtatgccatgggaattgtgatttgcatgctggtgcctgtgataacgttccaccctttcatcttctacatatttcaagtgggcaccaagctgcggttggccctttcgggtctcatctaccgcaaggtcctgcaggtctcgaagagcagcagtaacgatggtctgcgaggaagagcaatcaatattttgtccaacgaccttgggcgcttcgacgtggcgctgtgtttccttcatgatacatggaaagggccgatggagtcgatactgattggctttctcatgtaccgtgaaatcggtatatcggctgtgatcggtgtgtcctttatgctcagctttatcccactgcaagcgtgggcagccaagaaagccgcctactatcgccaaatgacggcagagcgaacggatatgcgtgtcaagctgatgaacgagatcatccagggcattcaggtgatcaagatgtatgcgtgggagaaaagctttgcccgggtcatcgccgaagttcgcctcaaggaggtgaaggccattcgaggcactgcctacatccatgccgctcttggttgcacctccatgatatcgccgctatctgtgttcctggccctctgctcctacgtttaccttggtgatcccttgaccgcccaaaaggtttacacagtttcatcctatttcaacatgcttaacgattctatggtaaccttttggcctatgtctatcacgtttattgccgaggccttggtctcggcgaaacgttgcaaagattttctactagacggagacaaagcggaggtgcccataaacttggaagcaaatcaacaaacaggcaaaaacaagcgcaaaatcagcaaaaaggacaaacaaaagaacgtagagttaaacggttccttgctgtccaatggccaagtccaccacaatcgtctaagggattatgatccggaggcaacgaaaaaatgtgtggtgcttaaaaatgtatctgcttcctgggacaccagtgatggtcatgccaactgtgccatcgaggactttagcacggacataaaggaccaaactctggctgctgtcgttggacctgtgggtgccggcaagtccagctttttgaacgtcctgcttggcgaagtcggcatcgataagggtgaagccatggtccacggcaagatctcgtatgcctcacaggaaagctgggtcttcgagggaactattcgagacaacattgtttttgttgaggattacaacgagagacggtacaagaaggtggtgaaggtgtgtggcttggagcgggatatggagttgttgcctcgcggagatttgacagtggttggagagcgaggagtgagtctcagtggtgggcaaaaggcgcgagtgagtttagctcgagcagtctaccgcaaggcggacatatatcttctggatgaccctctgtctgctgtggatacccacgttggcaagcacatcttcgatcgctgtatacgcgactttctgtccaacaagattagaattctagtcacccatcaggtgcaatatctgttcgatgtggagcacctgctgttgatggggtccggaaagattatggcccagggcagctaccaggaactccagcgctcccgccagtttcaattcctagagcagacgcagcacgacgagagcggcatcgatactcacagtgtcagcagctatttgtctcgtagcgattccgagaagagcatggagcatcagcacaaccagctgcttcgaccggacgagcatgtagaggacgtcaaccaggagcagcaaactgtgggttccatcaaaatgcacgtctacgcctcatacatcaaagccttggatagtacctttttgttgggcattgttatttctttgttcgtctgcgccaggattatgttaaccggagtggattacttcttgtctagatgggtcatttgggaagagcaaatagctgttaatcgcactacaacgctactaaacgaaaccgacacgacgattgccaatgatacgctgccgattaatgccacggatccatatatagcgcctttattagctagcgatatccaggcaggcattcgtcaggagcttgtactcttctatgccaccatactgggcgccacactgatagtctacctgattcgcacctttggcttcttcaaaatgtgcctgcgcatctctctgcacctgcacgacaggctcttccggggaatcactcgggccagcatgtacttcttcaatacgaactcctcaggacgaattctgaatcgcttctccaaggatataaggacagtggatacggatctgccgcacacactgctggactgcctcgccttcattatcgatgtttctggcgttgtcattattgtggcgattgcaaactattggctcctgattccagctgccatcattggtgttattctgggcatgatacgctacctctacgtaaacaccagtcgcagtgttaagcgcttggagtctatatctcgcagtcctgttttctcgctgactaaccaaaccttccagggtctcaccaccatacgcgctttgcaggcccaaagcgccttggagcaggagttccatgagtaccagaacaccaacacctccgcctggtttctcttcctttcctgcactcgtgcctttgccttgtggtcagacgtgctgtgtatcgtctatatgacggcggtaacattcagctttctgctgcttaaggacgagttcgacagcggcgacgtgggattggccattttgcactccaccacgatgactggaatgtgccagtggggcatgcggcagacagcggagctggaaaaccagatgaccagtgtagagcgagtgctcgagtatacggaacagccgtcggaggcacttctggagacgccggagaaattcaagccaaagagcgagtggcccagcaagggacgcatcgagttcataaacttcaagttgcgttactcacccaaagaagcacccgtgttaaaggatcttaacttcactatagaaccgcgcgaaaaaataggaattgtggggcgcactggcgccggtaaatcgtccatcatccagtccatcttccgtttggcctgcaacgagggtatgatccgcattgatgacgtggacattgagcatataggcttgcacgatctgcgcagtcaggtttcaatcataccccaagatccggttttgttttccggcactttgcgctacaacttggatcccatggacgagcgttcggacgaggagatgtggaaggctctgggcgatgtggagttgcgttcctacgtgtcaactttaattggtggactgaactgccgtatgtacgacgggggttccaactttagcgtgggccagaggcagttagtgtgcctggcgagagccatcctaaggcacaataaaatactgattatggacgaggctacagccaacgttgatccagaaaccgacaagcttatccaacagaccattcgctccaagtttgcgcactgcactgtattgactatagcccatcgattacacaccgtgatggacagtgaccgtgtgctagtcatggatgccggcgaggtacgcgagctggggcatccgtacgagctgctgcagcgcactggaggataccttcgccagctggtggacaacacgggcgcagccacctcctttgccctgcaacaggctgcggagcaaagttacagcaagcagatcctgggagatgatacggccgccgaggacttgaacatcacccttgcgatggaggagaagacccagtga

SEQ ID NO: 24651 - protein, 1346 aa, DROSOPHILA
MRDLFKRGLQGPLTDEELYQHRKTLDSERVTNKFAELWEDELKRSNPSVVRMILRAYGKIFVPMGLAFSISETICKSLMPLFLGGLVGYFATNQTDISENTAYLYAMGIVICMLVPVITFHPFIFYIFQVGTKLRLALSGLIYRKVLQVSKSSSNDGLRGRAINILSNDLGRFDVALCFLHDTWKGPMESILIGFLMYREIGISAVIGVSFMLSFIPLQAWAAKKAAYYRQMTAERTDMRVKLMNEIIQGIQVIKMYAWEKSFARVIAEVRLKEVKAIRGTAYIHAALGCTSMISPLSVFLALCSYVYLGDPLTAQKVYTVSSYFNMLNDSMVTFWPMSITFIAEALVSAKRCKDFLLDGDKAEVPINLEANQQTGKNKRKISKKDKQKNVELNGSLLSNGQVHHNRLRDYDPEATKKCVVLKNVSASWDTSDGHANCAIEDFSTDIKDQTLAAVVGPVGAGKSSFLNVLLGEVGIDKGEAMVHGKISYASQESWVFEGTIRDNIVFVEDYNERRYKKVVKVCGLERDMELLPRGDLTVVGERGVSLSGGQKARVSLARAVYRKADIYLLDDPLSAVDTHVGKHIFDRCIRDFLSNKIRILVTHQVQYLFDVEHLLLMGSGKIMAQGSYQELQRSRQFQFLEQTQHDESGIDTHSVSSYLSRSDSEKSMEHQHNQLLRPDEHVEDVNQEQQTVGSIKMHVYASYIKALDSTFLLGIVISLFVCARIMLTGVDYFLSRWVIWEEQIAVNRTTTLLNETDTTIANDTLPINATDPYIAPLLASDIQAGIRQELVLFYATILGATLIVYLIRTFGFFKMCLRISLHLHDRLFRGITRASMYFFNTNSSGRILNRFSKDIRTVDTDLPHTLLDCLAFIIDVSGVVIIVAIANYWLLIPAAIIGVILGMIRYLYVNTSRSVKRLESISRSPVFSLTNQTFQGLTTIRALQAQSALEQEFHEYQNTNTSAWFLFLSCTRAFALWSDVLCIVYMTAVTFSFLLLKDEFDSGDVGLAILHSTTMTGMCQWGMRQTAELENQMTSVERVLEYTEQPSEALLETPEKFKPKSEWPSKGRIEFINFKLRYSPKEAPVLKDLNFTIEPREKIGIVGRTGAGKSSIIQSIFRLACNEGMIRIDDVDIEHIGLHDLRSQVSIIPQDPVLFSGTLRYNLDPMDERSDEEMWKALGDVELRSYVSTLIGGLNCRMYDGGSNFSVGQRQLVCLARAILRHNKILIMDEATANVDPETDKLIQQTIRSKFAHCTVLTIAHRLHTVMDSDRVLVMDAGEVRELGHPYELLQRTGGYLRQLVDNTGAATSFALQQAAEQSYSKQILGDDTAAEDLNITLAMEEKTQ

SEQ ID NO: 24652 - DNA, 7357 bp, DROSOPHILA
cgaaagcaattcgcaaacgccgtgcacaaatcagagcaagttcaattaaacgaagacaaatagtgatttaggtacttttttaaaatatgtagctaatgtaggattaccacatcgtacttatagatacgtacaatctcaataaagtgcctgagaattattacttacaaatgaaacaaaagagtgaagtgttttaatcaccttctcggcggcactcgcctttcatcttcaacatgcgattatcggcgcattaacccattgatgagcacttttgtttgggaaatacagataatatattttttaacagttcaatatccttcttctaatatacataaagaataatccattttcagtatgtgaattcatcgactggttggaattgaactaaactcttggccatgcctgtcaagatcagagtgaatcatgcgtggatcgataaggatgaacccgtccgtagctccaattaaaattgtcaattgctgaaaagtgtaatcaaagtaagtctacacggtagctgtgattacgataagataccggctagggtccaccgttgcccgtagcaccgcaccggagcactgcccaccgggaccgggatatcccgaccgcggccaaaaactctcgcaaacaacagcgaaagccacttaggcaaaaatcgtggccagagttgctgcatcgtctgcttctgctccgatgtcgactgatgggtggctgtcagtgggcattaagataaaactggtctgcccctggccgatagggcggatcattgatttacagcgatgattcccgagcacggcgtagtggctagtggttagttaaaattgaaatgcccgaacgagcagcagtcagtggcgagtgaagcggcgcaagaatcgcacgcgagtgccttgaatcgtgtcaaggatctaaaatacgttccaaatatatgtgatattattaatgatcgcggattcgctagtatagctagtatactatatatgtacacggcggccaaattcgaataataatgagtgcggtccatgagcagcgccagccgaatccagtgacaaaggccaacttcttttccaaatggttctttatgtgagtgaaagcgagtgccaatcctgcgtatacgtaatatttaaatcgtcatacgtaatgtttctaaaataacgaggtggtgagaagcactccggtcgatcaagttaacttatttcgtgagctgacccctcttgaagtcctgctgataagatatagacctttccagctgacggactgcccatcatgatcagtatttatgggcaccgcaccttggccgtcactcgaaatttacggcgcgagcgaattcgtttgattcctttgaagagcgataaaagaatccgcgacagcccggcgacacctgtcatgtccgtcaataaccagttccctcgccctgtgctccctctatccttccagctggacgcgcgagattctcgtcaagggactgcaacggaatctggatccatcggatctctacgagaccgagcccagtctcgagagcacccaggtgtcctcgttcctgcttggccactgggagcaggagctcaagcggtccaagcccaacgtcctgcgcatgatattcaaggcctacggctggagctttgtgccggcgagcatcgtgtactccatcatggccatagcagtgcagtaagtactatgtggtgggcaggaaaatgaatcttgaaatggactattttatttataaatccccagcacaacgcagcccttgatgttgggcggcttggtgtccttcttctcggagagcacggggaagatcacaaagcactcggcctacttgtacgccatgggcgtggtgctttgctccctcatctctggactcttcttccacccctttatgaaatacctgttcagagtaggctctcgcgtccgtttggcctgcgcgggactcgtctaccggaagttcctccgggtctcggtggcggctgacaacagcggagtgagtggctatgccatatccctgatggccaccgatctgcccaccttcaacgagtccttctactgtttccacgaactgtggcgcggtcctttggagggcgtggtcttcgtctacatcatataccaactgattggatggccagcggttgttggactgggcaccatcgtggccttcatcccgctccaagcctgggctgcacgggcaatagcgcggtacaagaggagttcggcggatgtgggagatgaaagggtgaagctgatgaacgagatcatcgccgccatgcagcttatcaagatgtacgcctgggagaagtccttcgccaagctgataggcaaagtgagaaaggaggaaatggactccataagggggtccacctacatatacgcaggactacagtgtacagggatgatctccaagctgtccctcttcctctccctggttacctatgtcttcacgggcgacatagtcacctcgcagaaggtgtttatagtcgccagttattatgatcacctaaacgattccttgctccactcctggccgctggccatcaacatgtgggtggagacctttgtggtggcgaatcgcgtgaaggactttctcttccagcacgagaatcccgctgatggtggagtgcacaactttaaggaggcggaggataatccggagcacggcaacttcttcggacgcacccacaaacccaaggccgaagtaaagagcattacggtccataaactttctgcgagttgggatcagaagaagcaggagaaacgccatcgccacatcgaggatgtgagttttcaggcccaggatcagcaatttgtgggaatcgtgggaaccgtgggtgcgggaaagagcacccttctacaagtgatcctcggtgaactggatattatcagtggcagtgtggaagtcaatggagtccttagctatgctccccaagaaccctggttactccggggcagtctgcgagataatatcctctttacggaaccgtacgatgagcagcgttatctggaggtcctgcgagtttgccatcttgacagggacgtggaacaactgcccctgggcgatagcaccagggtgggtgaaggtggtgccagcctgagtggcggtcaaaaggctcgtgttagtctggcgcgggctgtctaccggaaggcggatatctacctcctggacgatccactatccgccgtggactctcatgtgagcaagatgctcctggatcggtgtctcaacgagttcctgtccaagaagattcgcattctggtcacccatcgtgttcagctgctcagacacgtggatcatttggtcctgctcgagggtggtcggatctctgttcaggggcactatgatgccctcaagaagctgattcgattcaggatgtcggtggccaatgatgtggaggtggccaagttgcgggccatgcgaacggatagtgtctacgaggagcccgagccaaggaaatctctgtcccaggaggagcatatggatcggcacgagatagagcagcagttcaaagagcagcagcaaataggatctgtgaagctgcaaacatacaaagagtacttcaaggtgctgggacatccattggtcgtggtgctcatcctgctgatgttcgtcgtggcccgttcatccgaggcaaccatggatattttcctgtccaagtggtaagtggaatgcccagcagttattttcggcttaaatgactaaccttgttgtgagatgagtcagtctgattttgcgacgtgtttaatggcactacatgataaaagcgtgttccacttgttgattgcaataaattttgcccgaatttccgcacagatgggacacagctcactatctcgacgccagatgttatatggttatatttcagtatcagaaggtgaaaataggaagtctgggctccacaacacccagactgatttcatgttcaattgaatctttcggggaataccttggattgtttgttgattaaaatgtgcacgtaatcaaagcacaagataaggctctgttttggttatatgtatatattattttttattgacaatattgatttcataatttaaaggacgaatttctatatttctgcagggcaacttgggaggagacggagcccaatcagcacgagcccattccggagtatcatagaactcgactgcgcatgatgatcctctacacgttcctcatcctctgcaccctcatcttctacgtgctccgcacctttggcttctttatgatgaccctgcggatatcgttgcgcatccacgaccagctcttccaaggagtcatccgagccttcatgcacttcttcacgctggccacctccggccggattttgaatcgtttctccagcgacgttctggccatcgatgtcaatctgccgcaggctatgatggactccattgaatttgctgtgaatgctctggcggtgctcgccgtggtcagcacggcgaatatttggctcctcataccggccaccgtggtggtggcactgttgtacggctgtaggtgtctctatataggagctagccggagtttaaagcgcatagaaactatatgtgagtagccttggcgtactgctcaagtctagtgactaatccaatctcttccagctcgcagtcccatctactcccacacaaatgccaccttcaagggattggccaccatccgtgctctgaatggcaccaagtacatggagcgggacttccactactaccagaacgagaatacctctgctctgtaccttcatgtgagcattaaccgggccttcgccttctggacggaccttatctgcgtgctgtacatcctggcggtgacattcagtttcctgctcttcgacaagcacagaggatactacagcggagatgtgggtctggctatcacacagtccatgaaattggtgctcatgtgccaggcgggaatgcgacaaaccgtcgagctggagaacatgatgaccagcgtggagcgggtgatggagtatgtgaacataccatcggaacctgcctacgaaacggaggaatccgtcaatctgccgaagcactggcccagtggagggcagctggacttcagggatctgcgtctgcgctatagtaatcacggcccctacatcctcaaaggtctcaccttcaccatccgtggcgaggagaagatcggcattgtgggacatacggcggcgggtaagtcttccattgtccatgccctctttcggttggctcacatcaatggacacatcagcatcgatggcttcgagacatcccagctgggcctgcacgatctgagacgtaggatatcgatcataccgcaggacccggtgctcttctcgggatccctccgcttcaacctcgatcccttcgaggagaagacggacgaggaactgtggctggccctggaggccgtcaagctcaaggagttcgtgtcgaatctgaaggatggcatcaactgcaggctccacgactgcggggccaacttcagcatgggccagaggcagctggtctgtctggccagagcccttctgcgccagaacaaaatactcatcatggacgaagccacagcaaacgtggatcccgagtaagtctattaaatcgaattcatgacgaagatcagctgactgaaagcaaatttgaggcagaacgcagaaagtttgattgatggtttaattccgacggtttgttgcggtttgaaagatcaaaacgagcgacgtcgggagtgacaaacgaaaaatcaaaatcaatcactttcgcttcaaaatcagctgatgttgatcaatgatctttataatttgtcaatgaagttggaaattcgcattgaaaacgacgtagaatggtgaatgtgaaaccgaccttgttctttctgcgtgacagttgaaaacgtgtttctgataagaccaggatgcttaaaatattaatagtgccgtagtattttgattcaacaatcgaaactatctggatctagaacttttaatgagtgcagagtttatttaccccaaatgtttattgatatatatttcacttagtagttggtttttgatgtattacaacgtttcgttctcatctttgccctgcaggaccgacaatctcatccaggaggcgatccacaccaagttcgcccactgcaccgtgctgaccatcgcccatcggctgcacaccgttatggacaacgaccgggtgatggtggtggacatgggccgtgtggtggagctggggcatccgcacgagctgctacacaaccggcacggctacctgcaccgcttcgtggagaagacgggcgtgggaactgcgcagcacctgcgccacctggcggagcagagctaccggaagagggtgctgggccggaagtcggaggatcagggatccgtgctggatctgggctacaaggggacgacgctgtgaaagactgctgggtgggggaatcaattggtacaccggggtggagtggttttcgttcgtaggtatggtaatatagactttattatagtgaactgatctttaaatatagttatatatatgtatatactttatatgtagttcataatatactcgatcgatcgtttgccttctggaatttgaaaaagcaatttgtcttgtaggttaagattacattaccatcgtctatattttgctactcgtactgtctggctttgattcgctctctataactacgatcctttctagtatccttttggtttggttttttgttttgttttgtttgtagttacaagtcacatgaaaatcgaaatgttaaactctataagttgcttctcgtctaggcttaaagatttaggttgtctcttcacttgactttagtttcgatttgtatggcttagatgtgcgataatggcgtttgattctatatgtataatattagcattacaagatttcgatttcgatttcgcttcttatataaaattgttgttgtttttcttggtagagtgtaaatgaattatcgcattcggtttggtagcagttttccacgaaactttaatacaagttcatatatagttggatgtggttgtgtataatgtaaatattaaagtaaataaagcatatttatgtatgtatataattggttttaaaatattctcctcgtagcttatttaaaattcgcttaaagtctgccttcaacaatatttgatgtaaatagaaaaatcagtgattcatttattttatattctctttataattagttgtaatatactctagatctttggtgcttagatgtaagtgtcttgcggttttggtaaaacaaagttagaccttgaaattcttccccaaattccaaagcctaaattgttttctgaatgcccgttagaatgtaaataagtaactagatttggttgtcctagaaataagattgtttgtttgctcgttttgttttaagaaaaattcgatg

SEQ ID NO: 24653 - DNA, 3909 bp, DROSOPHILA
atgagtgcggtccatgagcagcgccagccgaatccagtgacaaaggccaacttcttttccaaatggttctttatctggacgcgcgagattctcgtcaagggactgcaacggaatctggatccatcggatctctacgagaccgagcccagtctcgagagcacccaggtgtcctcgttcctgcttggccactgggagcaggagctcaagcggtccaagcccaacgtcctgcgcatgatattcaaggcctacggctggagctttgtgccggcgagcatcgtgtactccatcatggccatagcagtgcacacaacgcagcccttgatgttgggcggcttggtgtccttcttctcggagagcacggggaagatcacaaagcactcggcctacttgtacgccatgggcgtggtgctttgctccctcatctctggactcttcttccacccctttatgaaatacctgttcagagtaggctctcgcgtccgtttggcctgcgcgggactcgtctaccggaagttcctccgggtctcggtggcggctgacaacagcggagtgagtggctatgccatatccctgatggccaccgatctgcccaccttcaacgagtccttctactgtttccacgaactgtggcgcggtcctttggagggcgtggtcttcgtctacatcatataccaactgattggatggccagcggttgttggactgggcaccatcgtggccttcatcccgctccaagcctgggctgcacgggcaatagcgcggtacaagaggagttcggcggatgtgggagatgaaagggtgaagctgatgaacgagatcatcgccgccatgcagcttatcaagatgtacgcctgggagaagtccttcgccaagctgataggcaaagtgagaaaggaggaaatggactccataagggggtccacctacatatacgcaggactacagtgtacagggatgatctccaagctgtccctcttcctctccctggttacctatgtcttcacgggcgacatagtcacctcgcagaaggtgtttatagtcgccagttattatgatcacctaaacgattccttgctccactcctggccgctggccatcaacatgtgggtggagacctttgtggtggcgaatcgcgtgaaggactttctcttccagcacgagaatcccgctgatggtggagtgcacaactttaaggaggcggaggataatccggagcacggcaacttcttcggacgcacccacaaacccaaggccgaagtaaagagcattacggtccataaactttctgcgagttgggatcagaagaagcaggagaaacgccatcgccacatcgaggatgtgagttttcaggcccaggatcagcaatttgtgggaatcgtgggaaccgtgggtgcgggaaagagcacccttctacaagtgatcctcggtgaactggatattatcagtggcagtgtggaagtcaatggagtccttagctatgctccccaagaaccctggttactccggggcagtctgcgagataatatcctctttacggaaccgtacgatgagcagcgttatctggaggtcctgcgagtttgccatcttgacagggacgtggaacaactgcccctgggcgatagcaccagggtgggtgaaggtggtgccagcctgagtggcggtcaaaaggctcgtgttagtctggcgcgggctgtctaccggaaggcggatatctacctcctggacgatccactatccgccgtggactctcatgtgagcaagatgctcctggatcggtgtctcaacgagttcctgtccaagaagattcgcattctggtcacccatcgtgttcagctgctcagacacgtggatcatttggtcctgctcgagggtggtcggatctctgttcaggggcactatgatgccctcaagaagctgattcgattcaggatgtcggtggccaatgatgtggaggtggccaagttgcgggccatgcgaacggatagtgtctacgaggagcccgagccaaggaaatctctgtcccaggaggagcatatggatcggcacgagatagagcagcagttcaaagagcagcagcaaataggatctgtgaagctgcaaacatacaaagagtacttcaaggtgctgggacatccattggtcgtggtgctcatcctgctgatgttcgtcgtggcccgttcatccgaggcaaccatggatattttcctgtccaagtgggcaacttgggaggagacggagcccaatcagcacgagcccattccggagtatcatagaactcgactgcgcatgatgatcctctacacgttcctcatcctctgcaccctcatcttctacgtgctccgcacctttggcttctttatgatgaccctgcggatatcgttgcgcatccacgaccagctcttccaaggagtcatccgagccttcatgcacttcttcacgctggccacctccggccggattttgaatcgtttctccagcgacgttctggccatcgatgtcaatctgccgcaggctatgatggactccattgaatttgctgtgaatgctctggcggtgctcgccgtggtcagcacggcgaatatttggctcctcataccggccaccgtggtggtggcactgttgtacggctctcgcagtcccatctactcccacacaaatgccaccttcaagggattggccaccatccgtgctctgaatggcaccaagtacatggagcgggacttccactactaccagaacgagaatacctctgctctgtaccttcatgtgagcattaaccgggccttcgccttctggacggaccttatctgcgtgctgtacatcctggcggtgacattcagtttcctgctcttcgacaagcacagaggatactacagcggagatgtgggtctggctatcacacagtccatgaaattggtgctcatgtgccaggcgggaatgcgacaaaccgtcgagctggagaacatgatgaccagcgtggagcgggtgatggagtatgtgaacataccatcggaacctgcctacgaaacggaggaatccgtcaatctgccgaagcactggcccagtggagggcagctggacttcagggatctgcgtctgcgctatagtaatcacggcccctacatcctcaaaggtctcaccttcaccatccgtggcgaggagaagatcggcattgtgggacatacggcggcgggtaagtcttccattgtccatgccctctttcggttggctcacatcaatggacacatcagcatcgatggcttcgagacatcccagctgggcctgcacgatctgagacgtaggatatcgatcataccgcaggacccggtgctcttctcgggatccctccgcttcaacctcgatcccttcgaggagaagacggacgaggaactgtggctggccctggaggccgtcaagctcaaggagttcgtgtcgaatctgaaggatggcatcaactgcaggctccacgactgcggggccaacttcagcatgggccagaggcagctggtctgtctggccagagcccttctgcgccagaacaaaatactcatcatggacgaagccacagcaaacgtggatcccgagaccgacaatctcatccaggaggcgatccacaccaagttcgcccactgcaccgtgctgaccatcgcccatcggctgcacaccgttatggacaacgaccgggtgatggtggtggacatgggccgtgtggtggagctggggcatccgcacgagctgctacacaaccggcacggctacctgcaccgcttcgtggagaagacgggcgtgggaactgcgcagcacctgcgccacctggcggagcagagctaccggaagagggtgctgggccggaagtcggaggatcagggatccgtgctggatctgggctacaaggggacgacgctgtga

SEQ ID NO: 24654 - protein, 1302 aa, DROSOPHILA
MSAVHEQRQPNPVTKANFFSKWFFIWTREILVKGLQRNLDPSDLYETEPSLESTQVSSFLLGHWEQELKRSKPNVLRMIFKAYGWSFVPASIVYSIMAIAVHTTQPLMLGGLVSFFSESTGKITKHSAYLYAMGVVLCSLISGLFFHPFMKYLFRVGSRVRLACAGLVYRKFLRVSVAADNSGVSGYAISLMATDLPTFNESFYCFHELWRGPLEGVVFVYIIYQLIGWPAVVGLGTIVAFIPLQAWAARAIARYKRSSADVGDERVKLMNEIIAAMQLIKMYAWEKSFAKLIGKVRKEEMDSIRGSTYIYAGLQCTGMISKLSLFLSLVTYVFTGDIVTSQKVFIVASYYDHLNDSLLHSWPLAINMWVETFVVANRVKDFLFQHENPADGGVHNFKEAEDNPEHGNFFGRTHKPKAEVKSITVHKLSASWDQKKQEKRHRHIEDVSFQAQDQQFVGIVGTVGAGKSTLLQVILGELDIISGSVEVNGVLSYAPQEPWLLRGSLRDNILFTEPYDEQRYLEVLRVCHLDRDVEQLPLGDSTRVGEGGASLSGGQKARVSLARAVYRKADIYLLDDPLSAVDSHVSKMLLDRCLNEFLSKKIRILVTHRVQLLRHVDHLVLLEGGRISVQGHYDALKKLIRFRMSVANDVEVAKLRAMRTDSVYEEPEPRKSLSQEEHMDRHEIEQQFKEQQQIGSVKLQTYKEYFKVLGHPLVVVLILLMFVVARSSEATMDIFLSKWATWEETEPNQHEPIPEYHRTRLRMMILYTFLILCTLIFYVLRTFGFFMMTLRISLRIHDQLFQGVIRAFMHFFTLATSGRILNRFSSDVLAIDVNLPQAMMDSIEFAVNALAVLAVVSTANIWLLIPATVVVALLYGSRSPIYSHTNATFKGLATIRALNGTKYMERDFHYYQNENTSALYLHVSINRAFAFWTDLICVLYILAVTFSFLLFDKHRGYYSGDVGLAITQSMKLVLMCQAGMRQTVELENMMTSVERVMEYVNIPSEPAYETEESVNLPKHWPSGGQLDFRDLRLRYSNHGPYILKGLTFTIRGEEKIGIVGHTAAGKSSIVHALFRLAHINGHISIDGFETSQLGLHDLRRRISIIPQDPVLFSGSLRFNLDPFEEKTDEELWLALEAVKLKEFVSNLKDGINCRLHDCGANFSMGQRQLVCLARALLRQNKILIMDEATANVDPETDNLIQEAIHTKFAHCTVLTIAHRLHTVMDNDRVMVVDMGRVVELGHPHELLHNRHGYLHRFVEKTGVGTAQHLRHLAEQSYRKRVLGRKSEDQGSVLDLGYKGTTL

SEQ ID NO: 24655 - DNA, 20184 bp, DROSOPHILA; identical to SEQ ID NO: 15418

SEQ ID NO: 24656 - DNA, 5402 bp, DROSOPHILA
gagtgaaaagtgcgccgtggagcgcgggcggacattcaccgaacccaaaacgcctcgaactcgatatcgaatcgaaaggattaatccagtgaaatcagtgaagtgaaagtgcctgcgaacgcatcatcaatcctttatcctttctccctcaaatatttacccagtggtgattgctgttgacaaagtggattggcatatacgggggccactttcaattaggcacgttgccgctgcttcataaatgtgccacaatggccgcgccgtccaggacgacgttgatgccaccacccttccggctccagctgcggctactgatactacccatcctgctactcctgcgccatgatgcggtccacgcggaaccgtattccggcggattcggcagctcagctgtatccagcggtggactggggtcagtgggcattcacatacccggcggcggagtgggcgtcatcacggaggcccgctgcccgagggtctgctcctgcaccggattaaatgtggattgctcgcatcgaggactcacctccgttcccaggaaaatctcagcggacgtggagcgactcgagctgcagggaaacaatttgaccgtgatatacgagacggatttccagcggctgaccaagctgcgaatgctccaactaactgacaatcagatccacacgatcgagaggaactccttccaagatttggtctcactcgagcgactggacatctccaacaatgtcatcacgaccgtgggtagacgcgtcttcaagggagcccaatcgttgcggagtcttcagctggacaataaccaaatcacctgcctggatgagcacgcctttaagggattggtggagctggagatactcacgctgaacaacaacaacctgacttccctgccgcacaacatcttcggcggactgggacgtttgcgggcactccggctgtcggacaatccgttcgcctgcgactgccatctgtcctggctgtcgcgattccttcgcagtgccacccgcctggcgccctacacccgctgccagtcgccatcgcagctgaagggccaaaacgtggcggacctgcacgaccaggagttcaaatgctcgggtctgacggagcacgcaccgatggaatgcggggcggagaacagctgtccgcacccatgtcgctgtgcggacgggatcgtcgattgccgtgagaagagtctgaccagcgtgcccgtcactttgcccgacgacaccaccgagctccgcctcgagcagaatttcattacggaactgccgccgaaatcgttctccagctttcgacgactgcgacgcatcgacctgtccaacaacaacatatcccggattgcccacgatgcactaagcggcctaaagcagttaaccactctcgtgctgtacggcaataaaataaaggatttaccctcgggcgtgttcaaaggactcggctcgctgcagctgctgctgctgaacgccaacgagatctcgtgcatacgcaaggatgcctttcgcgacctgcacagtttgagcctgctctccctgtacgacaacaacatccagtcgctggctaatggcacattcgacgccatgaagagcatcaaaacggtacatctggccaagaatcctttcatctgcgactgcaatctgcgctggctggccgactatttgcacaaaaatcccatagagacgagtggagcccgctgcgagtcaccgaagcggatgcatcgtcgtcggattgaatcgctgcgcgaggagaaattcaaatgctcctgggatgaattgcggatgaagctgtccggcgagtgccgcatggactccgactgtccggccatgtgccactgcgagggcaccaccgtggattgcacgggccggggcctgaaggagattccgcgcgacattcccctgcacacaactgagcttttgctcaacgacaacgaactgggacgcatcagttccgatggcctctttggtcgcctgccgcacttggtgaagctggaattgaagcgcaaccagctgaccggcatcgagcccaacgccttcgagggagcatcccacatccaggagttgcagctgggcgagaacaagatcaaggagatatcgaacaagatgttcctgggactgcaccaactaaaaacgctcaatctgtacgacaatcaaatctcatgcgttatgcccggttcctttgagcatctcaactctctgacgtcgctgaacctcgcatcgaatccattcaattgcaattgtcatttggcctggttcgcggaatggctgcgcaaaaaatcactgaacggcggagcggcacgttgtggagccccgtcgaaggtacgtgacgtgcagatcaaggacttgccccactcggaattcaagtgtagcagcgagaacagcgagggctgcctgggcgatggctactgtccgccatcctgcacctgcaccggcaccgtggtccgctgttcgcgtaaccagctgaaggagataccgcgcggcattcccgccgagacatcggagctgtatctggagtccaatgagatcgagcagattcactacgaacgcatacgccatttgcgctcccttacccgactcgatctcagcaacaaccagatcaccattctctccaactacacctttgccaatctgaccaagctgtccacgctcatcatctcatacaacaagctgcagtgtctgcagcggcatgcgttgtctggcctgaataacctgcgcgtgctttcgctgcacggtaaccgcatctcgatgctgccggaaggctccttcgaggacctcaagtcgttgacccacatcgcactaggcagcaatcccttgtactgcgattgcggtctgaagtggttctccgattggataaagctggactacgtggaaccgggaattgcacgttgcgccgaaccggaacagatgaaggataagctgatcctgtccacaccctcgtcgagcttcgtttgccgcggccgcgtgcgcaatgatattctggccaagtgcaacgcctgttttgagcagccgtgccagaatcaagcgcagtgcgtggcccttccgcagcgagagtaccagtgcctctgccagccgggctatcatggcaaacactgtgagtttatgatcgatgcttgctacggaaatccgtgccgcaacaatgccacttgcacggtgctggaggagggtcgtttcagctgtcagtgcgctccgggatacacaggtgcccgctgcgagacgaatatcgacgattgcctgggcgagatcaagtgccagaacaatgccacctgcatcgacggagtggagtcgtacaaatgtgagtgccagccgggattcagtggcgagttctgcgacaccaaaatccagttctgcagtccggagttcaatccctgcgcgaatggagccaagtgcatggaccactttacccactacagctgcgattgtcaggcaggtttccatggcaccaactgcacggacaatattgacgactgccagaaccacatgtgccagaacggtggaacgtgcgtggacggcatcaacgactaccaatgccgctgtccagacgactatacgggcaagtactgtgaaggccacaacatgatctcgatgatgtatccacagacgtcgccttgtcaaaaccacgagtgcaagcacggtgtctgcttccaaccgaacgctcagggcagcgactacctatgcaggtgtcatccgggttacactggaaagtggtgcgagtacctcaccagcataagctttgtccacaacaactcgtttgtagaactggagccactgcgaacacgtccggaggcgaacgtgacgatagtcttcagtagcgcggagcagaatggaattctcatgtacgacggccaggatgctcatcttgcagtggaactgtttaatgggcgtattcgggttagctacgatgtgggtaatcaccctgtgtccacgatgtacagctttgagatggtggccgatggaaagtaccatgccgtggagcttctggccatcaagaagaatttcacgctgcgcgtggatcgcggattggcccgttccatcatcaacgagggctccaacgactacctgaaactcacgacgcccatgttcctgggcggcctacccgtggatcctgcacagcaggcgtacaagaactggcaaatacgcaaccttaccagctttaagggctgcatgaaggaggtgtggatcaatcataagctggtcgactttggcaatgcccagcgccagcaaaagatcacaccaggatgtgccctgctcgaaggagagcagcaagaggaggaagacgacgagcaggatttcatggacgagacaccgcacatcaaagaggagccggtggatccttgcctggagaacaaatgccgtcggggcagtcgctgtgtgccgaattccaatgccagggacggctaccagtgcaagtgcaagcacggccagcgcggccgctactgcgatcaaggtgagggcagcactgagcccccaacagtcaccgcggcgtccacctgtcgcaaggagcaggtgcgcgagtactacacggagaacgactgtcgctcgaggcagccgttgaagtacgccaagtgcgtgggcggctgcggcaaccagtgctgcgcggccaaaattgtgagacggcgcaaggtgcgcatggtgtgcagcaacaaccgcaagtacatcaagaacttggacatcgtgcgcaagtgcggatgcaccaagaaatgctactgactgaaagatgcgactacccaattgctcgaacggagcaatagcagcttagatgttagtttaggaacaggtttaaatctaacttatagtagtagttatagtaacgatagtcttagccatagcactagggatagcacggatgttagggggacgaaggatgaagcggaggagagtgctgacgcgggggagacaacggaggaggtgagggacgagagtgatgattaccccacggacggcatgcagtccgatctctacgacgacaccatcgatgacgacgatgacgatggtctcgatgatgattatgcagacgaggaggatggggaggaggatccagagcagcttcccgatcccaaaggtctggtaagtgtgccagatgaagaggaagacatgggttacgacgaggatgacgaacgtatcgccatggagcggccaagaacggttagacccaggcccgacgaggagcatttccttaacgaagagggcagtggtttcggcggctttcgatcgcgattccggccgagcaatagcttccgcgagactcagctggagaatatccgcaagaagctgctcacagaagcacaggcggctccggaaacggctgttgcggtggccgtgccgagcactgcgatagatctgcgcgagagcagcggccactttgccaacgatgacgaggatggcgaggacggcgatgacggcgtcgatgacgagttc

SEQ ID NO: 24657 - protein, 1480 aa, DROSOPHILA
MAAPSRTTLMPPPFRLQLRLLILPILLLLRHDAVHAEPYSGGFGSSAVSSGGLGSVGIHIPGGGVGVITEARCPRVCSCTGLNVDCSHRGLTSVPRKISADVERLELQGNNLTVIYETDFQRLTKLRMLQLTDNQIHTIERNSFQDLVSLERLDISNNVITTVGRRVFKGAQSLRSLQLDNNQITCLDEHAFKGLVELEILTLNNNNLTSLPHNIFGGLGRLRALRLSDNPFACDCHLSWLSRFLRSATRLAPYTRCQSPSQLKGQNVADLHDQEFKCSGLTEHAPMECGAENSCPHPCRCADGIVDCREKSLTSVPVTLPDDTTELRLEQNFITELPPKSFSSFRRLRRIDLSNNNISRIAHDALSGLKQLTTLVLYGNKIKDLPSGVFKGLGSLQLLLLNANEISCIRKDAFRDLHSLSLLSLYDNNIQSLANGTFDAMKSIKTVHLAKNPFICDCNLRWLADYLHKNPIETSGARCESPKRMHRRRIESLREEKFKCSWDELRMKLSGECRMDSDCPAMCHCEGTTVDCTGRGLKEIPRDIPLHTTELLLNDNELGRISSDGLFGRLPHLVKLELKRNQLTGIEPNAFEGASHIQELQLGENKIKEISNKMFLGLHQLKTLNLYDNQISCVMPGSFEHLNSLTSLNLASNPFNCNCHLAWFAEWLRKKSLNGGAARCGAPSKVRDVQIKDLPHSEFKCSSENSEGCLGDGYCPPSCTCTGTVVRCSRNQLKEIPRGIPAETSELYLESNEIEQIHYERIRHLRSLTRLDLSNNQITILSNYTFANLTKLSTLIISYNKLQCLQRHALSGLNNLRVLSLHGNRISMLPEGSFEDLKSLTHIALGSNPLYCDCGLKWFSDWIKLDYVEPGIARCAEPEQMKDKLILSTPSSSFVCRGRVRNDILAKCNACFEQPCQNQAQCVALPQREYQCLCQPGYHGKHCEFMIDACYGNPCRNNATCTVLEEGRFSCQCAPGYTGARCETNIDDCLGEIKCQNNATCIDGVESYKCECQPGFSGEFCDTKIQFCSPEFNPCANGAKCMDHFTHYSCDCQAGFHGTNCTDNIDDCQNHMCQNGGTCVDGINDYQCRCPDDYTGKYCEGHNMISMMYPQTSPCQNHECKHGVCFQPNAQGSDYLCRCHPGYTGKWCEYLTSISFVHNNSFVELEPLRTRPEANVTIVFSSAEQNGILMYDGQDAHLAVELFNGRIRVSYDVGNHPVSTMYSFEMVADGKYHAVELLAIKKNFTLRVDRGLARSIINEGSNDYLKLTTPMFLGGLPVDPAQQAYKNWQIRNLTSFKGCMKEVWINHKLVDFGNAQRQQKITPGCALLEGEQQEEEDDEQDFMDETPHIKEEPVDPCLENKCRRGSRCVPNSNARDGYQCKCKHGQRGRYCDQGEGSTEPPTVTAASTCRKEQVREYYTENDCRSRQPLKYAKCVGGCGNQCCAAKIVRRRKVRMVCSNNRKYIKNLDIVRKCGCTKKCY

SEQ ID NO: 24658 - DNA, 7983 bp, DROSOPHILA
ccgtgaagttggccaggggctggtgggtggccaaaacggtggcacaaatttgaagccactttatggtgactattcacttgggcaaaactttaagtttgagagttaaggcgaaggtcgggccctagaagccattgaatccgctgcagtcgtaaccagttcacggtcaatttttagtgggccttaattgtaacaatttgcgactgcgtgactggtctgctttcccagctgcaaatttgtgtgtgcaaaccacacagacaacggagataaaatatatccactcgtgtgcatggagattatatggtcattcaagtagctaagccaactttgtttaaccactgccgactggccattgcacagcggtaatttatagagtgcgcccccttttgttacgtcgccccattcggtggtttttggtggttcagtggtccagtgcctcagtggttcagtgcctcagttcgcgtgaaaggaaaagccaaagcaaacaactcaattgcacttgcaggcacacttagttgatattaatacggcattgtgggtgaagttaggtactctaatcgctggcccacacaactgctcattcatatttatgagctaattatcactttgctgctcttgatagacgcgtatattatttagataatgtttctggcgcccaatgtggggccacacctctttcactttcattgacacttaatgtaaatcattaacaagtttcttcctcaaaatttatgttaaagttaatacattttaaaaataatttattaagaaagttctttcattcacaaattttttccggttcattcgaaattgttactagtttgattaactcctaaataaaaaattgtagtgtttgaatttcgctatttttgcgcttttgttatcgctataaaatacgatcggaaaaccaatcgattgagactattcgactttcggccaccatcgatagtcgggatagcgataccagcgctggcacgacaggcatcgattatttctcttgcatccctagtcgtccgctccaatataataatttcactaggcaaccttaatgtaataagcgacgtaaaaccgggactaaatagctccagagcgaatgcttattggctaccagcgagtttggccgtcgtgcgtgcgatagaatccgataaatggccgcaaaccgggcagctggtagtgcaaaaaaaagtgaaaagtgctgttaacacagcgagtagcgtgtgcatgtgtgagtgcgtgcggttgtgcgtatgtgtgtgcgtgcgtgtcttacgttgcaaacaaaatttctttacttttcaatcggttttttgcactcgatcggcggctgaagcggcgttctataactttttctccgatccgcatagcgcagcattgcccacaaatgttgctcccccaatatgtgagtgttttttcccagctcgcgagttctagaaaccagcaaaacccaattaggcatctttaacccatagccgtgcataaattatcggtcataatcataactgtttacctagtgcgatttgggcccccgatttccagaccttttcgaattgtggtgaccttcagccgagcagcaacaaaatcaatagtaatatagtttacgttgcatccgccagtcacccacccagcaccacccccttttccgtttttacataattatggccaagttcacgggttcaggtctatatcaattcaattggttcttgattggacgccgcaacgagcgtgggattatggcactatatacctggttatagtgcctgcctgactggatagaaccaacgcatgtgatccggaagaggtgcacccaccggggaggaaaatcaccgaaacagctgaccgaggatgagttcaaaagctttgggggcaagctttaaaagttattagctggagaagatggcacagatgtactgatactgatagcactgctatatatatccccttgaacttcggtatttacctggctacgatgaatcacactgctcgggtgaccacatgtgtagattagtaattgattatcaatcgcgggccccttatcgctgggaacctgttgtgattgtggccagttgcctggcattgctcacatcgattgtttctagaccgcagcgacatgtcctgtaataacgtcttgttcgtccacttctttcaggataatgaaagatgcacgaatatgacgtaaatgagcgcaaagaggaaccagccagtcttccacccacacaaaacgagaccactgaaatcaacagccagctacgacaggatcagcaaaatcaggaacaggagaatcccctacggcagcaggataacagccacccgcctcaggaaaatccaattaatcagcaggagaaggacacattgcaagtttccgttctttatcctctggtagtctgcgcgcagctggcggacagtcaactggttctgactgcggacacgccgaagctatctccagttaaaaagcgtcagcggcgcgtttatgttgcggacaccttgcgctgctacagtctacgttcccggcaagagcccgcgaccaaggacccactcgaaggtggcctaaagcagccggacgtcgttccaccacccccgcctgtccaggcgccctctcccacgcccacagagtccacagaatacacacctccaggtaggattaggtgtgccaggctccactgtagccgttctagacacctgcacatgttacaaacaaacattgtgattagcgtgactataagattgtataataccgccgtggttacgtgtgtgcagatagctcgtcttggttatcacaaaagtgattaaaataatcttattctttacacaagaccacttccaattcattttcattcatttttcttagaacctaattaatgaaatattacttcgaaaatactaataatcctgttccttgttacagaacaatttaaatcggagttttggaacagaattgaagaggctcaagagccaaagcctgttggaaagaagcgacgaacccctggaggactcaaaagaacgcggggcaacaagcttctaaaagagctcgagatccaatcgccggaaacggcggccgctattgcggcagcacaggcggaactcaacgccgcaggaaagtcgggagcagcaggagcacggtccagccgcaagaggaccaacacgatgtctctatacgatcggcgattccagacgaccaccgaggagcgccgcgtggctaacggatacggtggcaatgctgcgcgatcggtcactggctcctcgtcaaacgagatcgagtcccaggagccgcagagtcatcagtattacggtcccaatggcggcagcaatgccgcgggagcaggcgcaggcttgaacggaagtgcggcggccctgaaccatgccccttccatgggcacactgtgcaacattggcaacagttgctacttgaattctgtggtttacaccctgcgctttgccccgcactttttgcacaacctacaccacctgatacaggacttgaatgttgtgcagcagacgatagttcgccaacaaacggccaggtctgcgtccctcggcaaaaatgtgagtgccgctcagttggagcacgcccgcagctggagcagcaaggatctggccaccagtacggatcagtacagtggccagaatggcggagttaatagcggaaacggtggtagcggctcgagcaagtcgactcatcagtcggtaaccgaaaaactccatgaactgtataacaacctgcacggcaacgagatggcagactccacggagccctaccacgcggacacgctgctgcacgccattcaggacgtaaacgccacctttgaaggtaaccagcagcaggacgcacacgaattcctaatgtgcgtgcttaattgcatcagggaaacgaatcagtctttgatcaaggccattggcgagtgtcctgaggtcatcgcaaatgggtaagttgtactgataagttagaataaaaagaagaagaaatgtactaattgcttttacgcatgcagatacatagccaacccggatgaggtcgacaccggagagggacaggatcgcactgattcgactgcgtcgcagaacctgaacgctggcaatggatcgctggcaactagtcaaacaaccacgaccaaaacgtcgttcttctctcgcaaatcaaaaagaaaagacgaggtcaagccatccaagtcgacgcgcgttcagtcgccactcaaggagaatagtcccacggcgggcgggataaccggtgcgggcacagcccatgccaccgccaacagcctgttctacctgaacacagttgatctcagcggcgccagcagcaccagcggtagtgccagtacgagtgccagtggcgttgtttccacaagtgcagcgttgcccacacccccgcaggctacaaaatactccagtgacgacgagatgaattccgccaccgtgctgaaggacaaaatgcgactggaggagcgaatacgggagctcaatctaaacttcttcagctcggacttcgaaggcattgtggtgctgaccaccaagtgcctcagttgcgagacgataacgcggcaaaagcagggcatgcttgatatttctgtgccggtgccgatctcggggtacgacaatgctgatctccaagacaaaccgagcacctacatacaggttagtggatagacaataattaactacgatttaactaattaccttttgttcttagaattcctgcattacgaaagagtatttccgcggggagaataagtatagttgcaaccagtgcaccggctacaccgaagccatccgctccatctcgtacgaggtgctgccgcggttactggtcattcagctgaatcgcttctctggcggcatggagaaagtgagtacgtacgtgccgaccaccttcactctgccctgtttctgcgccacctgctgtgagctgggcgagggcaacaagctgcacgtttacaagctgtacagcgtgatcacgcatgtgggagccaccctgacggtgggccactacatcgcctatacgtgcttcttggatctcgccagtgactatgtcaactgccctaaggatcgcaggaatacgatgacgaactcgcaaacgatggcttcgcaagcagtgccctccaatgagaatgctgcgccaaacaatggtagcagctccgtggccagcactccagttattgcagcagcttcggcattggcctcatcgggcaacattttgatgaagaagatgaagttcggtcgcagcaaggcctccagcagtggtgatatgagcaagaacgttaagcaggttaatgggataatcagcaagaacatcaccaatggaattggcaagctgagcataagcaccacctgccaaggagtcaactgctgtgccatgaggctgtgttgcacccagcagacgagcagcagcaactcgaccagttgcagtgatttcagcgaggagtccctgcaaaacggaagcaacagcaatctcagcttcggaggatcgggcagcacctatcccacgggctacggaagcacgggtcgcggtggtgtcagagccaactacgcccacggaggtcctgatcccatttggtatatgtgcgacgacgacaagatcaaggcgatgacccaaagggagttcgaagagctgctatcgcccacacggaagatcacaataacgccgtatttgctcttttacgcgcgattcgatctgcagccgcagaaggcgacgccgccgatgcctggatcatccacaacgcctccgccaccgtcgtcggcacagagttcgtggtcgaatgaaaacgtgtccagcggctcgcacaaaatttgaggttgccccaaatcgcaaaagcccagtggcaagcggggaaagtaaaaatttattgaaaaagtgtacatcggacatactgatcggattggagatgtctctagactagaataataagcaaaaaatgaagtctgtttgttaaacaatgtaatcgtactaagctctatcgtttatctacatgcataactattcatgaaccgaccagtggtttgactgagtcctcccttttcccatatccaaaaatcatatagtttttgtttttattagtagcaatcagttctgtttgttcaatcgatgcatttgattttggcattctattattgtattctaatcgttattaattaaaaaaccgaaagcgtcacattgaaaacacgaatttaaaacgttgagattgtttgccccgttgaatgtaagtgacattcgcagaacgttttcgatatactcctacataaattttgaagtgaaagcaatgaaattaacaagtctttgattcgaaatattgcatggcaggtggagcgagtgttgtaatgatagtaattattaataatagtaatgaataatctccaatattctcataggacacacctacccagttggctttgtgtccggcaggcgatggaatctgtaataattacagcatcagttatacttatagtgactggaatggtttattgtaaacaatgagctataccaacgcaaacacacaaatctatatacgaagtgttgaatagttgttaaactcatgacacacctcaaaagtgaagtgagtgcaatgtaatattgtaattgattgaatcgaaagtggcggacaaacagaaacagatcaagcgaacaactgagaattgttatgaaatggattgcatagtttatagaaacgttttcatgtaacaagctgcaacagaacttcattcactcacaaatcacacacgtttgtaatgtaatattgataaataaatgtaataaaattataatatatctgtaataattgtaacagcacactacttacgcaataattttagtttagtcgtttagccttagtttctctctccatgcattacatgactctagtttagttcagttctatttttttccaagagcgctgctatagtgatattaacatttacagagcaaagatttgtgtacattgtaatttgtaaagtttacatataacaattgaaaataaatttaacactgatcaacataagcatgcgattcgacagtttaaagtgacacataaattgaggaccgctcgattccaattacatttatgtttattattgattagcattatagaacatgcttaactaaatatacgaaatatacaacatacatataatcatggaagttgggatttactttttcgagtaaatgatatttattcagcaacctagtagttagttgattcaaaaatgtttactgatggctcgagtgaacctctcatagtttcgctccttccactgcacattgatgagcattgtctccaaactttgactgatggtctgttctatatccttgagctgatccttggaactggccatgaagttcataaactcatcatagtccctttgtgtaaagatttgttcggaaagtggcggcagaagttcagacatagattctgactgaggatggtagctagaaggttgtgttagcacaattattgtgttatactgcaagaatcaatctaatttatatactcacaacttggaaatggagtccacgttatccatcaagtacttcttggccaaaaggaaccctacttccgaatcggcaatcgcctgaaagacagaagttgaatcctgcttccgaatgtcccccattccgtcaaagttcctttccaaatatctctgcagcacccagacctcctgcgaacaacccagggaatccagaatgatttgcttttcggtggccacattagccttctggtaccgagtccacaggaaatcccaatcctcgtcacagccatgtttgatcgccgtgcagtacacaacgccccgaatgcccagcggcactgggttaacctcgtcaggattagcctctgatcgccagctacggtagaagctcaaggcctgggtaacgcaatcggaaacctcgaacgagcatgcccagtccgccactatcgccttcaaaatggtcttgtcctgctgttcttcggaggcgactgtatcgttgatgccattcaggtgctcatatatcggagtgataag

SEQ ID NO: 24659 - DNA, 4834 bp, DROSOPHILA
ccctagtcgtccgctccaatataataatttcactaggcaaccttaatgtaataagcgacgtaaaaccgggactaaatagctccagagcgaatgcttattggctaccagcgagtttggccgtcgtgcgtgcgatagaatccgataaatggccgcaaaccgggcagctggtagtgcaaaaaaaagtgaaaagtgctgttaacacagcgagtagcgtgtgcatgtgtgagtgcgtgcggttgtgcgtatgtgtgtgcgtgcgtgtcttacgttgcaaacaaaatttctttacttttcaatcggttttttgcactcgatcggcggctgaagcggcgttctataactttttctccgatccgcatagcgcagcattgcccacaaatgttgctcccccaatatatgcacgaatatgacgtaaatgagcgcaaagaggaaccagccagtcttccacccacacaaaacgagaccactgaaatcaacagccagctacgacaggatcagcaaaatcaggaacaggagaatcccctacggcagcaggataacagccacccgcctcaggaaaatccaattaatcagcaggagaaggacacattgcaagtttccgttctttatcctctggtagtctgcgcgcagctggcggacagtcaactggttctgactgcggacacgccgaagctatctccagttaaaaagcgtcagcggcgcgtttatgttgcggacaccttgcgctgctacagtctacgttcccggcaagagcccgcgaccaaggacccactcgaaggtggcctaaagcagccggacgtcgttccaccacccccgcctgtccaggcgccctctcccacgcccacagagtccacagaatacacacctccagaacaatttaaatcggagttttggaacagaattgaagaggctcaagagccaaagcctgttggaaagaagcgacgaacccctggaggactcaaaagaacgcggggcaacaagcttctaaaagagctcgagatccaatcgccggaaacggcggccgctattgcggcagcacaggcggaactcaacgccgcaggaaagtcgggagcagcaggagcacggtccagccgcaagaggaccaacacgatgtctctatacgatcggcgattccagacgaccaccgaggagcgccgcgtggctaacggatacggtggcaatgctgcgcgatcggtcactggctcctcgtcaaacgagatcgagtcccaggagccgcagagtcatcagtattacggtcccaatggcggcagcaatgccgcgggagcaggcgcaggcttgaacggaagtgcggcggccctgaaccatgccccttccatgggcacactgtgcaacattggcaacagttgctacttgaattctgtggtttacaccctgcgctttgccccgcactttttgcacaacctacaccacctgatacaggacttgaatgttgtgcagcagacgatagttcgccaacaaacggccaggtctgcgtccctcggcaaaaatgtgagtgccgctcagttggagcacgcccgcagctggagcagcaaggatctggccaccagtacggatcagtacagtggccagaatggcggagttaatagcggaaacggtggtagcggctcgagcaagtcgactcatcagtcggtaaccgaaaaactccatgaactgtataacaacctgcacggcaacgagatggcagactccacggagccctaccacgcggacacgctgctgcacgccattcaggacgtaaacgccacctttgaaggtaaccagcagcaggacgcacacgaattcctaatgtgcgtgcttaattgcatcagggaaacgaatcagtctttgatcaaggccattggcgagtgtcctgaggtcatcgcaaatggatacatagccaacccggatgaggtcgacaccggagagggacaggatcgcactgattcgactgcgtcgcagaacctgaacgctggcaatggatcgctggcaactagtcaaacaaccacgaccaaaacgtcgttcttctctcgcaaatcaaaaagaaaagacgaggtcaagccatccaagtcgacgcgcgttcagtcgccactcaaggagaatagtcccacggcgggcgggataaccggtgcgggcacagcccatgccaccgccaacagcctgttctacctgaacacagttgatctcagcggcgccagcagcaccagcggtagtgccagtacgagtgccagtggcgttgtttccacaagtgcagcgttgcccacacccccgcaggctacaaaatactccagtgacgacgagatgaattccgccaccgtgctgaaggacaaaatgcgactggaggagcgaatacgggagctcaatctaaacttcttcagctcggacttcgaaggcattgtggtgctgaccaccaagtgcctcagttgcgagacgataacgcggcaaaagcagggcatgcttgatatttctgtgccggtgccgatctcggggtacgacaatgctgatctccaagacaaaccgagcacctacatacagaattcctgcattacgaaagagtatttccgcggggagaataagtatagttgcaaccagtgcaccggctacaccgaagccatccgctccatctcgtacgaggtgctgccgcggttactggtcattcagctgaatcgcttctctggcggcatggagaaagtgagtacgtacgtgccgaccaccttcactctgccctgtttctgcgccacctgctgtgagctgggcgagggcaacaagctgcacgtttacaagctgtacagcgtgatcacgcatgtgggagccaccctgacggtgggccactacatcgcctatacgtgcttcttggatctcgccagtgactatgtcaactgccctaaggatcgcaggaatacgatgacgaactcgcaaacgatggcttcgcaagcagtgccctccaatgagaatgctgcgccaaacaatggtagcagctccgtggccagcactccagttattgcagcagcttcggcattggcctcatcgggcaacattttgatgaagaagatgaagttcggtcgcagcaaggcctccagcagtggtgatatgagcaagaacgttaagcaggttaatgggataatcagcaagaacatcaccaatggaattggcaagctgagcataagcaccacctgccaaggagtcaactgctgtgccatgaggctgtgttgcacccagcagacgagcagcagcaactcgaccagttgcagtgatttcagcgaggagtccctgcaaaacggaagcaacagcaatctcagcttcggaggatcgggcagcacctatcccacgggctacggaagcacgggtcgcggtggtgtcagagccaactacgcccacggaggtcctgatcccatttggtatatgtgcgacgacgacaagatcaaggcgatgacccaaagggagttcgaagagctgctatcgcccacacggaagatcacaataacgccgtatttgctcttttacgcgcgattcgatctgcagccgcagaaggcgacgccgccgatgcctggatcatccacaacgcctccgccaccgtcgtcggcacagagttcgtggtcgaatgaaaacgtgtccagcggctcgcacaaaatttgaggttgccccaaatcgcaaaagcccagtggcaagcggggaaagtaaaaatttattgaaaaagtgtacatcggacatactgatcggattggagatgtctctagactagaataataagcaaaaaatgaagtctgtttgttaaacaatgtaatcgtactaagctctatcgtttatctacatgcataactattcatgaaccgaccagtggtttgactgagtcctcccttttcccatatccaaaaatcatatagtttttgtttttattagtagcaatcagttctgtttgttcaatcgatgcatttgattttggcattctattattgtattctaatcgttattaattaaaaaaccgaaagcgtcacattgaaaacacgaatttaaaacgttgagattgtttgccccgttgaatgtaagtgacattcgcagaacgttttcgatatactcctacataaattttgaagtgaaagcaatgaaattaacaagtctttgattcgaaatattgcatggcaggtggagcgagtgttgtaatgatagtaattattaataatagtaatgaataatctccaatattctcataggacacacctacccagttggctttgtgtccggcaggcgatggaatctgtaataattacagcatcagttatacttatagtgactggaatggtttattgtaaacaatgagctataccaacgcaaacacacaaatctatatacgaagtgttgaatagttgttaaactcatgacacacctcaaaagtgaagtgagtgcaatgtaatattgtaattgattgaatcgaaagtggcggacaaacagaaacagatcaagcgaacaactgagaattgttatgaaatggattgcatagtttatagaaacgttttcatgtaacaagctgcaacagaacttcattcactcacaaatcacacacgtttgtaatgtaatattgataaataaatgtaataaaattataatatatctgtaataattgtaacagcacactacttacgcaataattttagtttagtcgtttagccttagtttctctctccatgcattacatgactctagtttagttcagttctatttttttccaagagcgctgctatagtgatattaacatttacagagcaaagatttgtgtacattgtaatttgtaaagtttacatataacaattgaaaataaatttaacactgatcaacataa

SEQ ID NO: 24660 - protein, 1084 aa, DROSOPHILA
MLLPQYMHEYDVNERKEEPASLPPTQNETTEINSQLRQDQQNQEQENPLRQQDNSHPPQENPINQQEKDTLQVSVLYPLVVCAQLADSQLVLTADTPKLSPVKKRQRRVYVADTLRCYSLRSRQEPATKDPLEGGLKQPDVVPPPPPVQAPSPTPTESTEYTPPEQFKSEFWNRIEEAQEPKPVGKKRRTPGGLKRTRGNKLLKELEIQSPETAAAIAAAQAELNAAGKSGAAGARSSRKRTNTMSLYDRRFQTTTEERRVANGYGGNAARSVTGSSSNEIESQEPQSHQYYGPNGGSNAAGAGAGLNGSAAALNHAPSMGTLCNIGNSCYLNSVVYTLRFAPHFLHNLHHLIQDLNVVQQTIVRQQTARSASLGKNVSAAQLEHARSWSSKDLATSTDQYSGQNGGVNSGNGGSGSSKSTHQSVTEKLHELYNNLHGNEMADSTEPYHADTLLHAIQDVNATFEGNQQQDAHEFLMCVLNCIRETNQSLIKAIGECPEVIANGYIANPDEVDTGEGQDRTDSTASQNLNAGNGSLATSQTTTTKTSFFSRKSKRKDEVKPSKSTRVQSPLKENSPTAGGITGAGTAHATANSLFYLNTVDLSGASSTSGSASTSASGVVSTSAALPTPPQATKYSSDDEMNSATVLKDKMRLEERIRELNLNFFSSDFEGIVVLTTKCLSCETITRQKQGMLDISVPVPISGYDNADLQDKPSTYIQNSCITKEYFRGENKYSCNQCTGYTEAIRSISYEVLPRLLVIQLNRFSGGMEKVSTYVPTTFTLPCFCATCCELGEGNKLHVYKLYSVITHVGATLTVGHYIAYTCFLDLASDYVNCPKDRRNTMTNSQTMASQAVPSNENAAPNNGSSSVASTPVIAAASALASSGNILMKKMKFGRSKASSSGDMSKNVKQVNGIISKNITNGIGKLSISTTCQGVNCCAMRLCCTQQTSSSNSTSCSDFSEESLQNGSNSNLSFGGSGSTYPTGYGSTGRGGVRANYAHGGPDPIWYMCDDDKIKAMTQREFEELLSPTRKITITPYLLFYARFDLQPQKATPPMPGSSTTPPPPSSAQSSWSNENVSSGSHKI

SEQ ID NO: 24661 - DNA, 3724 bp, DROSOPHILA
ggaaaaagtataggattttcttagtctggaaaaaaatttgagaacttcgtcttttcttacccaatatttgcactctgcgattcattttgatgaactgttgattcttcgattttcgctggcctcttttatacccgagtctttgactaagataagatctgcagaaaggttctcagtaatgggcaagttcagtcaacttgtcggcatctcggtggtaatcaattttaactgcccattttaactgggtcagcgtgctaaaccggttcgctttatctggggatcttcgccattgagtcattgggtgcggttttgcacagcgaactctaatagaagggcagaccagaaccctttgtggtgttgatatattacaattactctttaacatgctggttttttgggtgactttttataatgaaaaaaatgtatgcttatcgacttatatgcataatttagttggccagtttttattttatgaaatatattagacagagagaagaactattagaagacacataatcctagaacatttttggccaatagttatggaattcaagataataattcaacccttgatgcattcccactcgtttttgtttgttttccatttcctactttaaaaaacattcattttcatcagtcagatgtgggtagcccagatacagagacctgctttggaacccaaataatggaatgcaataaaacaagagtgcagaaaaacgtacgagtaatacgtgtatatatagatatatatatatatatatttgtagtgaaatggaatgtcgcccgagaacgaaattgaaagttcagcatgaaacatttttggaatagaaacctggcaggggtttaattgaattaaatcaaaaacaactgctatgcgaccccttcggcgttgctatgtttctgcttagctggctgcgcagatcggattgaattgaagcacccgcatccgcatttggggtcgcttggaacatctgaattcggatttcagattttagatctgtggatagttggatcgaatggtcaaagtagttgagccagttgcgccgtggcaagcgcttcgttggcggctcccgagcgaaaggatcgccactagggggtcctgaaaaatcggtttcgcgtaatccgtataccatggcggtactctggtggttgctctcgttgcaggtggtgctgatcttaccgcccagttaccacctggccacgccctcctccgggagcggtcaattgcgtcgtctttggctgcaggatcattgcagtgcgggaatttgcacgaatgtcgtgattggtcgcagtgattatgtgatcctatcacaggcccccattgggggcaccaccatgctcacctttctgaactcgagcattgccaagataccgcatttgttgttcgacacctttccggatctacaggttctgcgcatggaaaactgttcgctggaaactttcgaaaaaccgcagtttgaaggtgccagcaatctgatgagcttgttcttgggatataatcgcctgaaggatatacctaagaatatattcttgggcgcagacaatctggccacattgcatctgcaaggaaatcagttgaagcagctgggaaatcatagtttccatgccttgaaagaagtgaaggaactttcgctggcggaaaatcaacttgagcaaatttctctaggagtttttagcggcatgaggaaactaatggacctaaatttggctggcaatcgattagatgctctaccaagaggcgtcttcgatcggaatttaaaccttaccaaactaaatctggccagaaaccggttcaccgccttcgaatcggaactgttgaagctgcagccagtatttacgcagttggatatttctggaaatatcttccaggagttaacactcaactttaccatgctggatgtggctatagctcatagttgcgatttgaggaggttgaccgtctacggagtgatccatgaactggatttgcacaacaactcgctgagggaaatgccacacattccactggccgccaatgtgagcagtctggatttgtcgcacaatccattgggaaaccttcagggtaatccgttgcgtagattcacatcgctattgcggttgaatctttctgccaccggtgcccacgagttgccagagggattgttcaagaaacagagccatctgcaaatgttggatatatcaggaaactctatatactcgttgaagatcaccatcttcgacagtttgaaggcgctgcagtatttctactttcagcagaacaactggaactgcgatttcctgcaacttctaatgagttcgtttgtgaaacgcaaggacatttccttcatggaggatataacagcacccgaattggtggacgattatgtggatggcattgcctgttggtatgagagcgacaagcagtcgaagaagtgtgagtctggtggctcggatgctgccatggaactctcggtggtgcgaaatgagatcaagacattcaccgagttggtggagaagaagttcgtcaaggtctatcgcatgttggaggagatgaagatgaagctatagccggaattggattaaattccttgcaatattattcaaatcatatttaatccccttatttaatcaactatttaatcaaacatcaagcaatgttaatcgtactttaaggaatttgacacacaaaagcaacatattgatattttaagacaaattactagaaccaataaagcactttttggaactctagggaaaaccaagtgtttgattacttatgagttttttttatcagtgtttgtgcaatggattcagaaagcctaactacaaatgcattaaatcacattatttaattaactttagtctcttcaaaagactattaaaatttattcccatctaactgttttataaatctatcttttcgttatcatatttcataatcagttcgccagaaacattttctgctgcacatatttaaaattcttttgtgcataaacgtgaaaacagtttatcaggcgataaatcccagacttcacagacagctcaaacctagaattaaaaaaatcgctaacgctcaatttaatgccataaatattttatgcaaaacacgagcgggccagaaaaaatatttatggcataaacacaatatttttttttttataaaatgaaacttatcggcgtaatcgcgcccagaggagacagacacacttaaaaaccgacaaaacttaattaaatgcaggcgcacagaaaaatatccacaaataaacacacgcgaatggaattttttcatgcggtccggcaacgtcaacggaacattgcaatgataaaaataaatgcatttcgtaaacgttttttcatttcggtatattcataagtgtgcgctgtggcactgtggcgaattaataaaaacaatcgcacgtggaaatatcattaaaatatggattacagttgattgggcttacaaatataaaacgatggttttcccaatgccaaatataaatagtttcgggtatatttttgtggatgcgactgttggtcgaacttttggctaacaatgctaacccgatagcgctcggtttatgatgatttatagacgacgtaaccttaacgttatcgaacctattccgattcgtgaccggaagagcgaaattccaataagcatcatttgcattttcaatgctttccgcttgccattttcttttttggctcattcggagatggaggctctatgcaaaaatgctgggaaaga

SEQ ID NO: 24662 - DNA, 1724 bp, DROSOPHILA
atagttggatcgaatggtcaaagtagttgagccagttgcgccgtggcaagcgcttcgttggcggctcccgagcgaaaggatcgccactagggggtcctgaaaaatcggtttcgcgtaatccgtataccatggcggtactctggtggttgctctcgttgcaggtggtgctgatcttaccgcccagttaccacctggccacgccctcctccgggagcggtcaattgcgtcgtctttggctgcaggatcattgcagtgcgggaatttgcacgaatgtcgtgattggtcgcagtgattatgtgatcctatcacaggcccccattgggggcaccaccatgctcacctttctgaactcgagcattgccaagataccgcatttgttgttcgacacctttccggatctacaggttctgcgcatggaaaactgttcgctggaaactttcgaaaaaccgcagtttgaaggtgccagcaatctgatgagcttgttcttgggatataatcgcctgaaggatatacctaagaatatattcttgggcgcagacaatctggccacattgcatctgcaaggaaatcagttgaagcagctgggaaatcatagtttccatgccttgaaagaagtgaaggaactttcgctggcggaaaatcaacttgagcaaatttctctaggagtttttagcggcatgaggaaactaatggacctaaatttggctggcaatcgattagatgctctaccaagaggcgtcttcgatcggaatttaaaccttaccaaactaaatctggccagaaaccggttcaccgccttcgaatcggaactgttgaagctgcagccagtatttacgcagttggatatttctggaaatatcttccaggagttaacactcaactttaccatgctggatgtggctatagctcatagttgcgatttgaggaggttgaccgtctacggagtgatccatgaactggatttgcacaacaactcgctgagggaaatgccacacattccactggccgccaatgtgagcagtctggatttgtcgcacaatccattgggaaaccttcagggtaatccgttgcgtagattcacatcgctattgcggttgaatctttctgccaccggtgcccacgagttgccagagggattgttcaagaaacagagccatctgcaaatgttggatatatcaggaaactctatatactcgttgaagatcaccatcttcgacagtttgaaggcgctgcagtatttctactttcagcagaacaactggaactgcgatttcctgcaacttctaatgagttcgtttgtgaaacgcaaggacatttccttcatggaggatataacagcacccgaattggtggacgattatgtggatggcattgcctgttggtatgagagcgacaagcagtcgaagaagtgtgagtctggtggctcggatgctgccatggaactctcggtggtgcgaaatgagatcaagacattcaccgagttggtggagaagaagttcgtcaaggtctatcgcatgttggaggagatgaagatgaagctatagccggaattggattaaattccttgcaatattattcaaatcatatttaatccccttatttaatcaactatttaatcaaacatcaagcaatgttaatcgtactttaaggaatttgacacacaaaagcaacatattgatattttaagacaaattactagaaccaataaagcactttttggaact

SEQ ID NO: 24663 - protein, 471 aa, DROSOPHILA
MAVLWWLLSLQVVLILPPSYHLATPSSGSGQLRRLWLQDHCSAGICTNVVIGRSDYVILSQAPIGGTTMLTFLNSSIAKIPHLLFDTFPDLQVLRMENCSLETFEKPQFEGASNLMSLFLGYNRLKDIPKNIFLGADNLATLHLQGNQLKQLGNHSFHALKEVKELSLAENQLEQISLGVFSGMRKLMDLNLAGNRLDALPRGVFDRNLNLTKLNLARNRFTAFESELLKLQPVFTQLDISGNIFQELTLNFTMLDVAIAHSCDLRRLTVYGVIHELDLHNNSLREMPHIPLAANVSSLDLSHNPLGNLQGNPLRRFTSLLRLNLSATGAHELPEGLFKKQSHLQMLDISGNSIYSLKITIFDSLKALQYFYFQQNNWNCDFLQLLMSSFVKRKDISFMEDITAPELVDDYVDGIACWYESDKQSKKCESGGSDAAMELSVVRNEIKTFTELVEKKFVKVYRMLEEMKMKL

SEQ ID NO: 24664 - DNA, 2933 bp, DROSOPHILA
tgttctgtatccctcaatgtcaggtgttgaatgtgcggaagtttagccgctccggccaaagccaagaggggcagcaggaaaagcggcgataacatcactgatacggttgagaatttgaatcgtctaaaccggacgccgaaaagcaactggccttttatagtacaagaccaaaaagctttgccatgcagaggaaagagagaaaacccctggagtgcagcagtaactcaaagaactagttcgattatagaaatattggactaacctctgataccgggaattaagagattacgtttttaatgtggctttaaaaaattacatggagtgggacattcaacttctccacattacctaacatatatgcatatattgtatgtatgtatgtagcatgtaaaatataatttaagtttaagctccgtcttaggctacatgtactattttaacctcctggtgctgtggcatttaaattttgcaattaacctttgaagcgcgtaagaggacacaatgaagatcgcggagtgcatccttgcatgcactaattgccgactgtccggaacaagctgcaaccatgtgtcattagggccacatgtcccatggtgtggatgttgtcctgaaaatgtttacgcaaacacgcggtcacttcaggggtatgaaatctcttcctcctctcttaattggctttgaacgccagctgggagaaccccatcgagaggggtcagtatttatagcatcctttgagactgggccgtggtcgaccttgccgtgtcaacacctcggttagcacattacgcacacccacgtgggcgcagatttccagggcttttcccattcaagaacaagttactattaaatacgcgtactcatatcggacaatcgtaatcaattcagacgaaattaactaatcgtcaaatactattcataaatctatctgcttatctctagtggtgggcaagtataaaaggtgccattagttggtagtcagtatacattctccgtaaatctgcagaatgaaactgatcactgtgactttggttattgcccttgtggccgccgcccagggagccaagctctccgacaagctggccaaactcgtgcctagctttgcgaccggcttcgtgatcaacggcacggaggcagaaccccactccgccccgtacattgtttccctggcgaccaactacttgaagcactcgcacatctgcggaggcaccttgattaacaaggactggattgtgactgctgctcattgcatttccgagccagtaggcatgagcatcattgccggactccacacccgtgccgaggtggatgagctgacccagcagcgccaagttgactttggccgcgtccacgagaagtacaccggtggcgttgggccctacgacattgccctgctgcacgtgaacgagtctttcatcttcaacgagtgggtgcagcccgccaccttgcccagccgtgaacaagtccatgagggagagacccacctgtacggttggggacagccaaagtcctacatcttctcgggcgccaagaccctgcagactgtgaccacccaaattttgaactacgaggagtgcaaggaggagctgccggaaagcgctcctatcgctgagtccaacatctgctcctcttccctgcaacagagcaagtctgcatgcaacggtgactccggcggccccctggttgttgagttcacaaacgccccctccgagctgattggcatcgtatcctggggctacatcccctgcggactggccaacatgccttccatttacaccaaggtgtcggcctacattgattggataaccaatattcagagtgcctactacaagctcttctaaacaaaaggaagaaactattagtcagatctattagccaggatcgaaatcgctattgatcagagtcatgatcgattgttgaataaaagcatccaactaaaacttgtcttgtaacttttttgcgtttattctttctaaaataccatcctcttcaacgcaaagcaaaaacgttcaaaaagaaactagttttgtacacccctccgattgatcgattgtgaaataattataggcaatgaaagtccagtctctgtttgcttttctacaatttattgtgtctgattacccttgaatcgaactgtaatcggaactggattaaagacggtcccgaacacaccatttgtctcttgatttatggtttctaatataagctctggaaaagcccagacttttggaggcgtgtgccattgatagacgatccagtatcgaaagtcatgcactcgaccaatcaaatctaaccggactgaaagctccttatcattgctattaaaaaagtgctaaataatattgaacaaagagattggaaaagctttacaaagttcgaattctaagaatcaacatgttgctaaaacaacgtttaatacaacaaagaatacaaggatgacgcatgaaaatttacaactttaaaagttaaatttttctagatgctttttggcgctactaaaaataattcccaaatacatttaaggttgtttttagaagactcaataatatttacacttatgttttcatatttcatcatttattatcagggcatgctagcttctaatcattgtttgccaaatacacaaagtctctactattgttttaagacaaatacaattaacacactcagacaaagtaacctgtatgtgaacaaatagaaacttgccatccagatcggggccaaaagccagacatgttggctgcaaggaagcttcttctgtgccttaagtgcatgcatgtgttgagatattagaactcgtatcagtcaaaggcgcaagagcaggacaaagcgaaatcatatcggggccaagaatatgccggtgatgatcgtaaatctcttcggtgataacgataactggtgcttggagtgcttacagttcaaattggagattgaag

SEQ ID NO: 24665 - DNA, 933 bp, DROSOPHILA
cagaatgaaactgatcactgtgactttggttattgcccttgtggccgccgcccagggagccaagctctccgacaagctggccaaactcgtgcctagctttgcgaccggcttcgtgatcaacggcacggaggcagaaccccactccgccccgtacattgtttccctggcgaccaactacttgaagcactcgcacatctgcggaggcaccttgattaacaaggactggattgtgactgctgctcattgcatttccgagccagtaggcatgagcatcattgccggactccacacccgtgccgaggtggatgagctgacccagcagcgccaagttgactttggccgcgtccacgagaagtacaccggtggcgttgggccctacgacattgccctgctgcacgtgaacgagtctttcatcttcaacgagtgggtgcagcccgccaccttgcccagccgtgaacaagtccatgagggagagacccacctgtacggttggggacagccaaagtcctacatcttctcgggcgccaagaccctgcagactgtgaccacccaaattttgaactacgaggagtgcaaggaggagctgccggaaagcgctcctatcgctgagtccaacatctgctcctcttccctgcaacagagcaagtctgcatgcaacggtgactccggcggccccctggttgttgagttcacaaacgccccctccgagctgattggcatcgtatcctggggctacatcccctgcggactggccaacatgccttccatttacaccaaggtgtcggcctacattgattggataaccaatattcagagtgcctactacaagctcttctaaacaaaaggaagaaactattagtcagatctattagccaggatcgaaatcgctattgatcagagtcatgatcgattgttgaataaaagcatccaact

SEQ ID NO: 24666 - protein, 277 aa, DROSOPHILA
MKLITVTLVIALVAAAQGAKLSDKLAKLVPSFATGFVINGTEAEPHSAPYIVSLATNYLKHSHICGGTLINKDWIVTAAHCISEPVGMSIIAGLHTRAEVDELTQQRQVDFGRVHEKYTGGVGPYDIALLHVNESFIFNEWVQPATLPSREQVHEGETHLYGWGQPKSYIFSGAKTLQTVTTQILNYEECKEELPESAPIAESNICSSSLQQSKSACNGDSGGPLVVEFTNAPSELIGIVSWGYIPCGLANMPSIYTKVSAYIDWITNIQSAYYKLF

SEQ ID NO: 24667 - DNA, 2890 bp, DROSOPHILA
atcctcttcaacgcaaagcaaaaacgttcaaaaagaaactagttttgtacacccctccgattgatcgattgtgaaataattataggcaatgaaagtccagtctctgtttgcttttctacaatttattgtgtctgattacccttgaatcgaactgtaatcggaactggattaaagacggtcccgaacacaccatttgtctcttgatttatggtttctaatataagctctggaaaagcccagacttttggaggcgtgtgccattgatagacgatccagtatcgaaagtcatgcactcgaccaatcaaatctaaccggactgaaagctccttatcattgctattaaaaaagtgctaaataatattgaacaaagagattggaaaagctttacaaagttcgaattctaagaatcaacatgttgctaaaacaacgtttaatacaacaaagaatacaaggatgacgcatgaaaatttacaactttaaaagttaaatttttctagatgctttttggcgctactaaaaataattcccaaatacatttaaggttgtttttagaagactcaataatatttacacttatgttttcatatttcatcatttattatcagggcatgctagcttctaatcattgtttgccaaatacacaaagtctctactattgttttaagacaaatacaattaacacactcagacaaagtaacctgtatgtgaacaaatagaaacttgccatccagatcggggccaaaagccagacatgttggctgcaaggaagcttcttctgtgccttaagtgcatgcatgtgttgagatattagaactcgtatcagtcaaaggcgcaagagcaggacaaagcgaaatcatatcggggccaagaatatgccggtgatgatcgtaaatctcttcggtgataacgataactggtgcttggagtgcttacagttcaaattggagattgaagagacctatataaggcgctaggctatttggcagtggaacaaactcgacagagaactcaaaatgaaacaattcgcggttatattcgcactggctctggcttcggtttcggccatttctgtccctcagccgggattccccgaaggtcgcatcatcaacggctatgaagcggcgaagggagaggcgccctatattgtgtccttacagaccacatccaactcgcacttctgtgcaggaagcttgctcgatgaggtgaccattgtgaccgccgcacactgcctgacctacaatcagggtcaggcagttgccggtgcacacagccgcactgaccaggagaacgttcagattaggaagttcaccaatgcccagtacgtgatccacgagaactacggtggcggtgtgggacccaacgacatcggcctaattctcctcaaggaagaggatgcctttgacctgaatgccgttgcccgtgatggcagcaatccggtttccgcagtaagtcttccttcaaagacattccaaggcactagcgatggatatctgtacggctggggccgcgacaactcaggattgctgccgctgaaccttcagaaactggacgctatcattgttgactacaacgaatgcaaggcggcgttgccatccaacaattcgctggcagaaaccaatgtatgcacccacacccccggaaaagccgacggatcctgcaacggagacagtggcggccccctggtctcgcaatccagcagtcgaggagccgagctgattggcatcgtctcctggggatacacaccctgtttgtccacaacctatccttccgtatacacatcagtgtcttcgtttttgccttggatcgatgagaaccgtaaggcgaaatagacaaaaacctattctcttatataaccacttaataaacgaacattctgtactcaaacaatgacacattgggttagtggatattttttccaaaaaatacctgataactcaactatcaaaattaaattgattagtgttaaagacttttttaggcaaaacaaatactttgaacaagcctaaaaagtcttttgaccttttgcaaacgaattggaaataatggaatgtaccagttacaagtataagtaattaataatcaatatccccggacaaaatcgtctaagtacacagctcactactcacatcatcccatcgaatgaacttctcgccatcttgcagagcttgtggcacctccacgctggcggtggagatgtaggttcctccggcgctcatcatcctcacaaatttttgggtttaaaatctcgtttacgggctgctactgacccactgatgaacgctttctgtttactttctgtgcgattcttggattagccgcggctcctcatttcctttcccttagttgtcgcagaatagccacaccgcatacaaatgacgccatagtcctggttggtatccgaatcatcgacatggtcctggcacagttagagcggtattgactttgcaccgcatgcgagctctttggactgcattctgggactgattaaaagttctggctgttttctgcaagcacaaaaaaattggaaatatattaaaacaatttattttatctttaatttttttattttgtaactttgtccttatggaaaagaatgaaggtaaagctaataattgtgaaataatgttcgacgatatattcctatcctaattttaaaggggttatttctgtcgagccctgttcccaattgagtcatgcccaactgcagatacaccagataccattaacaattttccaaagtctgacgcttttgtttcgctgccattgcgggtcaacccgattacgtgtacgagaaaggtcaggaacagaggtccggacttcggatcgcagccccctgaatgggctttcaatgagcgccggacgaatctccattcattggggtccattccat

SEQ ID NO: 24668 - DNA, 890 bp, DROSOPHILA
cagagaactcaaaatgaaacaattcgcggttatattcgcactggctctggcttcggtttcggccatttctgtccctcagccgggattccccgaaggtcgcatcatcaacggctatgaagcggcgaagggagaggcgccctatattgtgtccttacagaccacatccaactcgcacttctgtgcaggaagcttgctcgatgaggtgaccattgtgaccgccgcacactgcctgacctacaatcagggtcaggcagttgccggtgcacacagccgcactgaccaggagaacgttcagattaggaagttcaccaatgcccagtacgtgatccacgagaactacggtggcggtgtgggacccaacgacatcggcctaattctcctcaaggaagaggatgcctttgacctgaatgccgttgcccgtgatggcagcaatccggtttccgcagtaagtcttccttcaaagacattccaaggcactagcgatggatatctgtacggctggggccgcgacaactcaggattgctgccgctgaaccttcagaaactggacgctatcattgttgactacaacgaatgcaaggcggcgttgccatccaacaattcgctggcagaaaccaatgtatgcacccacacccccggaaaagccgacggatcctgcaacggagacagtggcggccccctggtctcgcaatccagcagtcgaggagccgagctgattggcatcgtctcctggggatacacaccctgtttgtccacaacctatccttccgtatacacatcagtgtcttcgtttttgccttggatcgatgagaaccgtaaggcgaaatagacaaaaacctattctcttatataaccacttaataaacgaacattctgtactcaaacaatga

SEQ ID NO: 24669 - protein, 271 aa, DROSOPHILA
MKQFAVIFALALASVSAISVPQPGFPEGRIINGYEAAKGEAPYIVSLQTTSNSHFCAGSLLDEVTIVTAAHCLTYNQGQAVAGAHSRTDQENVQIRKFTNAQYVIHENYGGGVGPNDIGLILLKEEDAFDLNAVARDGSNPVSAVSLPSKTFQGTSDGYLYGWGRDNSGLLPLNLQKLDAIIVDYNECKAALPSNNSLAETNVCTHTPGKADGSCNGDSGGPLVSQSSSRGAELIGIVSWGYTPCLSTTYPSVYTSVSSFLPWIDENRKAK

SEQ ID NO: 24670 - DNA, 3622 bp, DROSOPHILA
acttccgctgtttgccaaatcgacagcgacatcctgctgtgggcctaaataaattgtgttgcatacttttaagcgcttacccgaggtaccaaactttgtgctggttttggcatggcccttaatgatgcaagagtaagttttgggtggatgtaggttcctaggagttcgctttcaattagtaccaatacttcttcacacagctatgtcatatgtgcctgcccaaagctcagttaggcgacaagaatggcttcgggaatgtatcacattcacctcccaaattggtcgagttcctttggctggtcaaaacaatgtggccgaactttatggcccagtagttgccataactaattctgtcaacgcttctgcacaactaattgtaattgtaattgcaaaatagtttgactcacagtcagcttcgtgtgcagcctttgaattgcaatttgccaaagaatttagcacaatgaaattcaattaacaacgaagcacacacatacacacacagctcttaaaactgcggcaaaatccctgctactattttatctcacttacacaggagccgagagagagagaggtggcagatagcgtgggaaagggacgcaacagcttatgtcatgcgtcactaaatcagaacaattttgaacaaatttcaaaaataataaaagcccattttaattacactcatgctctggacagaaattgtgtgtgtgctctaaaattgtacactttccgaaaataaattgttttctctaaagataaatcagtgggaatttttcaataattaattaatgatttatattttatgtgtaattatatttattagaataaaggtttcaaatttattggccaaaaaaatttgtctataaattcgatactttctccgagtgctatttaaattacatgctgcataaataggcttccgttttatttaggttttgggcatttgacgttcatacacaaaatggggtttataataaatgtaattgaaattaccaaaccctgactaacggtcgatttcaccaaaaacgatgtccagcgatccaataatggccacaacatcggccagcaggtgtgcgggtgccattttggccatgagggctagatgagcataggaagctggacgaatcttgcagcgatagggacgcgatgaaccatcggagatgaggaatgctccgaattcacccttgggcgattcaacggcacagtacgtctgtcccggaggcacccggaatccttgcgagaagtgcttgaaatgatggatcagatcctccatgccctccttcatcttgcttcgttgcggagggcagatcttcagatcatccaccttgatctcacccggtggcatggcgtcgatgcattgcttgatgatattcaccgactcgcgcatttctcgcatgcgcaccaagtagcgatcgtagcagtctccattcgatcccacaaccacgtcaaaatccatctcgtcataggcatcgtatggctgttgcttacgcaaatcccactttacgccggtggccctcagaacgggtccagtgcatccatagtttaaggcatcgtgtgcggatatgactccaatgccaatattacgcatacgccagatgcgattatcggtcactacgtcctccacttcgtccaatcgttcgttgaattgattgataaactgatacaaatcgtggagaaaccctagaggtatatcactggccacgccccccggtcgaatgtaggcggcatggagacgagctcccgaagcgcgttccgaaaactcatacaacttctcacgttcctcgaacagccaaaagagtggagttatagctccacagtccagtaccgacgaaccaatggccatcgtgtgattcgtcagcctcattatctccgaaaacatggtgcgtatgtacttggcccggcgtggaacctccacattcagcaacttctccaccgccaagcagtaggccaactcattggccatgcaggacacatagtccagacgatcgaaatagggcagtgcttgagtgtacgtcttgtactcgatcagtttctcggttccgcgatgcagtagcccaatgtgcggatcggcattcagcaccgtttcattatccagctcgaggatcatgcggagtactccgtgtgccgccggatgcgcgggtccaaagtttatgagcttggtgcgaaatgtacgatcaacgggtggaatctgttttcccttaaaattgggacgctttttccactcgtcaccttcgggataccaaactatatactgttgtttattcatgaactcgggatctggataccagtagtgtgtgtcatagggctcgtatggcgggcctggaggatacagctcatcccagctggggtcacattccttaacttttggctcttcggggcaatcttaaaaaaagctccttacaataaatttaccagtgtttgagggatcttaccttctttgtttgatgaaaacacgcgacggttgaatagttttcccaaatccggtctcttgaaggtggactttaagccctccacggtcaaatacttttcactgaggcggttcttgtatgcctggaaacgtctaatttcgttgggtgtgaatagcttatccgccagcttgcgaatcccttgcgttccgccagacatgattaccggagtattaaaaaaaatattagttctatactaacttctttggaaaattaaaaatgtaaacaaatgtttctacccttagcttactaagatgttaagagcaacgactactatctccagtttatttttagatttatatgttattttgtaaactgcctattaatccattgaaccatcattccttgcagatcttcgatgatcactaccacttcgcacatcacaaggtctcgaagcggtcgctctcccccgccacgcatcaccagactcgcctggatgacgacgatcgcgtccactgggcgaagcagcagcgggccaagtcgcgatccaaacgggactttatccgcatgcgaccctcaaggacctcctcgcgagccatgtcgatggtggacgccatgtcctttaacgactccaagtggccgcagatgtggtatctggtaagttatcgaaaatgcaaagcattccattccatttaccattcttagaaagcaaaatgattatttcaatgttttgatgtttcaagaacacaaccataggtattgggatataatatttaaacaaatattttttatacctacaaattgttataacgtaaccttattctcagaatcgtggtggtggcctggacatgaatgtgatacccgcctggaagatgggcataaccggcaagggcgtggtggtgacaattctggatgatggcctggaatccgatcatccggacatacaggataactacgtaagtagtgacattcgtttatcataaaacccatactaaattagcatatgataacctaaacaggatcccaaagcctcgtacgatgtgaatagccacgacgacgatccgatgccgcattacgatatgacggactcgaaccgccatggaactcgctgtgccggcgaggtggcagccaccgccaacaattcgttctgcgcggtgggtattgcctacggcgccagtgtgggcggagtcaggatgctggacggagacgtcacggatgcg

SEQ ID NO: 24671 - DNA, 1509 bp, DROSOPHILA
atgtctggcggaacgcaagggattcgcaagctggcggataagctattcacacccaacgaaattagacgtttccaggcatacaagaaccgcctcagtgaaaagtatttgaccgtggagggcttaaagtccaccttcaagagaccggatttgggaaaactattcaaccgtcgcgtgttttcatcaaacaaagaaggcccgccatacgagccctatgacacacactactggtatccagatcccgagttcatgaataaacaacagtatatagtttggtatcccgaaggtgacgagtggaaaaagcgtcccaattttaagggaaaacagattccacccgttgatcgtacatttcgcaccaagctcataaactttggacccgcgcatccggcggcacacggagtactccgcatgatcctcgagctggataatgaaacggtgctgaatgccgatccgcacattgggctactgcatcgcggaaccgagaaactgatcgagtacaagacgtacactcaagcactgccctatttcgatcgtctggactatgtgtcctgcatggccaatgagttggcctactgcttggcggtggagaagttgctgaatgtggaggttccacgccgggccaagtacatacgcaccatgttttcggagataatgaggctgacgaatcacacgatggccattggttcgtcggtactggactgtggagctataactccactcttttggctgttcgaggaacgtgagaagttgtatgagttttcggaacgcgcttcgggagctcgtctccatgccgcctacattcgaccggggggcgtggccagtgatatacctctagggtttctccacgatttgtatcagtttatcaatcaattcaacgaacgattggacgaagtggaggacgtagtgaccgataatcgcatctggcgtatgcgtaatattggcattggagtcatatccgcacacgatgccttaaactatggatgcactggacccgttctgagggccaccggcgtaaagtgggatttgcgtaagcaacagccatacgatgcctatgacgagatggattttgacgtggttgtgggatcgaatggagactgctacgatcgctacttggtgcgcatgcgagaaatgcgcgagtcggtgaatatcatcaagcaatgcatcgacgccatgccaccgggtgagatcaaggtggatgatctgaagatctgccctccgcaacgaagcaagatgaaggagggcatggaggatctgatccatcatttcaagcacttctcgcaaggattccgggtgcctccgggacagacgtactgtgccgttgaatcgcccaagggtgaattcggagcattcctcatctccgatggttcatcgcgtccctatcgctgcaagattcgtccagcttcctatgctcatctagccctcatggccaaaatggcacccgcacacctgctggccgatgttgtggccattattggatcgctggacatcgtttttggtgaaatcgaccgttag

SEQ ID NO: 24672 - protein, 502 aa, DROSOPHILA
MSGGTQGIRKLADKLFTPNEIRRFQAYKNRLSEKYLTVEGLKSTFKRPDLGKLFNRRVFSSNKEGPPYEPYDTHYWYPDPEFMNKQQYIVWYPEGDEWKKRPNFKGKQIPPVDRTFRTKLINFGPAHPAAHGVLRMILELDNETVLNADPHIGLLHRGTEKLIEYKTYTQALPYFDRLDYVSCMANELAYCLAVEKLLNVEVPRRAKYIRTMFSEIMRLTNHTMAIGSSVLDCGAITPLFWLFEEREKLYEFSERASGARLHAAYIRPGGVASDIPLGFLHDLYQFINQFNERLDEVEDVVTDNRIWRMRNIGIGVISAHDALNYGCTGPVLRATGVKWDLRKQQPYDAYDEMDFDVVVGSNGDCYDRYLVRMREMRESVNIIKQCIDAMPPGEIKVDDLKICPPQRSKMKEGMEDLIHHFKHFSQGFRVPPGQTYCAVESPKGEFGAFLISDGSSRPYRCKIRPASYAHLALMAKMAPAHLLADVVAIIGSLDIVFGEIDR

SEQ ID NO: 24673 - DNA, 34361 bp, DROSOPHILA
gagcggattgcacacaaatgtttgccataaatttcgtcttggcactgacactaacattgccagcagctttcagaggctctttatcgccgatttcgctgtggttctcttctgcgttttcagaatcagtataattattgtcaaacgcggcataattgtgttctttgccccacaaagccaaactatttttgtattcttttgtttattctcatcatctgattgtcattagaaattgtggcaaaaatagatagatttatatgaataaatgggtcatctgggctctgatatattcatatgtttattttgcttttcgcaacgaaagcgaaagtgtttctgatggtaatttaaatttattttgaataaatttaaacatggttttttgtacaataacaccgaaaggcgacagacaatgcaatttctttatccaacattttctaattaaaaatcgatcaacacgcatataaaaaaaatttatttacttgcatattacacccccaatctatttaaaatcaaaataaatggataaaggatattttcaatcgagctaaagcagtttgtgcacatcaataacaaattgcgaatacctgcagcaatttttagcaatctctaaccttaaccgaatgccacaaatttccggctcactcgcaatgaacttccgctcgacggatgacaacgcgtcaacagccagtgctgccaatgaactgccttcatttctttgttgccatcgccactcgcgagtcgctgcatttgcggagctggaggatagatatccccgggatccccgactcccacaggcagccaagtgaagttcaatgaaaatgccataacctttggaaagggcgattgccgcacctatgcaataaacgtgaactgcgtgcggcgggcgataaaaaccagagcccgtgacagcgagcactcactcacacggacactcttgatttgccaggcgacacacagataccatctgcagacgttgccccaaaagtgtgccacacaatatttgtcaattagggatcggataggtggggttatgccaaagacgactcacctcatcacagccagcgcagcggggcttcagcatttccgcatagtggcgctcgcagtagaccttgtcgtcgtggacgcagtaggtgaggtccacgagtagcgagttgcaggtgctgcaggtgaagcactttgggtgccacatcacgctctccacaaacttgggcgccgccacaactagctcgccggcggctatctcgttatcacagtgcgcacaatgctcatcgtagggggcatccttgatgtaggctattcaacaggaaaataatgcaaaacgcaattagttaggtcactctgggtgaggtcaggcaatttaaactaaagccattcgcaggcttgtcataatgtgtaatgcctaagttaattatgtgaaagagtgtatatattcgtttttagaatttactaaaaacatcaacacaatagttccaacttaattaaagatctagtcttacctatgtccagtgcgatttcgtttcgcgccgtcacaaagtcctcgaaggaagcctcgtgctgcacctccaggtgcttgcagtgctccagcgagaggtcctgtttgggcagctggtaagagatctgtcgctcccggctgcaggcgccttcgctgcccagccggggtaccatttcgtcgggcagctgctcgaagtagcggttgatgcgcgaggaggcacgcactccgggcggaacccacgtgaagcccagatcccgcgcctccactcccgaatccgccggagagaccaatttgaagccgagtcgctcatgcacgttggtagtctgttgctgatagatggcatgcgcctcgcgaggacatttgcaggactggcaggttttcctggaaattaagagggaaataaggtcgtttaatacattatactttatatacaatgtaacaacattgctgaagataatattaattcgaaaatattttatcaataaattccaaattcattccactgtgcgcagcttcgttatgcttcaacgtaagttcgcgtggcgccatccagcggcagctttgcgaacccggctattgccttacctcacgatgagatcgtatatttccttcctatcgaatactttgcagtagatactgagcacgttcaggcaggcgtagtccattcccgtccatgggacatccgaggaggccagtgccgcccacagtgggcactctgcgtgacggtccagatcgagcattttcaccattttacgccactttcaacagcactttgaactaagggtttttggctttatattcgcttcttctctttttttttattcctattactgttaccgtttgtcttaatgaacttgacttggctctcgtgggtttctgcttaaatatcttttcttattgcctgactcggcacaatttgtcggttcttctttggtgattcgcgctgccacctccacgaaaataagagaaactcgcaacttaggttaaatcacctttcattcggcacgtcggtgcgcgttatttgctcattgacattttgattaaagtgctaatttgacctttgttctgatagcatttgtttactatccaagaatttaattttacctctgcgcggtattctacggtctgggaatttctctaattgcttgtttacttatttttcaattagagatacaagcaaaataatcacaatcataaatacgcccacaccagtgaaattgtgcgtaggcccattaccagtatacagaaagataaattgcagattgtatagtaaatcggataaactaactaattttaaaatattatttatcagtcaaaggttcagaagagtattacaaaaataaaaaagaaggtctgatagaatgagctcacgattatggcatgcccgttggtctgacattcagcgaaaataaaaacggccaagcaatgaaataaaataaaaggtagaaaagcatcttttgataagattaataaaggtctctccccctatacacacacacacacacacacacacaggcacccagcaatcctgggttgggattggccataagtgtgtgtgtgtgtgtgatgtcatcggggggagctgaaaacgaaaaactccaagcccaaaaccgaaattgccaaattccatttgctcaatcatcgacggaggccaaactgcgttagcgttcaaaataagataagccgatgtgagttcttccacctaaatgctatcaaatggaaacagggactggtgattgtccaaatggctatgtggaacggaaaacggagggtatatggtatcgaaatgccagctgtccttttatggacttgtctggaaaatgaggaactgtttgctaattgctcacgactttgatgcggaaaagtgcaacaggttttgcctatgcttttgctggcacgaggagacctgggagaaggtaatgcaaataaattgaataatttaatgcaattgcagctgagtcatgtttctgtgacacacaaagtcaaggttctcgcaagatctagatatatatcgtgttatgtttacatttgaagtccatagaaatgaagcatactctataattaagggggccactcagaataacatgttgataagattcggctgacacattttacacggagggtggaatcattttggcttacgcagttatctttataatatttatcagtaaattctagattgaggaagcattaaatgaaaataattgttgatttgcggtatgctattacggtttcattaattttttaatatatttgctttcccccaaagcataaaaatcataagatgtataagttaaatcgtaagtattgcttaatagatacttttatatcaaacaaatatgtgcatatgtagattgaaacatccgacgtgattacaagcccctcagaaaattgatacaaatcgattttaatttaaagcaaacgaaaataaaagggagacaagacttaaccaaaaaatccctccccgaatgaatgtcattttcgtaattgatgtagaaacaaattcaatttgacagatttccaagtacaagatagatcacacgggcagaggctatatttaaatattcaagtgaatttagaatgcccgcagctgtatggggagctcacatctctggatttcaatgctttttgggaccttgaggaacacatttgtttgcccagcgacagcttataatgcaccaatgcgtgccgggccatatgtgctaatatggtctatattgaatgactcctgttctcgcgacttttctttattcgcctttaaaacagactttgtatctccctgtttgctatcagtcttcagcggagagaagatgcgcagtgttatcgcagaataaacaattaaaatgtcattaaaacgtgttcatttcagattagaaccttctctgtgacaaggcttttttgtcacatcgaacagaacagacgcgaaaaagcgaacgcaatgcgtttttaacatctggcaaagattttcatttaattgaaatgggcaacatggagcaatggcaatggaaatggcataaaaaacgcttcataatataataataactgatatcgtatggtgtacaatcaacagaaatgcgtatgacaaacaaataaaactagtttcggggctgaaacttttgccagataaatgtaattaaaagccaaaagtttgctacagtgcgaggcataacggattggtactttgaaacttttaatgagccaattaaggaaactctataaaagatttagaaaattaagtttgcagggaattcaaatctataatcgaatagtgtttattattatagtaaactaatgacaaactaaacaacaaaaatcttttaatttttgatacactccattttagtcggaaagttgtcacttcagcacttttaacgagatctgggatttgtttaggctgtgtctggtacatggccttatggtttcgtcaagcactgtatcctgaaaccaaactctcacactctcgcacagatagacagtcaaactcggcgacaacttttcttgttaggccccgcagcatttcgcgatgggcgtggagctgggggtggaagcagcatgtaggtgtaggtaacccggacccacaattacaattgataagccccaaagtcactttcgtttatagaggcaagcggcgtgcggcaaccgcaattggaaaacttttggggctatgcgcccacccaaacccaatcgctatatcctattcagtatatagtatcgccctgtttcggctagagagcaatcagcattgtttgaccaacaatttgtttgccacctaccgaaaagcgaagctcaagcgctaagaccatcccagccagccagagagcttttccgcagcgaggaaatccaattttccgcagtaattgcacttacatgttgccgctgtaaacaataaacaataaaagcgctcggataaaagtcaacgctggagtgcaacaaatctcaattatgagctgtggtccgtcttttatcaccccccacctgctttataccgcccactcccacccacttaacccacaatgtgggacagggcggggtggggaaagttctctttttgctttcgattaaacgacttttaatgcgattaccccaacaacaacagaacaatgcactttactgttggacgctcagattgccctatatatttatatagttatagtagagctgcattgccccacacttctagatgcacagagaacaaattggaacaatgagacacactaaaacaaactaaagatgtaattttgcattaaaatcaccttattaagttatttaacgtgacatttattcttaatcctatgcgaatattcaaaccaccttataaaatgatttcttttttattgttcttttttgtgcataagtgtactttttccctgtgcacccgtaaatatgggttatgtgcgtatggctaccgctaattgaatcagtgagtagtattaccccctccactcgcctcatctaaaaggtttaccccactatcggtgggcaggtgggataattaacatatgcactacaggatgcacaagccccttttgcactctacccccccccccccccactgacaaccccacttcctatatttcccataaccgaggggcagcttagttgatatttacgagcacggggttgtacggaaagttgttggggctgcccgacggaaagcagatagaatattctttagcaacaaattgcatagtgaattatttcaaccttgcggggttcccacagagatgaaccgcaaatgtcactgcataaatcacgactaaaccaatttctaaagggccacataggaatagtaaaaagaaaattccaataaaatgcataaaagaaaagttagctgagtaactatctcagcaattccccataattataattgactttactggaagagatactttctttataatttacttgtgaaatcgaaataccataaagtaatttgaaaattcgaaatccgtagttttaatgggtcgctaacctggcatccagatagcacttacgtagataacataacgtcatagaaaactgataactctgtttttccaatccgcctgcattgcttcgaagagaacccagtatcaatctgaccgatcggagggcaaacacctcattacccagttattctgtttgctcgacttaacaccgttaatactcagtaatttattatgatttatagtatgtgagttagatgatagctcacaatcatcttcactttattgtctcatcaatctagcgcgaataggctgacccagaaatctggatcagtggaattgtagaaatgtcgtcgaatttccgggaactattatggggcttaagatccccaatcccatcgcattaatttttatcactcagcactgatgcaaaaattgtctggaggttacagttccgcgaaatctggtcacaatgtgttacaaaattgagaaaagcgcaatgggccgtgaaaagggaaaaaggaaaaaacaaatgtcagtgtgtgggataagattttaaaataggtgggagtgtaatccaaaagctgactcattctcgggacaagtgaaaaatgaataatccacaggaatatttctttcaaaaattcctctctgcactgggatatattttgattccggcaattgacatttgcatttttccgtaataataataataataataaagcaaccagagaccgcacaacaaaatgtaaacaaatcgtggcgatttgtttttgtttacgattcaaataaatgttaaacacttcagatcgagcaaatataagcgcaccgacgtcactcccccgccaagtcaatggcccagtcccgaggtgagaatacggaaaaatgtgcaattaaatttaattcaatttattttaaatttattccacaacactgccaaccgactgggaaaacgcatgcgaatcgcgcgcaaatcgcggggaataaacgccgccgccgacaaccacaccgttaagcagaccaattctaactgaactctgctgcgtcggcgtcgctgtctgcgcgcaccgttcggcagccgaagtagcggcccgaagcccagcataaaagcccgaagctgccgaacgaagaaagcgcgctgcgctgcagagagagcgggtggttgggttgccgttggtcaggggagtgctccaaaaggtgtgcgataatggcaccgcacaagtgtgtgctctgctgcatccaaagggctagggagggggagtgggagtgcgagaaggggggcgcaagagagccgcaagaaccgcttattagcaatgcattgcgttgcttttttatggccctcttcattagcacacacacacgtgcaagggtagtgacaatgtggtgggagtagcaactccagcactgagagaaacgccataatagttcaaatttgaaggttaattcaaaagaagattagtgtttgattctaagaactttatttctttctgccatttcatgagttacttaagccatttttatctaatcacactataaaacaaatatacataattttcacagtgtgccactaacctaagctaacgagtccaacaggtagcgcgcttggctggcgaagcgcttagatagtgggtttttcgggggaatagcagtaagttggaagtaaatgactggagggtaaggtaaggtaattccggcaaattaatggccatcgctccctgcacttattactcgaaatgtaaaccaagcatatgcaccttctgccttccgcccctcggcaggcggtcaaggtcgtattggatgaccgacctccgcagcagttgccccagccatttatcaaaagcgtctgcgacatttttccacactttgactttgattgccacatgtagcagtgcgcagacatgaaacaaattccgaactgcaattatttataaccaaagaactagaaccaactagctaaaaggccaactgtcgctgggcagggaaggcgggataagctggacaaaatccatacagacagcgcaaatgggccataaaaaatcaaaggacgttgccaagaggggatctcttagggaaggaagaaactgtatttaaaacaatactataacaagcatgtaagttaaggaatatatctaattatccaacaactcaaggtttcttaagctgactgaagtttctgtaaagaaatcatttatttcatatcggaatttaaaagaataaccaaaagtttcgtttcacctcatagtttacttggtaacacacacattttcgaaaagaaccaaagttgtactaactctttatttatttgttcttagaacatatcttgattagaccgcaaaatgttattaaatcatttacccgatgttttcaaaaacaacaccccttctcgcctagctactttgggctacgcaactgttttaataatattattatgccattggattcgctttgctcgccactgctagcagcacttggtcaaatttgtatatttgcactaaaaatacacaaagcctttgagtgagtgggtggttggtgtgcccagaggcgggtgtgaggcggagtagagggatccgtttgattggtgtggccaagtgttttcattcatggcgcacgagcacgaagagagtcaacacacccattgccatctctgtcactgtgctggctgtaatttatgaagattttttgcctcgcttaatcgtaaattttaatgattaatttcgtaaattgtacaataaaatcaggcatctaatgtgcgctcactgacgtctgtatctgcgtgcatgtttgtatctctatctgggcaagattgatgaccatcgcctggcaaagttcaagttccagtttgaaaccacttaattagaggctcacaaaagtccaggctccagacacatccaggtagtttgtgccgtgtcgccgcaatgtctgtcaacttgataagcagccgcattaagtgtatccacatccacaaccacaaccacacacgacctgtctcgcagatacaaagatacactggcgaaatgcaaaacgtgactttggcgaggcagctgattaatggacacgcagactagcccagctaaaatcgaccaactgccggaacaacccggcagtgcatagccaatgtttttaatgtatctggataatgtatcttcttttggcagcacatcgattacggctaaatatccgtatcttttaaatgcacgtccacgtgctattatcgcaagatattgagcttttgttgtaagactgcatgtatagagatctatggtgacagataggcaattaatgtgttgtgatttattattattttttaacattccagacaattcttaaatgcacaatttacgctttcgtcgcatagagtgttataaagttgggtaaaacagcttaagattagctttctcaataaaaactacttatttaataagaggatatataaacagcagtcattaaaaataaattgagagcaaacccttttaattggttcatatcaattcttttgaataaatatacacccgcatgaggtccattctgatttcccattcaaaagccaatatgaagtgcacatgcagatgcaattgggcataattcagcccatttatcattggcacccggggccaggtgaacagctgtggggaaaccggtttgtttgtttgtttgtttattaacccaaccatcagaggcacctttgatgcacgagcctgtcgtttgttgcttttaattacacgaacaggcaaaaacagccaaaaggaaattacattacatttcccccgttgtgggggggaaaaaagagatacagatgctgtagatacatgtatctgccggctacatttggctgttgtcgccggccgcagatgtaaatggctctagcggccaagcattaaggccatctttctacatctgaggcatttttgcagcgtgttcggggcgcgtaacccctctaaaaaaggtggctacaaatgctgtcttactttttattggtatgtatatttatttatttctgtacacatatatattttttaggctttgacgtttgctttgattcgtggaaattcacgttaatgctaccgtcacattaagtaaacacacaaatttcccaatgtttattattgctccaagtacaatgatcattcgtcactatttcgacttttgcgttagcctctggccggcaaatgttttaaattgctttgttgtcaaaaatgtgtttctctaatcgcctttcggctgaaaaggcatctcacgtggggcacgggttatttatgggtaagatctcgtggattttgcataacccatttgtagttttttcgagtagaaagttgggtcagtggaaagttctgaagaacatagaaatctacattttttcgacagctttatttagaacttaagtgtaacatgtaaataaagaaatgtttttaatcaaccaatttgtatctaggagttatcaggaataaatttatcttcaaatcgcttggaaaaatgttagaaaaaatgtagatacgtaattataattatttaagacggttttttaatttgatttggctccctcagcacacactttgcgccggttaaatgggatactattaaaatctgataccgcaatgtgtgaacttatgcaaaacagcagtcgaggaatgaaaagagaagatgccaaagtcaaattggaatttatttaagtttttgttgttcttggccttttcagcccgaggcgagtgccgaaagattgatgcccaattaaaatactttgtgggccgcggggcacaatccattagccgataattaccgcctcgataactcataaacagctgacccggcagaaccccagttcccccattcttctgcccccactttacccgtttcccgtttttcacatgctcaccgttgttccggacacttggcggtgttttccgacgtggtcgtgaccatggccgtggactttttccgccgaatggccatgtggcgttcgcgggtgggaaacttaggctgcttcttcaccactttcggctgcacttggaagtcgtcgcatggacacaccttcaacagcatattgtccacagagttcaacttcagtttcagctaacgacttcggcacgcaacttaaaaacattcagcaactctggctgtcaaaatcgttttcagtttggtggctttgagcagcgggcttcacaactttaaggtcgttttcagatgagcacattgcacaaataattgggtacgcaataattttaatttggtttcaacttttttgcttttaaaacatagccgtatgtactttatttctagatatatttaagatttcttatactttaagtttgtggaagcttttcggcctttcttagaatacacctcagtgggtttttaacgattatctcacttcttgcgtatttgggtatataatatggcttgagaccactgttgcactctatatttttgaacagactgttgcccgcaagagatttcgattttgatacgcacaattgacgtttaggcaaacaatcgccgtggaaatgagcgcacttttaaacgcgataaggtgacggtgctgacacatcgcgtgctcttttccccacagcctcgtatttttttacaatattttcttttttgaaattcaacttgaatattcattcgctctctgtgggacagaccgatcgtgcgggcaactgagtaacaactgttttagcagttaaacaatgcaatttgagctcgtctctgagcacgaaaaataaaatacaaaaaaaaaagacacaaataaatcgacaaactcaaaacgagcacgcagctgttagagagatcgtcaatgcataatatacgcaaatacaaacacgagcttaagctatattcatatacatatatatgtacatatgtatatatgtgcatatgcaaactgattgtcagtcggtcattcagtcagttagtcaatgtcggtcttcgttgctcaagcataagccctaaaaaataagagacataaaaaactgcacgcgtcgctcgacagcttgaacttgaactgaacccagcaaattgatgtagcaaccacatggcaatcgcaatcgcaatcgcaatcgtcaatcttcaatcttgtttggcaatcaattcaatctgaatctccagggcggacaaacaaatgtgcggtgaaccctttgggtgaatttatagaaatttaagtcaaggtctttctttaattgccaactaattgccgctgcaacgaaatgaaatcgagttacaacgaggcgaaggggaaacaaggggttaatgtacgcacttgggcatgaaaacaattatttacttagtcaattatctccgtgtactgagattaataattaacacctttttgccatcattattgcacaattaaaataatggtttaattgtccaatcaaatacaatctcaactttttccagtgcaaattacactgctatttattgaagcgataaagcatagtagtgcattctagcattatctttcacgattttctttttatatttataaaaccgaatcactgcccttaataattctcattgagccataatatcctgaagtgcgtgttcccacataataaattgttctcccacgatacggtttgatctatgttttcatcaaatgaatttgataacatggtcattaaaaattgcctacgttttaattataaatagaaaatttccgaatatcgtttttatagttcttgtgatttgagtatgtgtgtataaaatgctctgttgaagaaattttaattttaatttactaccccacaaaaaaattcacataaagacataaatcccaaagccaaaaacagatattttagctgcttttagcaaataatactttttaaatgccaaaagcaaaccaatccaatcatgccgtatttaagtaattgtacaatagaaaacacgaattagaggtaaacataactatggtggaatactctttcttttttttttaaagattttatatcaaagaaagtatttaattgttgctcaagcaatctacaacaaaatgaaatcatattttcatttatgttaccttttatttttggcttttaaaccaactattgcgataagcgtatgacccttaaagtgtatcacgtatacgccccgtatatcatcaaatggaattggcgtgcggccagcatcaaaatgaaaacacaaatagaaaacacaaccgcagttagacaaaaagagacgccggacagacagtcggacattcggttcagttcacaaattaatggcgtaatttgaaatggtttttgtggttgggcgcaggagcaaacgaaatggctaagtgtttggccaattgtcgattcccgatttgcgtatatatatacatacataacaaacatatatggagcattataaaatgcggcatataattgcataattcatgctagtggaattaaactagttccgcatggcttactatttggctttcgcaaatatcaatgataaatagtgaaaataatcagaggagctaatatttatttggttcgcggccacaaggcgagcaataaattaacgctgcggccccagtcattatccacattgcacattgcaccgatgtcatcgattctaatacatatgtatatatccatatatatatttcattgagggaatatatggaggcgctgccaaatcgcctttgccaccgtcttgcggtttttggttcattttctatcttggcttttatgaaccacaagattgtaggtgatttgttcttgcctttttctcgatttcctgctgcttgcgaggaggattctctgtttttggcaccgctgacgcataatttatttatcgagacacacgaatgcagagccaagcacaggaaaatgatctttaaatgttctctttaattcatttcaaattaatatattggagtcttctttttaaacaatgcgctcactttgttgtatcttatagatttgttgatttttactttgtttgttaagttgcttacgaaactacagaccgatccatctagcggccattcctgcaactaatcttatcaagcagtaaagcttttcagtgagctttacagtgaaggcacaaaaagttggcagaccttgaggggcgatgtgttctttttgctaaaataaagcaatcttgaattgaatctaagagacatttttgctgagtagccaagaaaacgcattacaaattttaaaaaaatttaaaccgggaactattgtaaaggattaactgatattttcaaaaatgcattcgaacttcttgcttgaaaatattgtagattatattcaaaggtgatgatttcttacctccaatcgtgcgctgcaaagcctgggcaatctgatttacattgctcacaccgtactccatcttccacctctcttataatggcaccctgaaaaagagcaaaaaaaaaatttaattactcaggaactaaccataattatgtatcgaaaataattattgcacgtcagcaacacagaagacactgaaaaaagttttccacaatgtctttatgatttaagttaataatttacgtttttaattgtattattcctgcgatagttacatatttattttttgggtgatttaggtaaacatattaaatattttgaatatgatgcgaatcatgattgcagcgttttataaatgttataaattaaaacgaaaaaattaatatgaattttttttgatgcaacccaacgtagcaatgtgtttaagtgcatcctgtcctaaatatcccttctacttcaacaaataattcaaatgcattaagataattatacttttttactattcaagattattattgcacccagccaacatgcattatgtacttcgagaaactacccccatttaatacattaaaaaaacatgctaaaatgcgaaataaaaaaccagggcgcccagacaaaaccgatttacgattgtacatcttaatttgtgccctgctcatttacgcgccattgcgccaaacaatgccatgtacttctgttctggccgtatctgaaatgaaattgccggactccggatgcaaatgcatggaaatcgctgttggccagctgccggggagccaaagaaaagcgccggcacatgccagaagttaagcccagtcagagggggcgggggacggggggtatgcatatgtttgtggcagtggcagcttcagttgcagttgcagttgctgccgcgaatcggatgttgatgttgcagttgccggcgtggatgttgcacttgttccaaaaatacacgccgaaccaagacaagccgacaaacaaaacagcaaaacagaaattgcacttggcacgcttccatttttggccaaacttgccttttgcctttgtgccgagttcgaggactgcagtaaaaattgttttgcttcctttgctttcgaactatggctatatgtaatccttaacgcttgccaataaacacaagacttgacttttcattgctttgacccgggcacattaatattcaggatgtctagagctgcccacagtgcactcgaattggtcatataggtaggtagaataaaaggaatatcatatttgttggtttttgaaaatctttattagcaacttgaaacatataaattgaaaacagaggagatatcgcagaactatctaactatctatcatataatctaaatcataatctaaaactttattaccatctgataatcttttagggcaggctttaatatttatgcatgacacataaaactaggtatctaatattcgggcagggacattacatcaattttttttttttggcattttaaggcagaactgccatttgggtgacatcgaatccatcgctggcagcgataattgtgacacgtcgctggccaaaaatcgatgctgacccagttcaaagcggcggaataaagtgccggggagacaatggaagggggcggggggataaggactagggacgaggattcgaggggtcgagggtactacgattcgagggcagcgtagacatagacagggcaaacatttgcgcccgatgcgcggatattattggcattaagttgcaacttggcccgctgttcggcaaatgtttgatttccacttaggcgggtcgccgctttgtcttccgctttgactttgtgctgccttttttttttgttatttggctgtgtgcaaagattaatgtgtctccaattaaacgaatgggtatgtcaataaatccatgatggcgaaactttcacaaaatgttatggcgctgtaattcgatattaaacacatttcacccagtcggatttaatgtaatgcctagattatcatccaatttgtattcctccttcaaaatctcatccgaatttatgatctcatgtgccgtcttgtcgtctgtgaaccaatttcattttaattaccataatctctagtataaataaacatgagctgacttcggtttcgcgatacgagaaatattatgctgcaattgccatttttgggcgcgcagtcatgtaaaaatttagcgcatacaaatctggctctaatggtggtcagtccagttctgatatgcccacgcacttggggactcccactcggtggcggcaaaactctggcacagccaagcgaaatttatagcaaaatatcgaaaaataaacaaaactgaatcaaagttcgttcagccaccacattttcgaacaatgacgctatgccaccggctgttgactgtttgtctgcagtaaaatgagagtgatatggttacatttaaactcaaagatagtttacctaaacttacagataatagaaattgtaaaacaaattattagtaagacaaaactaccaaatagaaatcattgaaagcctaaatatcacgcatacgcaatgttgacattttccataatttattttagtcaaatattgaatatttaaataattatttttatataaacttcagttgtatttattaaattccacgaatttaggtataaatacagcactaaattaaacattggaacagaaatcttaatctccacttttgtcatacttactgatttttccttagttatcacattttatgacaattcaaaataccttaaccgaaaaaaccgctacagggtactaaaatccgtaggtcgtcgtctcagttggcggtatcaacagcaaaaaaactgaaaaccggtcctcggttacttggaattgaatctatgcgtagtacatagtatatcttttaaagcgcaagcaacagaacagtaagtgtttgttcattgcaaaacacaacccaaataaaaaagagacagacccgaaaaaaaaagccgacacacttaagtaaagtaccgaaaatacaagccaaattaacaaattcacagacggaacaagtggagtttttggggactgagttgagggaacctccgacccaacgatcacgaattagcccgatgctatttactggcgatgatgatgattcaaagtctaaattcaacctgtttgtagacccacgcaaaactaaaaaaaaaataaaaagcgccaagactccagccgtattagcaaggttaatctgcgtattagcttacattgcaaacatagtgattttcacactctagttcacattaacgcaactcgaaatctggccaaacaaagtgcgtctcgccaactgagactaatttagttcaagctcatgcctagatccgagcaaaaactgaagctgtagttgcactgaccaaagatgtctctacgatcttgccacttaaaagagcttttgggcagagactagtcttttgctggcctcgttggcctgccagattagaaagtgaaatgtgcgcagagttaatctgaagttagactggggcaatgatccactaattagcgaatagccaaaagacggatgcggtcagcgaaatcgctgcttgtgcggtggccatttcgcgtttaagaaggagttttaaataaatgaaacctggttctaatattttgttttataaagccccgcgaaacaatagtctagtactagcaatgagattagatcgaatcctattcactgaatgacaaataatgaaaattgattttgtcatcaaaacaatacagttaagatggggtaaggagctttcagttctcagcttttaaaataactacattgtcttattttaggtttactttaagatagtctttttaagaagagcatagaaaggccgttgacattagtttaagctttagtgtattgacttggtgaaaggaaatttattctaaaacatagtttagtatttcaggcattctattgttaatagcagcatccgaaacattaatatctaagattttatttttaatgaattattaaaatttatataagtatttattattaagaccgagtgtcattttggtattaaggtgcaccggttaagtacaaattttgagaagcgcagagaaggcatctagtcataaatgagttcttttctatgggaattcccagtttgaaatagaaagaatttgaatgtttgtttggttgcattcgtagaatgaaaataaggagaagcgcatggatagacggctgacatcaccagcgcctcttgttttggtttgggggaaagacaatttattccataatttgcctgcgagtacaaatacatattctcagcccaaatatggccaagagctcatcagctgctttctaactagaaaatcccctcaccccgcccatcagaccaatcgagtgaccatattaaatgcttgtcacgtaacactggctcattttcatgcacgttagtcatagagagactcatagctatatgttcgcatatccatccatctgttactatacattgatagcactaatgtatatctagcaagttcagagcactctttttgggggcaactcaaaactgacagttaacactctgtactataataagtcccgagtgctttttggagttcgccgaagccatttaatcgtaaaaaaaatcccccgctgggtctcacattttgcattatctgtttgtcgtttatttttgtatttacttaaaaataattttacgtagaaaaagttcacaacacacgatacgaattgttcggactgatggggctacataaatcatttatttgcccattatcggaggggcacaaacaacgttggcaaagctgagctcccagctctgataatgacgcaacttcgacgactttgtcactttggaaagaacagctatatatgtcatccactcattcttgattctcgattggcaatatgacatacacatatctctatataagatattcggttaacgcctaccgccagggcattttgatcggcgaacggttgcgtcgtggcacgggggcggccatgtgggcggtggtgctgttggcgatgcttctgttgctggtggtggcgttggtggtggtggtggcacgtgtcattggtggttcgcgacgccccagataaacggtgggtccaccagtggatgctgatcgcgggccgggcttaacaggtgcattgtagtggccgccaaagtaggtcgttgcctgtggtctactctgtggtttattgtcatacagctggattcttgttggcgccctgcctcgggttggtggcgtcatggtcttactctggtcggatacaatgtgcaccagggttcgtcctcccttttgctgctggctgaggtggctgggctggtgctggtgctgctgctgctggtgacccacactcaaccgggtgggtgagttctgctggcggtaccatcgagagccctggttttgacttggactggggctcatgctggttctattcgcgagcagtctttgcgcatagtactccgtggtgggcatgggcttggccacgcccacgggcacaaatctgcccggagaatgcggtgatatggagttcttgatctcgatgcgaatggagggagcaggtgtgggtgtcggcgatggcgacatatgacgcactgagggttgcgtgacccggaaagtttcgttgcgtttcaccggagaacgggtggcggaacgagagggacgatcccggagtggagaacgcgactgagggcggtagttatcattgtcgaagaccaggaaatcgggacggttctccttggactcgcgacgttccagaggtttcgtggttgttggctggccgggaacttccacaaaccaggcgggattgtggggcgtttccttctgctgctgcagcaagcggtccctgaaggacttcctaaagctatttagggtgactgtcttgtacttctcacgctcatcctcctcccgctgctgatcctccagcagatcgtcgttggagtgggttttaagctgctccagctgctctcgcaaatgcgtgggagttttgctcttacggtaggtggatgaatcaaagctgccactggaagtggaaccaatgctggcctgccggtggataccactggaatcacccgtttgcagggccctcagattggagtgctgctcgtaaaggaagttaaacggatccgactgggcatcgtagtcctgcagacggtccgctccatcgctgcgccacttgtagtacgtattcgtggccgtgtcactgggatgatgctcatagctggccacttcctcgggcgacggagtcttcttgcgcttggtgaaggtgctgaatttgctaaagaccttggacttcttcgactttttctccagagtggaggtgttcgacgaaggtggcgcctcctcttccgaattgggcattataaaggtatcaccgcgctgcaaagttgagctcgtagtcgagtcccggcgactggtaactcccacggatcccacgccgctgatcacgctgcctggacgagatccggagcgtaccggtgtcgtatcgcgggatgaggagcgggagcttttggcccgcgacgacgaggagagggaggagcgtatattgcgaaaaaacgacatcactagatggtgatcttcgctctctgtctctccgcaatctcgatctcggatctgggctaattaaccttggcgagcgacgggccaaaaaaaatcacgatccacgatcgctgatccacgaaccgacgctgtcaactgccgctgagcaactgagcgcccaacttcagttattacgcggatcactagaatttctacccgctcgcttgccgtctctttcgaatgaactgtcgccgtctctcttgccgtgtggcatcgagcttcgacattcgactttgctcgattcgtttgttttgaccaatttagcgtattaacttcatcatcgcgttccacacgctttgagccgcttgtattatgttatattatggctatatatgcgttcagcaccagctgagtgcgtgggtgtaaccagtaccacactcacatacccacaccgatattatgtaaattagcccttttccacaccgtagttggggcaaaacgttactttcgtaatttatgcaacggaaatcgctctaattagccatcgcagacgagcatcaacagctcatttaacaaattagcgtttacaccggcatgctaacatcaccgcaatcaatagaactcgactacgattcaatcgatactcgataatgagatacccagtaaaaatggttcacatataactacagattctctaaccaatttggagcttagcgtatgtatcaattatcgtgtagcattgcataattatattaaataacaataatatatttactagaaatatttctgtcataatcaatggaacagaatatggctgacttgccaatagtataaaatatcgtaaataaaatgtaaataaataaaagtttgaattaatgttttcgaaatataaaatatatttaatgcaagctcaacattctccaagtgccatatagaatttaattctccttaattccttattgaacattaggttcatccacctatttagatctatagaaaataaaggataggctttacgtcttatatggataccgagcttatatggctaccaatcagtttgttgcccttcctgttgcaagatctcatagccgccttatacgctccactttgtgattttccaactaccgggtgtcaagtcgacaatagacaagcgacgcaacaaagacgacacctgagctcaggtgtttgggcaatgctttgtttgaagaggtgagcgttctacgatcagatttgattttgacggagctgatcaaacgcgaatgcgacgatgacggtgagtaaaaagatgatggggggtgaccagaccagacattgtctctttgtttgtgcctaatgagcggcttcagccacggagatcgagtggcgtgtgtgtgggggtttttttttaccatattttatcgctttttggtggcactttaatttgcttcgcttccgatttctcactttatgcgagtcatttgattgtatcggcgtatctgtgaaattcgctgttcgggctgttcaatgacgttcaatgcagcagatggctggcaattaaagcatgcatattttaagcacttaacaactgtccatgtgttttcacatatgaacatacatatgtatatgtaagtacaataggatccctgggaatttaaggacaaaagactgtgaggctcggcggtcccagttggctcgtaaatcagttgctgaattatttgccggttttccaaatttaatctcctttaatttggaattcaggcaggtttgctcttgcacaattgcctacttttaggctcaactcatggaaccgtgcagctgctgcctgaaagtaggcaatgaaccagaaagctacacacaccaaacgccaaataaaataaaatggtttttactcatgtgtgtgtttgtaattttacagaattttcataatttttcaactaattaaatatatatttcttccaatttagtaagttctaggtaataaaaaagtaatggtgtaatgtttttaccttttttatattttataaatataatatattttttatataatataaatatgtctttaaattcagtaattgtaaatatattatcacttggttgcttagaagttaaatctcgctgtacttttcagcaacaattaaatacatgtttgtaaatatttacataaagccataccaaaccgaatgttttacaaggtaaactcaaaacaaaccctttaaattattatattactattttcgatatattaacacttaataaattgaataaatgtcttcgattcgcgtaatttccctcctgcgtctcacttattttattcaattgtttaaaccccaagagtactgtgcacgttccgcagagcaaatacttttgactgttaacacaaaaatacgtttggactggggtaatctaaaatcgcagcgggacgccgaagaagaagaagtggggctaggaaaatcttggggcaggggaaagttcacgccattcgcagaatcatgagccagcatcttccccacataaacactgctcagccagcaaagcagccgaggttgtggcaatcgcatcagcaggcgagagaataaaagaacagaaccgaacagaagacttgccacttgccacatgccacatacaaatgtacatccgtggttgccaaattgggtgccaccctacgggctccaccttctgccgcacaagaaatattgctgcgccaaaatgtttattgtgaaaagattaataaaatatgtaggactgcagattggcagaggaaacaaatctaaacttcaatgaatattaaatgctagggacatattactcatacaacccgttgtctgcgtatgaagattatgaattaatcatttaaaatatgattcttgggggatgattcctcatttcctaaatgccttattctaaacataaacatcaaagcatttggtatttttggcttgaggtaggcttaccagaatagagaggaaaaaatggaataatgaacttaaaacatttttaatatttattgctcgtgtgcgaaataaatcacttgaagaggcaaatcaacgcagcatagtggagaaaaaccaaatgattaatcatgaggtcaattcccagagtagtttcagttgtttataaaacggcttaaatgcaaatgcctttaaaaaaaaaaaacttggtatgttgttcagtgctcgatcaagtgaattatccatttcctgggaattgcgttcttcgcttatttaaaattaaaaaacccatgatatcagtcggatggagaataaattatatttatttgattgcgttgctcgatataaaacatcttcatctttgatttagacatgtaaccgattaaaaatgcaatactccctcaattttatgaatattttcccgataagcaaatcaatatttgcataaataaatgggtataatgacccaagagactcaaccatgtatatatggatgatttgatggtttatttgcaccagcgaaatggccaatgggcacatgtccactggacaaatgcattgtgtgcacagtatcaagtatagagatccatgtctgtgtgtctatatgacctaccatacaatatttatcagctattaagtcatgcacaaacccagatacgcacacccatacattggtggggggatccaatgccaacgacaacaatatcaggctaaataaaaaataaaaagcagtgtaatggccacaaataagccaaattatgggtgggtgttgaaagtgaaatatggtgaattgtgaattgcgaattgtaataagtgtgcacatttagcacaattaaaaattaacacacacacacgcatactacaaatgccgagcatggagatcgcatcggggcaatataatcgaaacagaaatcaaacaaaacgacgccttggtcaaaatgccggctcttaaggaagtgggcgagcgtgtttttacagttatagagcacacacagctgctccaatccaatgcctacctatcttggccacttaaacgctgggggctcggagatattggcaaggggtttagccatggcgtcaacagaaacaccatgcacttgaagcaataactttaattatttgatagagataattattatagattatttaatagagaaataactttaattatttgatataaaccaattaactcattctgggcaaaatgaagttgaacatttaacaagctaaatttattttacttttgtgttttctatctacagaatgctcttttttcctgtttctagtacataaatattctacatatatactcgtagatgtttgatcgtgtaaacaaaacaatttggcaactacatacatatgtacatatgttgcatctatcagcaaacgtcacatttttctttcagtgcagtaaacgtgaccggttgccggcaggcaatgtacaacaacaagaccaaatacaagagaccgcgactcaagaaaatgcctggggatgcaaagaggaagaaaagtagaccatcaacacgagtgcgagtccgagtacgagtatgagtatgagtatgagtacacggtccatccaaaactcacatgcgatacctaacattcgggcacacacataagcgctgcttgaatgccaccacacacaagatccacagacggggtcaccaaaatgggaaaagttgtaatttacatggtttttttatatcatctgctatattttgttgtgcaactaaaaactccgatttgacttgggtttatttgggctttaatcgaatattattgacttagtaatatacaaatctcatttcagtgataacattgaagtcattaatagactcattccaaaaccaagaaaatgtaaacatatgtagatggtaaaaatatgatatcactttgttactttgttatcactttgaaacttaacaattacttgacaaatattttactacattaggtgctatttgtgtgaccccaactgtgtatacataaataggtgccaagtggaggcacgcatgacgcgagctttgcaaaactctgcgccaactataatagacatttgggttttgggtggctgggggattttgggtttggggaatggggagtggtgcaggtggagcggccccatgactgttttatttgaaaatttttggagaaaggccacatggttacgaggcagcgactgcagttgcattccaagttggggtaaagaccgcctccttattggctagtggcgaatgctaaacgatgacgtagagctttattttagaacaataaatggttcaggcgaagaacgtttacttaacacacttattcgagcataaaacaataaagagctggaaaaacagagaacccgtttcgccttcattgttatatgtggaacgtgtctttagcagattaaatcctgaagtcatatgcaaatattttactcttgaattccgatacactgccaatagtgagataagttctttgattattcattttaattattcccacacattgatagttgttttttttttttaattgcgcttcctgtcatacttaattaattaatacttaattccgtttttaagccgaaaaaggggaaacaaagcagcagcaatataaatataagccccttttgccttaggagattcattttacttgaaggggctcaatttccgatcggcatgcttttctccagcgatgacgtcaccatcgcttggctttaaagccaacacaaatattgactctaagcttaagatgtgatgacgagattcgaagggtaatgccggcttcgttgctacgtcgtcgtagcaatttgaattcgaaacgctcaaactggatttttggtggcctgtgaaatgttggctggtgcgaatgattgccaaaaaaattaaagccaaacaagctgacaaaaaaatatctactaaatacacctaatgcaaattctgaggttaccgcagttcagagccaaaaagcgaatcacacagccaatggcattgggcattaaagcaatttaaataaaacgccggtagttaagtcgaaattgatgtcgaaagtatatttgaatggaaaacgtctaagaatagacgaaacgagccgagcgtaaactttttgtgttaataacattttcgccagctgttccaaaataaacgaattaaagtccaaatcaattaaattaataataacaacattaaatgtgcgacacgcccaggcgttcgaaaaaaaaaaaaaacatgatgaagacaaaaagaggcagtggcagccgaaaatccggtaggtggatgactacctcctgccagatggaggatggcgtggcccaaaaaggcgatagcgtgccggtattccattgcgcaaacacagccatgtgatatgacagtgccacctggccatccccactgcccagcccagccaggtccgtggcacaccaccccggtttttgaaaggtgtgcaagatgatatcccacgcccaaaccctccaaaactcccccatttgccgttcacttcgcgccaccacaactttggacacaatgatagcactgtaaattcagagcatttggatctaaagacattcatacattcagcatactgttattaggttgaataatttcatctacgatcatatatgtactgcacttcccacgggtggttcatgtttcttaaaaacatttagtcttgaactacgtatttataattttgcaaaaaaaaatgtttagtttatatataattattataatataagccatactgctttccttacttttttagcacacaacaaattacttacaacagatttaagttttattgaagtgctgtttattcttagtgctattttcttcacctctgctgtgtgcacatctaacacgcccctgggaaatataacaaaggcacgcaacaatctacggaaagaccagaacggacaccggaatatgaccgatgataatgggggaatttgcgggacgggggacgcttttttggcgccctcccagccgaaattcaaaaatgtatttcaaggcgcgacggagagctccataatttgcagcttgaagccatttggccgccaattgacgggcaatgaaaactaataatgcaattaaaaacgttgacaaagttgtcaactgtcaggcggcagtaactagataccagttaccagtgggcaaaatgcgaattgccggattgccggactggcgcaactaactgacaagcgttggtcgcagttcgccaagtgcaaggttgttttttaaaacgcaaataatgccgagcgtagcgtctccaaatgcaaatatagtacataccacacagccactcatatgcacatatgtacgtttctatatatgtaacttcatagtatgtacatacatatatagccatatagcccggtatttggaaagccgcagagtgattgcctcgggtttcacagtgtcaaaataaaaagaacggagcataaactgactaaaaatgttgagggatgcaaggccaggcatccgaaaaacggcaaacagaatgcctctttgaaatcgttttatctaaaagcttttttttttgataatgatagtttgatagccctcagaaagcacttcaaaattccgctcttttagtcgatgaaatgctaataaattctttgattaatgtaagactatttatttaacatatataaactgtctttacacatacagtttaaaataaagattttcatagctgctcatcaaattgagatttagttaccgatttattcaataaagttagcaatcttatctcgtgttgttctatctgcgccaacccaaaagccacaaagtattcctgtttattgacatgtttattagataccgatcattattttgacagctatacgatacagcactggtaattctatatattaagatatcattatatgaataacgtatcttatggattctcaatggatacttatagcaaaaacgcaacatggacttgtgaacaaaattctttggggttggttcgtcagcataatgatgactcaggtctagtttttattccgccccaaacaggaaagcaaaagccactggttgataaattaagtggcgactataaagatcgcaatctaaccgaacaattataataaaagattcgccaccttctgaagcaattaagacaaagagctcgaacgatttaagaatcgagttaatcaaaatgtctgtgtcgtttttttgagtgcacagaaatggaaagtcagctgcaacaaagttggcgacacacaaagaaccaaagaacaagagcctccacatcccgaaaatgaagcaagaagggcgatgatgatgcaccagatgagtcagaaccaatctggaaatacgaaacaaatatcaaagggcaacttttccagggcctggcctatttttttggggaatacaaatgagtcagttccaggatgaacctgattgaacatctcgcaaagaagtgaagtatcccctaggtgaatcgaaatggaaaagaactttgcacttcaagtccaagctggactttggcagctaatgaaatgattatgctggccctacttattataattatgggacggctttttaatggaactcggattcggatggagaatctcgtcggctgatgatctcatcgattgcatcagatttcgcacggcatgtcgttttatgtggtccgcaattttgttctcgcttctgctcccccttttttgtgtctgcttttttttaatgtgcaaaagacatatgcagaatatacaaaattagctgttagcacgccaacagccaacgccatcaacttcacagagcgaatagcgctttttgaggcgagccagcgaataaaaaataaatgtttcatggtcaatgccatggaattggttgcattggaccctcacagttgactgacaatcgttgacagtccagatataaaatcgcataacatatataatgagccccagacacaggtaccctcaaaaaaaaaaaaaaaacacgaataaaaactatcattgcgtgtgtagcaaattgattgatctgcaccaaagttgttgccaactgttgcgaatcaatcaattgacgaaaatttcgagagcaagggaatcaggcacagatacaaagatactcttcatttacagctcatttgacatctccattcgaaacattcaaagcattcgaaagattcgaaaacattcctgtctggcgacagcttttgtgcgttccagatacaagccataaataatgcgatttgcatatgaatttgtaactgttcaacatctattagtttatgaatgcatcacgctctctgccgatcgactaaaaatccagttttaagcattccattttcgcctttaatgagacttccccacccaattcaacattgacctctacttaaagtctgagcggtgaattttgaatttgaattcgaacttgttgttgcagcaagtgtttttatttcgcgtgttttttttttttttgcatttcaagtgcctcgagtgacgtcagccgcaatgattacgaatcggagaatttacaaaggcaaaatactaagttatcaaaagcagcatgaaaagtattaaagtcatctattttgtccaattgtaaacagtttcattcgcctaaataacaacatttgccaaatatttgatttgcgttgttcgtaagatttattaaactatagcttaaagatacaattatcgcaaagattcaaatatttaaaaatgtatcttacaaaaacaaaccacttttatgcgtatttaaaacatttaaaccttttaggaagcaaacttattattcgtaacgctttttaaaacgaacgtgttaaggtcaatgcacaagttataagttatgttttttaagctatgcacttatgcaaataaggtgcataaatattttatttacacataaattgtcttcaaaattagctatgatttgctgatgataaggctcagacttggcttatagagatagaataatatcctgcttaaaacctatccactatttgtatcatacaatgaaagatagttttctaaaaccaaacgtttgccatccaaattcaatcttgcacttactaacaaacaaacaaaaaacacataatatctgtgcaccggctgagaacagcgattatggcttgccaacgatatcttatcaatgaaatttcagcacgttacgtaggccagggccaattttcgattcgattagtcagagccaagaataagaacagacgcggaaaagtaaagcggcccgatcggttggcacggaaacaaatggcggcaaaggtgatggagtaacggaaatcataatatagaacttaggtgaaacgattacgagagaaggctaagaagtcccgcagaagacagcgatgacagcgatatttatttggccgagcacatgtgtgtggttggtagtacaatcggatcgagtacgtatgtacatatatattttattgaacaaggcacagacaaacaaacaaggcaagactttaaggcaaaaaggccaatttgtttatgtgttttcccgcctgaacggcgacgtaacacatttgtggggtcgattaatggaaacacaggaagtttgggccaaaatcgatcggccctgctctttggccatatctctcctatatctatatctatagctatactttctatatttactatataccaactcaccttctcggcgaactcctcgcgcggacgacgcgaaatcgtcggtgtggcactcatgagttccttggtcggcgatggtgtcattatggcaattatatcttctgcctccgtcggttggctatcgcttatgaattgcacttgcggctttgggttctaggttctaggttctagttggaaaaactcactgggaaaacctattcgtattgctttcgtttggttgcactctattccctcggtatttcttcgggttttttttttgcactatttatgcggtagcttgcgtgctgcgaagtaaatttaatttataacaactctttatcagtcggcgaatttgttacgaattattacgtagccgttgaaaaatgtcgctggcgttaaactgtttttgccacctcgattcgcattttttttgcctttttttaattcccgctggaagcgatggtatttatgcaatggtcagcgatttgtgttgattattaaatttataaatcaacaatagttaacttaaaataataatttactttaatttaaatccattcctttactatattttctttacaacaataaatttttttaataagcgatgtaaccaaatattaaaaattcgattatctcataaaatcataattttgttaggcggatatcagactaatcacattgaaaacgtttgccatatttactgccaaccggatgactggaaagtgatttactttaattaaaatttatcacatatttatgataagtaaagtcgttagatttaaaaaggaaattgggcctgcgtgggtgtatttaaactggtatttactgtactcgcaatctgatttccataacagctaaggtaaaaaatttaaaataacaaaactctaatgagtctggaagtttggatcgtatgcaaagaatgttgtcattggactatttttagaaatagacgtcactaacaaaaacaaaaaaaggtgaaccagaacgcttccaaaagaatgtggttgttgttgttgttgctggcgaacgttgattgaccccgaatatgagaatgaggaagaagaagtagcagaagcaaagccggccggccaattaattgatttattctattcgattttccactatcttttactgcatttttttttatttgccccttcctctccaattcgaccttcagcgtactgcaattctaattggaattcaatttcaataagaagaagagcgaagaagcaacagtttgttgaaggagccgcacgcacacacacgcacatcagcgaaggcgcacgcacacatgcacacatttaagcgcggctcacacgcacaccggttaaacttgttatcggccgcatgcaagaacccaaaaactacagctacaacaacacaaaactctaggccaaaaacaagttctggaatatcagcaacaacaacaccgcactcgagtgttttattttgaaacacggctttttctcgctgttagtttattgcatttttgtggtaggtaatttagctaggagtaaaaagcaatgcacacacttaacactcacacacacaaagacagtcactcactcgttgccgcgcaaactaaaaacaaacgaaagtaaatcaacgtaaaaacgaaacgaacgcgatccgccgacgcgcttttggcttcagctttggctttcaaaacactgcgaaaaatacgaatgttgcggctgttggccagtgtgaacgtagctggctaaagtagaaataccaaaagtaccaggcacaactgaaaaataccaaagtgaaacgggatttcgaaagacgactgtgttaataccctttaaaagtaaaagcttatagatattcttaattatagatgccatattctatgaaacaaaaaatatgttacgctcctatttatttcaattaaaaaatataaaggatttaaaaaaaaaatggaacatttatctgtgagaaagcattgaaaccaactaaagaaaaacatttattttttactaataaaatgaacgcttggcgtgcatcaattcgtttattgtgattggcactggtaaacaagtgattccgcgtaactaactccctgcgttcgtctgctccacggcacgtatttgctcctggagctcctggatatgctgctcgaacttctggatatcgccggtgatctgctgcagactggtcagcacgttcttcagtttctccccatcgatttggacctcaagttcgcggatctgcttggtcacgtttcccgtgagggagacgcactcgaccagctcattgcaattggcgtgcagttgggccagtagcttgtaggcccgcttcgcgtggagatcatgcttggcgctctggaagagcaggtcgtccgtgtagttgaactggcgctgcaactgggcacccacgacattaagctgcttttggagttgtcgcgtgtcatccagaactttgtagatatccgctcgttgcttgcgtatgttcccgatgaattcatgtatcctgcgggtgtactccttgcgaggtgccaaggactgactggcgctacgcagggtggcattaagttcgttgtgctgttgggtcttggccagaagctcctgctccagctgctcgatgctgttgcgaatgccctggacctcctgagcctccttggcggtctttagtttctctaggctttccagcagc

SEQ ID NO: 24674 - DNA, 1159 bp, DROSOPHILA
caaagctgaagccaaaagcgcgtcggcggatcgcgttcgtttcgtttttacgttgatttactttcgtttgtttttagtttgcgcggcaacgagtgagtgactgtctttgtgtgtgtgagtgttaacacgcaagctaccgcataaatagtgcaaaaaaaaaacccgaagaaataccgagggaatagagtgcaaccaaacgaaagcaatacgaataggttttcccagtgagtttttccaactagaacctagaacctagaacccaaagccgcaagtgcaattcataagcgatagccaaccgacggaggcagaagatataattgccataatgacaccatcgccgaccaaggaactcatgagtgccacaccgacgatttcgcgtcgtccgcgcgaggagttcgccgagaagggtgccattataagagaggtggaagatggagtacggtgtgagcaatgtaaatcagattgcccaggctttgcagcgcacgattggaggaaaacctgccagtcctgcaaatgtcctcgcgaggcgcatgccatctatcagcaacagactaccaacgtgcatgagcgactcggcttcaaattggtctctccggcggattcgggagtggaggcgcgggatctgggcttcacgtgggttccgcccggagtgcgtgcctcctcgcgcatcaaccgctacttcgagcagctgcccgacgaaatggtaccccggctgggcagcgaaggcgcctgcagccgggagcgacagatctcttaccagctgcccaaacaggacctctcgctggagcactgcaagcacctggaggtgcagcacgaggcttccttcgaggactttgtgacggcgcgaaacgaaatcgcactggacatagcctacatcaaggatgccccctacgatgagcattgtgcgcactgtgataacgagatagccgccggcgagctagttgtggcggcgcccaagtttgtggagagcgtgatgtggcacccaaagtgcttcacctgcagcacctgcaactcgctactcgtggacctcacctactgcgtccacgacgacaaggtctactgcgagcgccactatgcggaaatgctgaagccccgctgcgctggctgtgatgaggtgagtcgtctttggcataaccccacctatccgatccctaattga

SEQ ID NO: 24675 - protein, 277 aa, DROSOPHILA
MTPSPTKELMSATPTISRRPREEFAEKGAIIREVEDGVRCEQCKSDCPGFAAHDWRKTCQSCKCPREAHAIYQQQTTNVHERLGFKLVSPADSGVEARDLGFTWVPPGVRASSRINRYFEQLPDEMVPRLGSEGACSRERQISYQLPKQDLSLEHCKHLEVQHEASFEDFVTARNEIALDIAYIKDAPYDEHCAHCDNEIAAGELVVAAPKFVESVMWHPKCFTCSTCNSLLVDLTYCVHDDKVYCERHYAEMLKPRCAGCDEVSRLWHNPTYPIPN

SEQ ID NO: 24676 - DNA, 9457 bp, DROSOPHILA
gagaaaagtgcaaacataatgtttttccctaaactgacataaactaaacgatctcttcatgaatgaaatgcaaagttggccacatagattagcatacttttgggataaaacaaaatacaatcttacaaaacaaaaagttagaatggtttaaatttatgttcaaagtttattttgatcaaactttagaattagaatggtgacacaatttagctttctatcaagaacaacagatgttcccatattttcattgacaaattctagaccaacataatgccacttagccctgaccttagtgccatcattcagacataagacccaagaaaaccaagtgtgtgagcccaaatactatacacacatataactcatgttcatgacagattgttttttttttgtttcgtttatagtcgtaatgacaacagcattcaaaatcgagtaaatctatatggcggatattttcctttgggacttaagtgttggctcattggtattagccgtgtgtcaagcgatgacatcatgcgaaaatgcaaattgggatatataatttgtacaaaataatatgggcaattgtgggggaagatttatgaagcctcttcatctgcggttgcacttggtggcccattgatgggtgacaccgctgccgcggcatgaatgatctcaatgcccgagtatttcgaggaccggtgcacaattggcacaaaccgcagatgcgattttcggtggggtgtatgactattaatagcaaccagagtacaaccaaatgttttcttcatttattcagttggcttttattctcgtcatttttataaagacaaaagtgttaagtaaactaacagctatggtaaacaatccttcaatcgttcgttttttcttgggttcaaggcttttttctgggtcgttagtataattacatagtttatacagatcggaatctctgggatcccgtggacgggtgtttaccctcagtcagaggagcggatgctggattctggagactggatctttaactgggactaaattcgtgtacagcgtgctcggttttggatgtggcttggactggattgtgctgggctgtgcttggcttgacttggcttatgatcatgtctataagaaaacagatagagagtaaatcaaatgggtgatagagtgtgaaggttgaagttttagtttgcaaaccaagcgatctagaagagcggatagaaattggcatctttgagtatatcgaaggtgtccacaacggatcgcgctggtaccactgcagctaccgtagttgaagtcgaggatggtgatccaccaatctcttcgatggatgacgctggagttatgcagacactctgaccggtgctaatggtggaaagtaggttctggtgcgtggattctggggttaaatttgtggacaccgaaacgggggcaatctccgctagagcagcagctagtgcccgatccaattgagaatcgtcaatggcctgtgtctgggtctcttctttggcttcctccttgcattcctttgttgaggtcttcttgcgttttttagtccttttcttggtggactgctcttcctctctttcctgtggttcaaattcagctatgccctccaaggattctcccacaaaggcaagactgctcctaggtgaaaagggtcccgatcctccattgggctcttcattggtcaagctacttcgtgagcttcgccttgagcgtgtttttctctttggcggatcggttggctcctggtcatcactgcgccgagaggatcccatttgggtgtccgaatcattatcatctcgaagttcctcttcggttttagatcctttacgcagcttcttcttgctcttcttcttcttgggcttttcggctggcaaatcttccaatggagccactgcttctggctgttcctcgagtgcttcttcctcctgcggaagttcttcagggacatctggtaaaatttctcgaacaggactacggctaaagagggtgatactttctccgcctaggctgatcctgcgattttccaacagctctacgttttcgatttcgccgttttcttcattagcatacagtggctgctcatgatcctgataaagttcttcttctagttcttgctctcgatcttgccacccgaattcctcttcaaattgatccctggcttcctgttcttcatcctcttctgtcttaacttggacacttctttcaccttcttcattgtcgtccagtcggaagttcttgcgccagttgtactccctcttgggcttgtaattaaggtccacctcgatgtcatcttctaggtcgccaacttcaagtttaggattaaagccatatcgggtacgtaaccttgtggattgtcgtgccaccacatgcgcatcacctaggtaacgcatctcagaatcgcgatgatcactttctggtatcaaccccaacgcaatatcaacatctgagtgtcgggtaccggaatgtgatctttccagttccctggtcttggcccacaaggcatatttctcactatcagaaccggacttttccttctcagattcactgagatccgaaggcaattgctcctgaacaatggtctcgtactcccttagaattccagactgctttctgttctttatggcctcattgtagatctgttcgataaaggagtcgggatcggagtacggtgttgctccgcccacagcaccatcgtcgaaaccgtagtcgaggaaatcctccacatcatctacttcttcccaatcctgagctccccgattttcatagcgatctgcattcctttctgcctcttcacattcggaagtgtcatggtgggattcatcggtgggttgggtgcgttcgttgttatccgagattccctcgtccaactcaaactcaaactcatcttcgtcatcaatttccaccaccgtctgtcgtgtgtcttcgctgtcattcgagctgctcctctcctgatccaaattctcgtggtctcccacaatatcatagctatagatggcattggtggaatcgaattcggcagcttctgcctctgcagccaaaacagctctcgcccaggagtcttcatccctaaccggactttttgagtcagaaaaatcgtttggttcatgggtgtaaaaatcctcttttaaccaagtccttgttccagttagagttcgcacttcgatctgtgagatataaacgtaatcatcactgggatactcctcgacgggctgttcctgggcaagtgaataccgacggaagtgatggtattcatccggttccatgtcacccattaaagccgagtccgaggcccgacgctcgctgtccaagaagtctgcgttcaagtgccgcgagaagttctcgaaattaatgctcgaggcggctaacctatctagtaactgatcctgcagctccctcttagccgactccgcttcgatgtccctcaactgggttagctccacttccctcaatggcgaccgactctggctacgtgatcgctggaactcggccgtacgatgacgcaaatcgtccagttgggctgcagatatatcctcgaattcgccagttctctcctcggagtaggtcttgggcttggctcctaggcgactttcggtcagagagtctagaatggctgtttgcagctccctttgagctgcagcctgctctctagcgtaatccatgctcgatcctggagatgggcttcgggatctctgaaattgagctgcctctcgtcgtagctccttaaattgatcgctgcctaggtctaaggactccccaacataggtggaacgtttaaatccactggccatgagctcgtcctgtagatcccgtgccacctcagaaaccgtgcggtccatgtccggattctcacgtgtcatctcaaccactctctctaattccgaattagtgggactgagcacgcgaagctctatttcctcattggcattgtgtagcttctccagggcatccatgtcgacctctcgttgctttgcacccacggccaggacactttccaactcctcactatttttgcgtagtgtgcgcaactcgctaccctccaggttaagcatcaagtgaaaatcatctagcgctttttcttgtgactgtgaccgggatcgagatggggacaaggatctcttgtcgcgaccttcaccaacctgttcatctttctcttgaacatattcatacacgtactcaacggtcaaacgagtttctggctccggagttcttgctctttcctggagtacctcgaagaattgatcattctgagcaatcagcctctcccggcgcttctgcacactctgctccaaattggcgggtgtcggaagtggcgaacgcgaccgggatcgagaatgggatcgcactcgattcagacgaagttgctcgaagagtctagccatgctctccggtgtatcctctggttctgcttcagtgtggctagcattttcctccggtggttcggcaatttcaatggatattgtgggtagaggaagcggtaaagatggcggtgaagcggactctattatgatctgaggcgaagacatttgatcgtgtagtttttcaaagatttcatcattgtgttgaatgcgtttcagcctacgactttccaagctcttttctatattacccgcagtgggcagaggagaacgggaacgagatcgggatcttgagcgggcattcctctcagctctcagggtctcaacaaaaagtcgcatttcttcaggtgtagtttccgcatcctccatgggctcgtcagccatttcattaatctcgattacaggctgtggcagggtgacctctagtgttggacttaatcttccattgtcactagtttcgatttccatagaatcttctggacttgagtgggatagacgttcggcgagctcatcgttctgtttgatcaagcgctccctgcgcttatgaatgcttttttctaggttctctgaggtgggaagtggtgaacgggagcgggagcgggatctggattgaatccttccgacagaaggctcccgtcccctttcttccaaaacagcaccaagtgcagagctttcaagtggttcgtgaaccatgggtaagatcgatttaccatccctggcatcatcggctacagtttgcacttgaagttggtcatttgtagattcggtttcattcaagttcgactccagaagctgaagtacagactcgcagtttagttcgcctgccattacaccttcctgagtgtcgtcgtaaacctccagcgaccgctccgtgtccccatccatcaaatttgccacattcttgggagctggtgagggatttcgcgatgccgaacgggatctcgatgggtttacggatgcggtaaagtcgtagaaatcgctaagtccttccattagcaatccgtactgatcccgccaaggagccgtatccggctgctggacattgatggctggtgctgttcgcggtggctgctgttgcactgactgctgctcctggctggcggaccagcgctccggataatgctccatttcatccatacgtggactgcgtcgcaagccaggtgaaccaccccttgattgctcctctgctgcgatagaggtttgcagctttttgggggaaaggtgaagcggaaaagcaagcggaatgtgggagcagtagcaatatgaaaagcaaagaggtaaagcagttaggacagttagttatgcggcagtggtgtctgcgattggtggattaggttgtggtcgaaattattgggtgagaaatgatgccaggtgtctgtgctacgcacttacattggatttgttgctgtcgctggtatccactgcttgcgggttgtccttctccgcttctttgtcctaacacacacataataaatcattgatatagatcctcggcttgtagattcatttactcaccaactgctccttggaaagttgttgttttagggcagccactgcctgttcgttttgtgcctcagtggcctcttcaaaggaggacgattttggctcatttgtagcttcttcctccacatcctctcccctggatggtctttctagttcgatttcctcctcgtctatggagagcgctttttcccgcttccaaaactcggtatccttataatgctccggcacaacctcaccccagggatttgtgctctcctcaccgagcatctctaaggatgtggtcgactctgccgttggtctaacatcctttgctggactccttttgtgacgtcggtgggatttaaccctcagggtaggttcgctcgtatacttgatggggttatagtcctctcggtcgccgtggcgcaactcctcctcctctagcgaggtgaacatctttagttcttcgtcgcgggaggctcgcgattcccgcgaggagttcgagcttccactggatcgtcgcttcttaaaagcccttcttctccctgaaccatcctctcgcatcaaaggacgattcttaatgccatctagagaacgaaggtagtcctcggtgtactggacttcctgtatctgatcttctccttcaggttctgggcgttcactttcgattctgttgccctcatcagagggctgcgtgctgaaggacgactgctggatggagaacggagttttgggttcaagagaggatccttcatccgatacgccagggaaggtgagtgtttttgactttgctgagtaggcgtcttcaggaccacttccttgaccaaattgagttttcactttatgcaccatgggttcttctggaggctcctgaaacctgggtggagccactttcttcacacacagctcctccaccacgggttccatgccagcatactcgtctgcctcctctttgctgtgtgaggcttgaagttggcgctgttgtaacattaccatctcctcttctgcctcaagaaagcgtctggcgttttcctcaatcattcgctgtttttgctccagatcagttctgctggagatcaggcgacgcgactgctctgcgatggcagcatcctcctccagttcgctctctgtagcgcttggactgagctctctttctgctgccagaagacgctctacgatctccgcatccctcagtgcttgcccttcttcgtcagcttgatcgcgctctcgctgaatctcggcatcaaagagacgacgctcggcttgcgctgcctcggcttcagccaggatcctttgttgttcggctcgctccttttcggcttcggcctgctctctctgacgctctgccacgacgattcttctttcgctttcttctcgctcgcgctgctcttcagcttcttgcagtcttcgctcattctcctccctttcccgttcggcatctatcagccttctttcgttttctaggcgttctttctcctcgttttcgcgctgtttacgctgattttcttctgcttctagctgtctgcgttcggcttctctttgttcctgcagttctttctccgcctgctctctttcgcgctgtctttccgcctctacgagctttctctgctgctcctccgattcctctttctccctctggactcgtagtctttcttctaccagcttggcctcggcttcggccagctgacgcctcgtatcggcttcaatttgctgttgacgtgccagttcggctgccaaagcttgtcttttatctccagcaggatctactcgtattccattgacatataggacaccatcctgcatgacattggttcctgccagggcttccctttccgccgcctccttgatctgcttatccaatcgctctcgcatgcgaggcaattcttctgcgtcagctgctgcatctacagaagaatcgccgggatgttggaaagtccagtggtatagatggcgcgccacaaaggcgaattccagggcacctaggtatccaattagcagcgagaatagtagctcgccgacgccggttagcgccgtctcctcagcggccattgcgtaatgaccagaatcgaaacggaatccgaatcctccaacgttcgccgatgcaatgagagtatgtgtcgacgagaaccgaatcggctaacacgtattatataaaatatattcaccacgcactcgaaaattcacaccactcacgttaatggccagccgattaggtaattcgaaaaatatttatttcactttcgctcacaaatcattgaaccaatcatcgatatatattcatttatctacgttttgagacgatttatgagagcgcgaagcaagaagaatcggagatgggcggactcgccaggcggatgcagttgctcgggcggcgagctcttgttttccgctaatcgatcgtcttgcaactgattaatgccccagccaatgcccatgggtcccccgatttctagagaacaagtgaatcagcggcgagagaaccgccaagaaccgaatccgttcaaatggcaaacggcgctaattgacggccagcgatgagagcaaaaggcctgtagagctgacaagacatcgccgacttttgtcgctggcaatttggcaacacaaatgtatctgcttctgtccgctgccgttgttgcactgccttgcctccgtgtcaaatgccaaagcaatcggaattggccaaagccgattttctaatcagtttagtcgacaccccgccggccgcgcccccttttcgtttggggggaactatttttggtctatgcttcgattgctgttttccacaaaacacttttcgccactttctgctttgctcgccgttttcgtgcgggagaacagttagcgacatgaccataaatcggatagggaaaatcaaatgcaactgtcatttcgataacataatgaagagttttttaatctcaagcaagtatcaagatttagggatcttttctttcctatccttttattcaggtttaaaaattcaatttatcaaaattaatcagaaaatgtttcttttgatattttaaaataataaaaaatcaagtattttctgaaaaacatgatctttctatactgcataccacacatattattcagacgcacagttggctgcaataatatacagagctaaggtgccaatttccataaaaatgcttaatttggcattaatggtcacatcgtatctccgattttagaaaaaataacatttaagagtacaatgttgagatacaattttgtttataaaatgcccaattcttttgtttattttgccaataaaatttggtattctcgaaagtgggaaaaatatattttagcattcgtaattcttatgggcatgacttttactgttcctggtgtttgcaaatcagttttctttggcattgccagcgcctggggccagggtcgccacgccccatttcgccgcctccgagcggattgcacacaaatgtttgccataaatttcgtcttggcactgacactaacattgccagcagctttcagaggctctttatcgccgatttcgctgtggttctcttctgcgttttcagaatcagtataattattgtcaaacgcggcataattgtgttctttgccccacaaagccaaactatttttgtattcttttgtttattctc

SEQ ID NO: 24677 - DNA, 2770 bp, DROSOPHILA
caacaacggcagcggacagaagcagatacatttgtgttgccaaattgccagcgacaaaagtcggcgatgtcttgtcagctctacaggccttttgctctcatcgctggccgtcaattagcgccgtttgccatttgaacggattcggttcttggcggttctctcgccgctgattcacttgttctctagaaatcgggggacccatgggcattggctggggcattaatcagttgcaagacgatcgattagcggaaaacaagagctcgccgcccgagcaactgcatccgcctggcgagtccgcccatctccgattcttcttgcttcgcgctctcataaatcgtctcaaaacgtagataaatgaatatatatcgatgattggttcaatgatttgtgagcgaaagtgaaataaatatttttcgaattacctaatcggctggccattaacgtgagtggtgtgaattttcgagtgcgtggtgaatatattttatataatacgtgttagccgattcggttctcgtcgacacatactctcattgcatcggcgaacgttggaggattcggattccgtttcgattctggtcattacgcaatggccgctgaggagacggcgctaaccggcgtcggcgagctactattctcgctgctaattggatacctaggtgccctggaattcgcctttgtggcgcgccatctataccactggactttccaacatcccggcgattcttctgtagatgcagcagctgacgcagaagaattgcctcgcatgcgagagcgattggataagcagatcaaggaggcggcggaaagggaagccctggcaggaaccaatgtcatgcaggatggtgtcctatatgtcaatggaatacgagtagatcctgctggagataaaagacaagctttggcagccgaactggcacgtcaacagcaaattgaagccgatacgaggcgtcagctggccgaagccgaggccaagctggtagaagaaagactacgagtccagagggagaaagaggaatcggaggagcagcagagaaagctcgtagaggcggaaagacagcgcgaaagagagcaggcggagaaagaactgcaggaacaaagagaagccgaacgcagacagctagaagcagaagaaaatcagcgtaaacagcgcgaaaacgaggagaaagaacgcctagaaaacgaaagaaggctgatagatgccgaacgggaaagggaggagaatgagcgaagactgcaagaagctgaagagcagcgcgagcgagaagaaagcgaaagaagaatcgtcgtggcagagcgtcagagagagcaggccgaagccgaaaaggagcgagccgaacaacaaaggatcctggctgaagccgaggcagcgcaagccgagcgtcgtctctttgatgccgagattcagcgagagcgcgatcaagctgacgaagaagggcaagcactgagggatgcggagatcgtagagcgtcttctggcagcagaaagagagctcagtccaagcgctacagagagcgaactggaggaggatgctgccatcgcagagcagtcgcgtcgcctgatctccagcagaactgatctggagcaaaaacagcgaatgattgaggaaaacgccagacgctttcttgaggcagaagaggagatggtaatgttacaacagcgccaacttcaagcctcacacagcaaagaggaggcagacgagtatgctggcatggaacccgtggtggaggagctgtgtgtgaagaaagtggctccacccaggtttcaggagcctccagaagaacccatggtgcataaagtgaaaactcaatttggtcaaggaagtggtcctgaagacgcctactcagcaaagtcaaaaacactcaccttccctggcgtatcggatgaaggatcctctcttgaacccaaaactccgttctccatccagcagtcgtccttcagcacgcagccctctgatgagggcaacagaatcgaaagtgaacgcccagaacctgaaggagaagatcagatacaggaagtccagtacaccgaggactaccttcgttctctagatggcattaagaatcgtcctttgatgcgagaggatggttcagggagaagaagggcttttaagaagcgacgatccagtggaagctcgaactcctcgcgggaatcgcgagcctcccgcgacgaagaactaaagatgttcacctcgctagaggaggaggagttgcgccacggcgaccgagaggactataaccccatcaagtatacgagcgaacctaccctgagggttaaatcccaccgacgtcacaaaaggagtccagcaaaggatgttagaccaacggcagagtcgaccacatccttagagatgctcggtgaggagagcacaaatccctggggtgaggttgtgccggagcattataaggataccgagttttggaagcgggaaaaagcgctctccatagacgaggaggaaatcgaactagaaagaccatccaggggagaggatgtggaggaagaagctacaaatgagccaaaatcgtcctcctttgaagaggccactgaggcacaaaacgaacaggcagtggctgccctaaaacaacaactttccaaggagcagttggacaaagaagcggagaaggacaacccgcaagcagtggataccagcgacagcaacaaatccaatgtaaacatgatcataagccaagtcaagccaagcacagcccagcacaatccagtccaagccacatccaaaaccgagcacgctgtacacgaatttagtcccagttaa

SEQ ID NO: 24678 - protein, 727 aa, DROSOPHILA
MAAEETALTGVGELLFSLLIGYLGALEFAFVARHLYHWTFQHPGDSSVDAAADAEELPRMRERLDKQIKEAAEREALAGTNVMQDGVLYVNGIRVDPAGDKRQALAAELARQQQIEADTRRQLAEAEAKLVEERLRVQREKEESEEQQRKLVEAERQREREQAEKELQEQREAERRQLEAEENQRKQRENEEKERLENERRLIDAEREREENERRLQEAEEQREREESERRIVVAERQREQAEAEKERAEQQRILAEAEAAQAERRLFDAEIQRERDQADEEGQALRDAEIVERLLAAERELSPSATESELEEDAAIAEQSRRLISSRTDLEQKQRMIEENARRFLEAEEEMVMLQQRQLQASHSKEEADEYAGMEPVVEELCVKKVAPPRFQEPPEEPMVHKVKTQFGQGSGPEDAYSAKSKTLTFPGVSDEGSSLEPKTPFSIQQSSFSTQPSDEGNRIESERPEPEGEDQIQEVQYTEDYLRSLDGIKNRPLMREDGSGRRRAFKKRRSSGSSNSSRESRASRDEELKMFTSLEEEELRHGDREDYNPIKYTSEPTLRVKSHRRHKRSPAKDVRPTAESTTSLEMLGEESTNPWGEVVPEHYKDTEFWKREKALSIDEEEIELERPSRGEDVEEEATNEPKSSSFEEATEAQNEQAVAALKQQLSKEQLDKEAEKDNPQAVDTSDSNKSNVNMIISQVKPSTAQHNPVQATSKTEHAVHEFSPS

SEQ ID NO: 24679 - DNA, 2718 bp, DROSOPHILA
acacttggcccgcatcccaaatgacaatttgagttattagtgccacattcatatatcacgattgtgtctgtgggaatagattggcattttaattgccaccgacacattcaagtgccatttaacatagatcccggctaaatggtttcatgatttagatggattcttatggaagtctattgtaaaattgcaatagaaactagcacaaggtcatgtcactatgtttttggcttgcagtaaatcttgcttgtctgtagttcctttttttttggcaccgacaggacccaaaattaaatatgaaaattttgaatttacgtttcgttgtcattgatccggaatttatggcttccattctcatttttaattaacttgacgacgggactttcaagttggcaccctggctataaaactggcaacgattattcctttgtgccatccaaaaaattaccaagccattcccctcctctctcgtcgaccaacgaactgtgtcctcgttgtgatttggcatgcattcaaaaagttttacacgatacaaaagcactttgttctgcctgccaactgacattgaaaaaagacgcatataacgaatggcaatcaacgctgcaattatgtaagtgtatgtgtttgtgctgggacatgtgtgtgtgtgtgtagattgtgtgtttgttggctgtcgcctgtttattgaacttgcatgctgaccttagcctgcttttcagccacatttcagttgcttagtcattttggcactagaagtacaggacggacatactcaaaagtttgaaatactatataatatatatatatatatttcaaggaaaaacatttcatatatgctcctaatatgttctactaaaaagattaccaaactagtggtttatcattctacttgagttcaacttacaaaagttctactgtagctgggaaatactgtcgggcaaatgtgttgcatacttttaggcagccaccgcacatgcaatcccctccatgaatccccaccatctcaacgccaccacttccgtcgaacgatccagccctcgttcatggccacatcagcatgggcttgagccttagctttggccatagcttttgctatagcttcaccatcggcagcggcttcaaagtcgcgttcaacgtcaagtggcccactcggcattccacttgaagcgtaatgaaagcatttttgccactaacacatgtgaagaggctgttggccagagagggaaagggatacgtcgagtgaatgaggcagaaatgcagatatatagagagagagagagacagacagactccagcacttgcttagcattagtgtgtgcgacatcagattgacacttgtcagaatcatttctgtctacaccacagcaaattgtggcccaaaggcgacgaaaaaagcacagaaaattagccaaaggagcaaaataagagaaaattaccctgccctttcttttcttttcatgcttgcccaactcgattacaccaagttcgagatctgtaattccattaagatttctgtctcattgcacagcggtgtcaagttcatttgtttccacagactcggcaggttgtgtgccacctggctgcccaagaacaataaaacacattaacacctattagagcgttgtgtgggggtgagattggggcgaaaggggagttaaagggtggcttctggccattgtacaaatgggagcataaataatagcgactgtctgccaagttatgaataataatgacaacaacaatgaaagcgatggagagagaacaggaaagccaggctaaactgatttaactacgcacagatgtggtcatctgaataggtttcttaaagtttctataagcaattacatggcttttgagactttatataatgactaaaattttcttgagttaatatggtgggaactgctatatttgctagtattgcatatcaccccaatattttgacctgcactgtacatgtacatgagtgtgtggaatggtaattaaggatttggcctttgccaaggcagtccggttaaaatgccctgccgctttgggccatttttatggtcgttgtgcaatggaatggaaggactaaagaggaaaaagtagaatcgtgccgagacaaaaccacacctgcctgtatacctggctctaagtcgggggaatagcaaacaggacatggccacagataaggccaagtccagtatttgtgtatgtgtgtgtgcttacaaatctctgcgctaattaaaagtcattagagtgtggtataattgcatctaaatgaaatggccggggaaaagccgttttccctcacagtttaaccctcagataaatctgttggaacttttagttgatccaaggcgatagtacaaccatatctgattgcgttttctctcttgtttttcaggtaagcaaccagtgaaacatgaaagtgaattgccaaaaaaaaaaaaaggtgtaagtaataaactgtcggactgtagcaatttgaatgcaatgctgactaatgaacacggacgtaaagttcaaaaaggacattctgttggcacatgaatattttacgagccagtttcattagcacttaagccgctcgagttgtgacctgtgtctccgcgctgcggttaccataaaatattaatctgttcgagccgcattacagatgcaaatgcaaagcgaatgaataagtaatagtcgagtgtgcgaattattagagggcattcggcgcactaagtgttcgcc

SEQ ID NO: 24680 - DNA, 718 bp, DROSOPHILA
ataacttggcagacagtcgctattatttatgctcccatttgtacaatggccagaagccaccctttaactcccctttcgccccaatctcacccccacacaacgctctaataggtgttaatgtgttttattgttcttgggcagccaggtggcacacaacctgccgagtctgtggaaacaaatgaacttgacaccgctgtgcaatgagacagaaatcttaatggaattacagatctcgaacttggtgtaatcgagttgggcaagcatgaaaagaaaagaaagggcagggtaattttctcttattttgctcctttggctaattttctgtgcttttttcgtcgcctttgggccacaatttgctgtggtgtagacagaaatgattctgacaagtgtcaatctgatgtcgcacacactaatgctaagcaagtgctggagtctgtctgtctctctctctctctatatatctgcatttctgcctcattcactcgacgtatccctttccctctctggccaacagcctcttcacatgtgttagtggcaaaaatgctttcattacgcttcaagtggaatgccgagtgggccacttgacgttgaacgcgactttgaagccgctgccgatggtgaagctatagcaaaagctatggccaaagctaaggctcaagcccatgctgatgtggccatgaacgagggctggatcgttcgacggaagtggtggcgttga

SEQ ID NO: 24681 - protein, 50 aa, DROSOPHILA
MPSGPLDVERDFEAAADGEAIAKAMAKAKAQAHADVAMNEGWIVRRKWWR

SEQ ID NO: 24682 - DNA, 4149 bp, DROSOPHILA
gtatcgtatctggtgttggtgtgttcgctcggaactgatctgcggcatttatcagccataaatttatcactcgctgacaaagtcaatgtattccgacactgtgtttgcctttctgtcatatttatttgcgctacaattgaaaacggagcagcagacaccttgtccgaaaagcgggttggaatggggcatttggagagcgggttcagggtctggcgtgggctggaacagtttgccagtttcattaaagactccgagtctgtggacaggtgacaatgaacttgcagtcgagacatcaacgcacttacgtaagcgctcgtatctttgcatctcgaaactggacgcactcgagtgtggcaagttcgttggttggaatgcacggtgtgcgattcaattcggatggaccacataaatcaacggctaacattttgattgttcaaataagtaatccctacttaaacgtaatttcaagctttgaaatgattttttaatgttcaagacgtaaaaagagagttccattttgaaaaccattgattttaatgttattgaactggttcctaagttcattgctcctttaaaacgctttaaatttttatgaattataactagttgacctttgagacttaagaattatgtttaggccttgacaaaagtgtatcatataagcaaagatttattactcatacgtgcagtccaccccaatgagttagagtctagtttggctaacaaatagctagccaaaagcaatcaatttccttgcgttcgtattataaattgatcaagttttcgagatatgtcatggatacgggatacctgtgcgcaatccaactgtgccgaaccagtttctggaccatctcccggctccttagaaactccattcagcggtaacaattagccatccttaacggtaacaagaagaacttgaattccgagattctcatggcaaacatttcacttcagtgctgccattactcagtctccgcccgcaagtatgccatgattttcacacagtttcccccagaatttgcttacctgcgcggaaaacttcgccgcagccatcgcagcgggacgcaaactgggcatcgtagcagtttccacagtagatcttatccgccttggctccaaactgcttgtccaccagcgacagatggcacttgaagcacaggaaacaggcctcgtgccagtgcttgtctttgtaggacagatcctgtgaagggagggataacaaatgggatcagaacggagtctagattcctacactcaggtgtttccttaaatagtgaatttataataggaattattttgaaaacttgtttaaattacttttataactagataactttaggccataatattcttcttcaaattttgcttttctcactaactataatcatttgaaatagaatgtggacttccgttgggcttttgagtgctgggcttttagccaagcaaaataaattacctagaattaaatttttggtcgacagacatattaattgcctttatataaaatacattattcaaacttgacacaaagagactgcatagaccgtgagaaattatttacgcaatgaaacccttaaataaattcagaacttgaaaaaaaccttgctcgcatattctacacacattccgaaaacaaattaaacataagctattgcatttcttctcgtgttgcagttgtcattctaattttaacgctataattaaaacaaattatggctagacgcataaaaccaactcaataaaagcgcgatgataataaaatggacataaagttcacagcgcaaacataaaaatcgcattaaaattcaatttttttttcggttaaactgttgtaatctgaagtctttggagcgatttcaaaaatatttatcgattccatttcttttcggttttacgagctgcactctcgaactggttttcgaaacttctcaagggaagtgtgctccatatttgcccactgcgtgcatttctgtcctacttgatggttattaaatttgttgactacccacatatggccataaattcggtttacgaacagtttattgtccgcaatcgacgatccccagtcgaaattgtcccaaatacactcacgtaccttggagtcgatgccaatgatcttgttgcactcctcgcacgtattggcgaacacattctcgtagcacttgatgcagtacggatgatcgtcccggatgacgtaacgctgtccggtgaggctctcgtcgcattgccagcagcagaagtgtccggagtgccagtccttgtccatggcttttgtgtactcgccactgaaaattaactgcaagcacacacagagatcggggaggatatagatatcgattcacatcgcacatgggcataaacaaaatataagggggtatacatatatcacatggattgtgtgtttcggggatctgtttcatcatgggttttctgtatagttttcgttttcgttttgtgcagtgtagttttggggtgttacttggtttgttttactttgtggcactggttttggtggtgggtgtgcttagatagacttgttggataccttttagtaaacattttggccgaggaaagtagagtagtaacgtgtgtcgttttgtaaaagttcgatatgcaagagttttcattggtttgtatacatatatattgattttggaatcttttcgattggaatgtgcaaatgttttttttttattattttgtttggtacaacaaagtatttgggatgatcggacaaagagcacaaaagaattgataaatgattacagaagaagactttcgttacgaactgccacaaaactgtgctgggacacacatgacacaggtcacctaccctctttcctcgatggtggcatccacctcgacctcgctgatctggacctcggattcgcgtcgcttcgacgacttcttaacctttttcgtggtcttcttcacttccgtttgcaccgtttgcataatttccacgtccgccatcgcgcccgctatctcgctcgctctaatgaccgactgaactttctataattattgtatcttgtggatttgtctggccgtctgtcttctgtatatcgatgtgtgtgttagtttttgtgtattttcgattttcgatttcgatcggaggtccagaacggtatgaactttgccgagtcgggatctcaactggcgcagcggtttccgaaaatgtttttcaaaacgcctgctgcaccgctttcagtccgctctgtatctagtttcgccaccgccaagtgtaaaaataaaatctcggagagccagagccaaatgggcgcagaatggagagagggaaccatgtacgatctgtcgagatctttggatctcaatagagatttattttacggagcaccagagacgggcgttctgaattattgcggtagacaatgtaaatatcgccaataattaatggcattattgaatttgcaatgcaattggggtaattttctcagcgatttcggccaatttgcatgcaatatatcgttcgcgcttaccgctaaaaatactaaatgaaaaatcgaacgcatttcaggtgccaaaagttgtgggcgtttgccccacctgcctgccggcgatcaaagggttgtggcatgcttggccaccctcgaaaatcgttagtgtcccctccacattcaaaaatcgaccccccccccccccttaaatcgcatgtcagagatttgaaaatttgtttaatttttcaccaaatgaaatgtagtgtgtttttcttgttgttgctgtggcgcttgtgcacacgacacacaagcagcacacccaaacaaacactagcgcaaatggaaaatcgaggaaaattctctcgcttcccacactgcactacaaacgacacgatcggcaatctagttgagcatagatcgcttttcccttggatcggttctaaaacgattctaaaacgatgatctgcgtgcgtctggcattttggcttatcgcaccctgcggtatttttgaattttccaatagattccctaattgatctccaggccatacattatcgaaattgtattaatatatggaatttattttcgcattcttgattttcttgcattattacagcatttggcatacagacagacattgagttgccaatgggcgaaaatgtttattgaattgaaatgaaccaacagg

SEQ ID NO: 24683 - DNA, 707 bp, DROSOPHILA
gactcggcaaagttcataccgttctggacctccgatcgaaatcgaaaatcgaaaatacacaaaaactaacacacacatcgatatacagaagacagacggccagacaaatccacaagatacaataattatagaaagttcagtcggtcattagagcgagcgagatagcgggcgcgatggcggacgtggaaattatgcaaacggtgcaaacggaagtgaagaagaccacgaaaaaggttaagaagtcgtcgaagcgacgcgaatccgaggtccagatcagcgaggtcgaggtggatgccaccatcgaggaaagaggtggcgagtacacaaaagccatggacaaggactggcactccggacacttctgctgctggcaatgcgacgagagcctcaccggacagcgttacgtcatccgggacgatcatccgtactgcatcaagtgctacgagaatgtgttcgccaatacgtgcgaggagtgcaacaagatcattggcatcgactccaaggatctgtcctacaaagacaagcactggcacgaggcctgtttcctgtgcttcaagtgccatctgtcgctggtggacaagcagtttggagccaaggcggataagatctactgtggaaactgctacgatgcccagtttgcgtcccgctgcgatggctgcggcgaagttttccgcgcaggtaagcaaattctgggggaaactgtgtga

SEQ ID NO: 24684 - protein, 177 aa, DROSOPHILA
MADVEIMQTVQTEVKKTTKKVKKSSKRRESEVQISEVEVDATIEERGGEYTKAMDKDWHSGHFCCWQCDESLTGQRYVIRDDHPYCIKCYENVFANTCEECNKIIGIDSKDLSYKDKHWHEACFLCFKCHLSLVDKQFGAKADKIYCGNCYDAQFASRCDGCGEVFRAGKQILGETV

SEQ ID NO: 24685 - DNA, 4588 bp, DROSOPHILA
gcagaagctgtttgctgataaactcgccttttgtctgcccatacagaagatacaaaaacgtacgagaatgtggcacacaaaccacacatgcaaatggaaccgcgcgtggacgtctatattgtcggaattggaagcttcagtgggatttatcaactttggcctataaataaacaagcggacggccttaaatttgataaagctgcctttttctgcagatttcactttcgtttctgagaaagcctcgagagctttcggcgtgattctcttagttacatactcgtaaatgctgtatcgtctcatttccatgactatttttgggctgtatgacaagtgatttaaattcgcactaattgctcgaccggttgctcgtggcttctaagctctgaatagcattaagtctaccgattaattgagcagacttaagttggagtaaacaaatgattagattgtgtgaatcacatgtatttattgcagattcaccacccataataacttattgaatacaaaatattttcaagacattagacagaaacaaaggtaaccaatagtaaccgaatatatatgttattattagacttaagtgacttaaggttctataaaataataattagctataattaaccaccgatacaaattagttgtgcgtgagatacttttaaagcactcttctcataaaataaacaactaaaattctgccggtctaaaagacgcaagttcaagttgttggccattggaatccgagcgattccagctgaaaaaaaaacctcgaggcattcaacagctattgaaagcagccaagttccattcaattctcggcggcgctttcaatgcgccgttcaaccgaaaacagctgcgacttcggcgccgcacgaagtagcaacatgagtatcggaataagtagctatagctacgcctgcatggcatcggatcggcatcggatgggcatcggatgggcatcggaatcggaatcggcagtaaccggctgaaataactaggaacgcggcgccgagtccgcagatttattcagtttacaactttcgctcgaaacggacgtgcgactttgtccggcaatccgcgttcgagtggcaaacaatagctatacaaataaatagtaatcaaacaagcgagtgcacaataggggcataaaacaacaacaagagaaaaaaaaagtaattcaaacctaaagtgagcttatcatcgaatctaacttcttaagcaagtgagacttttcttggaaagttcagggttgtggctgcagcaggtcgctagacaatctaaaggagataaaggcacatttaattatggaaatttttcctttgtttcacgcgtatttccagtttcttattacctcgggataattttgctcattaggcgggcccaaaaagaagcaattcctttgcattaagcgttcctaattagtctgcttctgactttctgaataattgcctagcgtctggtgaccgcaatgcacatctatatatatttatatatatatatctaaattaattgaaggattccccaggattcaagtacgttttctatgtgggaatcgttgcacttggtattcacaaattggtggctaaacattcagccattcgatggcatgtgagcaggtccttcggactaaattagcctatcagttgctggcaaatatttcataatttatggatcgcccctttttgggcccaacccaatcaataattgaccactgacaggccacgcgaataagtaatatattccgcaggacaaattgattcatcagcatagcatcatcgtgtggtaaactcaaaatatgaaaatggaaatgaaaatgaatagagctcccccaaaaagtaggcaacaacgaaatgaagacccatgcgtgtcaggcttttatattagttttttaaagctttgcaaacttttcacgacactcatttgaaatattcatgccagtctagatgtgacacatcgcatccatcatttttgtccccccaccaaaactggtatagcatttatgagctagagctaacgaaaatggcttttagggaaaactcaaatgtattttaagtgattgctcgagggtttcgacaacaccaaacttttgtggcgttaatttgccaaaggattccagagagccttcagccaggatgcgaaaagtttgctaacaaaacaatgaaaagtctgcgtatacagccctccagctgatttgcattcgagttttagaagagtacttatgtttcactgaaatcaattactaattagactaatggatgtcataactttctttaaccaaatgactttaagcaggcttgacccaaatttcgtggaatatttatgggtttcacgccccactaaatagatggcttatccaccttgttgacacattatgtattagcaaacattttttgttgttggcaaatatataaaaatatattccgcagcgaggcggcgacatatctgtgaaagcaatttccgctcaacgcacaggatattttcggcaacataatatatatatatattgttttttttttttgcggtgaaacatggcaccgaaggactgaagtccttgccacgtgtctgttttgcatttgacccgtaattttggccacatcctgtcggcctaatcccccagatgccctgccataatttgaaatgttttcgggctgtgttttttaattatacgccccttttaaattgtttaatgtatgaaggggtatgccgactaattagcagcaaacaccataattaagtagaacttaatacgaatgtatatgggtttgtgaaaaacccatcggaaatcaaccgatggaacgtgctccatggaccgcggacgatgacgtacgtgatcatcccttgtactttgcgattggatttttgatgtgccatctgatttggtgcccagatgaaacgaggccatgggcaactaaacgaatattgattcccaattaggcctgtctatcggacgactattttcgtcactctggaccctgaataattaatccctgcgcggcgtgacgcaaccatgaacttttttcgggaatagcagctgttatttttatttatcaatttatttactgctggcagccaacactgcgtatgcgtgactcgtttatatgaagcggcgacataaaacagcccttttctacatcaagatgtacaagagaaaggcctgaaagcccacaaatgaacttctagtgatttgcgataataattagtaataatagagaaaaagagttccaaagttaaatcacacatcgcgtctagatgtcatccgcttaactcacttaacacccatcgaattcggtcaaaattgcgcccgttcgtgttcacgctgcgcccagcccaacgcccaccaccactgccaccacccaacatccattcaacagcaacaacaaccatcaaagcggcaagacgacggactccggcacagtgggtcacactgccgcatcgaccacaagacagcggcggcaaagtggaagtggcagtggcatccacaagaagcgcaagaacatctggccattcaggatgcgggtgaaggtggccaagcgcctgtggttccaccgacaggcgtccaccaagagcgaccgctttccacagccaaagtaagtccgtatagctaattaaattaatgaattcaatacaaatcagtagtttaacaaatgtgaatttgttcacttttaataagctcttaaaagcagcaaaatttgaactggttttaatcctttcaaaggcaatgagttggaaactgaaacaacagctaagcagcttacatttaaggctaataaaagcaattaattagtcaatataatggaagttgtatcaaattaaccatgagcattatcccatttttttcatatttatataccatgctttgctgcaaactgaagttaatattaaacattttaataaagcttaaacattgctaagtcagatctacatttttcccgttttaaagactattgaagttgagattcattctttgctcatgagacggtctgagtgttatgctccttttgtctcagataaagtttccctttgaaccttttccattataagattgcgatatgccaaagttcatggggcgagacctgttttgccttacatctgctaatgcagaattctcatactcgtacatttatgtatttatatgggtttcttgtggcccggccaggagcacgtgcctgaaactccggaggagagtgggccggatagaaggcagttacggtggtcgtctcgaccacaacataaacataaacatgtaatcgtgtacgggtctaatattccctcgaatggcagagcaacatgtgtcgaccgaaaagatgagagaaacaagaacgaaattaatgtcagacatttaatttccgtttgccaaaaacatgtggacaaatgtgcggcgtcctgtttccgttgccattaatgtttcaatacagaacacttcattgaattggaaaagaaattcgttggaatatttcatagattccaggtacttcagctattcgggggagcccatccatcaatcgggatgtcagatgggtcttcaaagtgtcctggcaacgtgactcaaacttttcttttttcctttccgttcctattaaaatggactaaa

SEQ ID NO: 24686 - DNA, 504 bp, DROSOPHILA
cggcgccgagtccgcagatttattcagtttacaactttcgctcgaaacggacgtgcgactttgtccggcaatccgcgttcgagtggcaaacaatagctatacaaataaatagtaatcaaacaagcgagtgcacaataggggcataaaacaacaacaagagaaaaaaaaaccaacactgcgtatgcgtgactcgtttatatgaagcggcgacataaaacagcccttttctacatcaagatcccaacgcccaccaccactgccaccacccaacatccattcaacagcaacaacaaccatcaaagcggcaagacgacggactccggcacagtgggtcacactgccgcatcgaccacaagacagcggcggcaaagtggaagtggcagtggcatccacaagaagcgcaagaacatctggccattcaggatgcgggtgaaggtggccaagcgcctgtggttccaccgacaggcgtccaccaagagcgaccgctttccacagccaaagtaa

SEQ ID NO: 24687 - protein, 101 aa, DROSOPHILA
MKRRHKTALFYIKIPTPTTTATTQHPFNSNNNHQSGKTTDSGTVGHTAASTTRQRRQSGSGSGIHKKRKNIWPFRMRVKVAKRLWFHRQASTKSDRFPQPK

SEQ ID NO: 24688 - DNA, 4848 bp, DROSOPHILA
ttacaagaaaggtggcacagacttggaagccgaattttgaaatactttactacataaattcaatgatctacagaaaatattttaacgaaaaaatggttgaaagttgcttttatctagggaaagtcctgtaaacttaagtgtttttgatctcaggttattattttgatcttccagatgaaactgtaatattcaaaacataagtctattggccaatattaatacaatacacattattacttaacatccttaaagtcatgggataatatcaggttgttttatgcatgggataagatcaggttgttttatgcgcattggtcttatggaatagcattctctaaatatgtttattaccaaactaggattcttcaaatgagcccgggtgaaatcctttctccatagaaactataaaagtaggaaacaattttggtttggtacaaccaattagttgtaggactacgtattatgtaccaaatttgaaaaatgtgcatacaaacattcgttatgtacataaacgtgaagagttatgtatgacataactttataaagtattgaagcagataatattgaaacaaatccgatttacatgcacaaaatatttaagggctcttatatatatgggctacttcatagctggacacatctcaaaaactgtggatactttttatataaaattttccccaaatttactttaaaatattcctctaaggtggtctgcatttttgaacacgctttgtgagagtttttaaaaactatttgcagatttgcaggcacacatttcatgacaggttttaaatcatcattattgaaatgtatttgcctaacaaggcaaatgaatatgaatgaataaatatatccctcgttccgattccagttcgttctggggaaaatagagattcgattcgctggtgttttgtactcgctgcccaggcggtcacactaaaaataccaaaagcgccgttgttttttagggcgttttagccaccttacttctttgtggttgtttgcctatctacattgccattttgtaaatgtgagtgtaccaaatttcagtaagacaatttacccattaaccgttcgattatgttgaattctgtgtgcgaactgagcccgaaatgttatgtttgtctcgtcacccccgtcgcctagcccactgacatcttgctcgtccacgtatagatgatatagacgcgaattggcccgaacccgaagtctgaacccaaaaactccgttagtcctttgttgatggtaatcgtgcatttgaggcgagaaatcgaaatcgttagcattccgtagagacattcaaggcacggagcgagcatgttcagtatcagcgagctctgttgcatgttttgctgccccccgtgtccgggtcccattgcggccaagttggccttccagccgccggagcccacgtacaaattgaccccggcggacgacaccaacatccggtacaacctgcagttgttcgaccgcgccgagtggcagtactctgaacgtgagaaatcgaaagtggaggccttctttacgcgcacctcgcgtggcaacctgatcacctgcatctatgtcaggtgcagcaagaatgccaagtacacacttctcttctcccacgggaatgcagtggatttgggccaaatgagcagcttctacctgaccctgggctcccagatcaactgcaatatctttgggtacgactactccgggtacggaatgagtggcggcaagccgtccgagaagaatctgtatgcggacatcgaggctgcctggcaggcgatgagaaccaggtaagctcttctagttcaccccattgattccgctttgctaactcgttatgcaccctcaaaccagattcaacatcagcccggagacaatcatcttgtatggccaaagcattggcactgtgcccactgtggacctggcctcgcgtcacgaggtcggcgctgtgatactccattcgccgctgatgtccggcctaagggtcgtctttaggaacacaaagagaacctggttcttcgacgcctttcccaggtgagataattcgttgaattgcgttcatagccaattctaatgttatcggatttccacgcagcattgataaggtggctaaggtgaaggctccggttctggttatccacggcaccgatgatgaggtcattgacttttcccatggcatcggaatctacgagcggtgtcctaagactgtcgagccgttttgggtggaggtaattactcttgattgattacccgcctagagcaggttatgcacttattaagcagcattttaaccggaataattattgttattattcattctaatagtctagcgttttccctgaaatcgattaagtgtctcgtatcaagttcacagcttttcataaacattaaaattggcaattcaatcaatctttctcagcaatgtgatctcatcgtatcgattcttatttatttatttaatgatatgacttaaaacttagcctaatttgcaaactcatgagaaactttgatttcagggtgctggacataatgatgtggaactgcatccgcattattacgagcgactgcgcaaatttctttcggtggaactcgtcaaatgacaattaaagaataatgtggacggaggcgttagcgacactacatcgggcgtaatatctaattcaaaccctgccgccggtagtgcgtccctaagttcaaagcacccgaatcctgcccctgcggcaggaagcgaaacaagtaaaaagaatgtggacacaaatgtcaaacggattgaaaacgatggtttgtaattaactataagtattgcaatgtaattatttattcagccgcatcaatacattcgagaattgcattttttaaaagattataattaactagttgtcaggagacttgcaccaagatccccattcttacagcattgtgatcctggtccccgtattaattgaataagcataggtcatatcatcttatacttaaccatattggtagaaaaatcaaacaataaccgcattaagttctaaaacgatctgttagcaatatgctacagtaatatggttttaatatttaaggacaagaagtttgaataaagtaattttttgatactttgaaagtgaactgttttctacttgcaaccactttattgtttggcttctacgcttttaggaaaaacagtgaatatcttcttaccatttatgatttgtaactttctctctaatttgtgatcagctaatgtctaatgtgtgtgtgttcgctcttcttgcaggtgcctcaaattccagccagagttctactaaagctctcgagcagaagtttctttagcaaaaacagtcgggctcatattcaaaagcccaacccttctcaccacagttcccaagcagggaactatcaagtaaatcgtgcggaaacagacatagtaaacaaaataggaaagatgacccaccattaaccgatatgaagtcgaacggcttctttgtttctcgtttaaaacaaccaaatattgctccaacacttccagtactttctccacattcaccaatgaatgctaatatacatataaatagccagcatacccaactttccggtcgatatctaaataacaaagtgtcccaacaaatcgacactgaaagtataaaaagagtggcatctaaccgatctctaaaggacagtcaaaacgtcttatccatttcatcaactctaatatgcaactgcgagaaggcccaaaaatcgaatggctcagaagcggaagcaaacgaagaaatcaaaattaaactgagctcagatactggtaacaaatctaccattagtaaattaaaagacccgaaactctcttcagcgtcggaaaaaaacgcattagataattcaaccgagggttgtttgcaattgaaaagtgtaattggaaaggagcaaaaatcgctgtctccgagactgacgttacacaagagtgggtttcaacaggccatcataatttccgacgacagtgagaacacgaagtcttcgcgattaggtacccaaacagcaaggcagctctccagtaattcagacaatcaattttatcgacagcttacccataagattagcaaatcggagcaaacttccccaaacaacttggagctagacaaagctaactttctctacgatacgaacaataggagtacgggctgtttggtgtatccttcggatccatggataaagaactcgcatattaagaacagcttgtcccccaaaacggaaaagtattcaaacaccatgcatcacaatatcgatccgtgggtcaagagacaaacagatgctgctgtggaaatctcacggcttcccaagaaaaatttctaccgcgaaaaatccctttcttccataaacaataaactaatttcgaccagaactgagaaatcaaagtgtgcaaagccgcagttgaagcattcgaaaacggagctggacgatgatcaagtatttttaaatgagccaggattgctttttgctccattctctccgcaatatcgcaacacgtcgcataaaatctggtctctcgaccagccttctaacgatctgaaagccaacattcaaagcaagtcagctagttttttaccggacaaggtgaaggagatatccagtccattgccgaaccatgttagaaaatctgtacaacaaaacaatagtaatttgctgtgtccgaatgttcaagcaagattattgcttcaagtagaaaagctgcattctagacacagctccctatcgattcccactcaatcgaaggatgaactacccctgaacatccgtcgactgtccgagcagatccgtgaaccgcctttggagaaaaacatctcattatccctcagcgatcgtaacgttagcaaaattccg

SEQ ID NO: 24689 - DNA, 1954 bp, DROSOPHILA
tttgcctatctacattgccattttgtaaatgtgagtgtaccaaatttcagtaagacaatttacccattaaccgttcgattatgttgaattctgtgtgcgaactgagcccgaaatgttatgtttgtctcgtcacccccgtcgcctagcccactgacatcttgctcgtccacgtatagatgatatagacgcgaattggcccgaacccgaagtctgaacccaaaaactccgttagtcctttgttgatggtaatcgtgcatttgaggcgagaaatcgaaatcgttagcattccgtagagacattcaaggcacggagcgagcatgttcagtatcagcgagctctgttgcatgttttgctgccccccgtgtccgggtcccattgcggccaagttggccttccagccgccggagcccacgtacaaattgaccccggcggacgacaccaacatccggtacaacctgcagttgttcgaccgcgccgagtggcagtactctgaacgtgagaaatcgaaagtggaggccttctttacgcgcacctcgcgtggcaacctgatcacctgcatctatgtcaggtgcagcaagaatgccaagtacacacttctcttctcccacgggaatgcagtggatttgggccaaatgagcagcttctacctgaccctgggctcccagatcaactgcaatatctttgggtacgactactccgggtacggaatgagtggcggcaagccgtccgagaagaatctgtatgcggacatcgaggctgcctggcaggcgatgagaaccagattcaacatcagcccggagacaatcatcttgtatggccaaagcattggcactgtgcccactgtggacctggcctcgcgtcacgaggtcggcgctgtgatactccattcgccgctgatgtccggcctaagggtcgtctttaggaacacaaagagaacctggttcttcgacgcctttcccagcattgataaggtggctaaggtgaaggctccggttctggttatccacggcaccgatgatgaggtcattgacttttcccatggcatcggaatctacgagcggtgtcctaagactgtcgagccgttttgggtggagggtgctggacataatgatgtggaactgcatccgcattattacgagcgactgcgcaaatttctttcggtggaactcgtcaaatgacaattaaagaataatgtggacggaggcgttagcgacactacatcgggcgtaatatctaattcaaaccctgccgccggtagtgcgtccctaagttcaaagcacccgaatcctgcccctgcggcaggaagcgaaacaagtaaaaagaatgtggacacaaatgtcaaacggattgaaaacgatggtgcctcaaattccagccagagttctactaaagctctcgagcagaagtttctttagcaaaaacagtcgggctcatattcaaaagcccaacccttctcaccacagttcccaagcagggaactatcaagtaaatcgtgcggaaacagacatagtaaacaaaataggaaagatgacccaccattaaccgatatgaagtcgaacggcttctttgtttctcgtttaaaacaaccaaatattgctccaacacttccagtactttctccacattcaccaatgaatgctaatatacatataaatagccagcatacccaactttccggtcgatatctaaataacaaagtgtcccaacaaatcgacactgaaagtataaaaagagtggcatctaaccgatctctaaaggacagtcaaaacgtcttatccatttcatcaactctaatatgcaactgcgagaaggcccaaaaatcgaatggctcagaagcggaagcaaacgaagaaatcaaaattaaactgagctcagatactggtaacaaatctaccattagtaaattaaaagacccgaaactctcttcagcgtcggaaaaaaacgcattagataa

SEQ ID NO: 24690 - protein, 286 aa, DROSOPHILA
MFSISELCCMFCCPPCPGPIAAKLAFQPPEPTYKLTPADDTNIRYNLQLFDRAEWQYSEREKSKVEAFFTRTSRGNLITCIYVRCSKNAKYTLLFSHGNAVDLGQMSSFYLTLGSQINCNIFGYDYSGYGMSGGKPSEKNLYADIEAAWQAMRTRFNISPETIILYGQSIGTVPTVDLASRHEVGAVILHSPLMSGLRVVFRNTKRTWFFDAFPSIDKVAKVKAPVLVIHGTDDEVIDFSHGIGIYERCPKTVEPFWVEGAGHNDVELHPHYYERLRKFLSVELVK

SEQ ID NO: 24691 - DNA, 5623 bp, DROSOPHILA
taattattaagtaatatacataagtgtatagatcatatcgtctaatatgcagaaaagtccaatcgaacggatgaaaggaacctatcagctttaacatcctttctatgtacgtatgtacatatgtatgtacacatacctcaattatatcctgtactgcatatgcaccaacaattgtgaagcattgaagcatacataatacatacatatatttcatatatattacaaagctgttgctactgatcagaaactcgtctattataatgccacaaacacacccctttacctgttgcacgcgttttcccaaagacaatataccccttttctgagcgactaattgaaatagtccagtacgaacccttattttgacaacagctgcacgagtggctgcatacgatatatatatatgtatgtatgtatgtgtgtacatatatgtacatgtactgatatgtggtatggattgggttcccatagatggcatggcttggcatggcatgcaggtctagggcagtgccaaaaccgacgacgaaagcaactatcaaatgccgttcaaggccgtttgaaattgcgtggcaggcagaacaagttccacacatcggtgtgtgtgtgtgtgtgtgtgtgtgtattgttattaaccagctgatgtgcgtccgcgtgtgtgtggaagtcttcggaaggggtgcgcacatcctaagtgcgcaaaagccatgattgcaagcttttcggactcggaaaaacaatacaataccaacggcagatttggtcattcaggcaggcaaattgtcaaataactaacggttactttagtgctcattaatgtttttatgtgctttaatagatacgctactattttagttatttccccaatgcaatacgttaagatactcatctactaagagacgaatttttatttacccattaataataacggatgattcggaaatcgcatacgaaaacgccttagttgtatatttactcctttttctacccttactaccgtatacgtaataacaataatgagccagagacgattggtggctaagtatgtacactggcgaaaatacctttcagcaagcataaccatagcttcctttttacaggatccagataaaacgcgcagataaaaatgttaggcagtgacatctgttgcagatgaaaaggattaagaactacagattcaaaaggctgctccttttctttcagtgtgagagagggagagagagagagagggtttaggtggaggcaagtcggcaggggagcaggaagcatgaaattgagagaaaataaggataaacaagccgaaggatatgggacggcactgttgcttcgcaagtgtgtgtgtgcacgtcctgaccgcgtgcacacacacgccgtgtggccgtgtataagtgtgcgagcgagagggggcgatcgatggtgtgagtgactggcaatagccgccgcgtcttattgacattaaaaccgctgctgctgccgccgccgccgtcgccagtcgacttcacatatacccgctctctcgagtccctccccataccattccataccatcccatccctaccattcatcctggctcgttcttcttcctcttttatttttaaataacacccggcgcagatgctaaacaagacgccagaaattaaagtgcaaaggtgtgtgctgcagcaacaacagcaacaacagcaacaacaacagcgtcctcgacagaaggacgatactttggcgttgtacttagcgtcaaccgaagaatacgaagacaaggaccgcgaacaatgtgggatcaaggatctaagcagatatatatgtatgtatgcacatataccaaatgttccgagcgtccacatggtgcggatttaatcacgcacacacattggcattcatgaaaggatatcggatatgtatagagtatcaaacggaaccgctgcgcaagatggaaaacagatttgatcgctaatcaagtaaatagatgatacatatcattgtcaaacttgaaattaaatgaatcaaaagtactgaacatcctgaatcaagcaaatgacatatggcatcctatgtgaaaaaataatataaaggatctcttagtgatctcattcaagattagccaactatctcctcgtgatattataaaatatttacgactcactcatatctactgattcatgcactcctttgctaagagagttatttataggaactgtgatctaagaaggaaaactggtggaaacaatatgggctttttcggaatctattttaggtcacttgttaatattgttccattgcatatttaatccatatgaatttggtctgtggtttctgattatcaattttcaaagccctaattgcagttgaaaaaccgcagtggaaaaacacatttcaattcgatttgaaatgaagttcatggaataaccgaaacgtagtttaaattttaattaaaattttaatacagtttgtcaagtattttcgttccaaatcaaatttgtttaggtttacaagcgtaatttttattgtttaccaacgtgatagatgtacaataaaaatatataaacgatctagacccaagcaattgcattaaaaacttgacaagctgtatgtacatctacattattttcgagtaaaataacaacaagataaagctggcttgttctcaacaactatcaggctaaaaaaaaaaaatgaaaataaaaacaaacagaatcgcaaaaaattgccgaatggaaattttgtggcacgcaaacttgttgctccatctgcgtgtgagtgagatgtgtatgctagtgtgtatgtgagccagtctatgagcgcgcgagtttgtgtgtgtttgtgtgcgaggagaagcttactttgcgatgtttaaataataaatgatttatttatttttcggtttgtttttgttttgatttccacctgggctgatgcattttggtgcccacttttacgagaaaacgccgaactaatcgttttcgttatatgtatttattattatttttttgttgctttttgcatgtcaccaacagaaacagaaaaaaaaaacgaaacgaaacacactgaaaaacgcgcgcgtacacttgtatatatgtgaatgtgcgctggtattggcgcgcgtgtgagtgtgagcgaatttgcaagagacggggcgtatgagcaatgccgtggcgaaaactttgccacttttgttgtctgcgacgaaagcaaaaacagcgagacaccgtaaaaaaaaaaacaagtaatataaacacagctttacatgcgcagtttttgttgttgtttttatccggctgctgtggcgttgcactgcgtattactgttttacactttttttttactttttagagcgtccgcgttgcggcgacgcgttgtaagcggttcgaaaggtagcgcagcactggcgctctgccgccaattcgaacagctgagcgccagccgaagagagagagccgaagagtgccgaacgacgcagctccgctaccactaccaccgcaatggcgctcagtcgcggtcgctgtgcgctgctgtgctctgctgtaagcgctcttacattccgcgcccgaatttttcgtgcttttcccttgttttccctgtgggccagcgtttcgctgctgctcggactcggtttgggccaacacttgtcgcctcttggccattatgcaacgacagcgaaacgaaggtgctcacgaagtggccaagctgctctctgattggtcggcggtcagtgccacgaggccagccgaagttctctcgcgagaacccaagagcactctctccctctcttttgggagagatgagatagcaaagaaaagccaaaacactagaacaatccagaagccaagttttccggcttgcacatacgccgtataatccgcattttttgcgaactctaaactcgagtctatcagctataatattacaattcgttcactataaacaaataaactaatataattttgctcagaaatcgatgcactatgatgagagaatagtgaaaaacaattctcagttaatagcttttaaactgctctgcaaatgggaaaacaaattaaaatatacacattttcatgccaaataataggatatcctatccttcattatataagcataaacaatgaaaatattctagctcgctttgatcttttaatgtgtgtataatgtattagtacgtgtactttagtcaaagaactatgcacaaataccggttgaactttttttgggtatggaaaagcaaccgcatgtgagcgaaaagaatgtttggggattgaaggcgtgatattgggcggagtggccaaaacattggcaagggagccatcagcatcagcatccacatccacattcacatccacatcatcgccagcgtcgagagctctttcgatcgaaataaattcgaatcgagtgcgattcgtcaacaaggcgaagataaagatttcagagcaatagaacagaaaatcaatgttattcaatcaaaagccaatgcaaaattgctttgcactctggcacactgctatgtaaatatgttagagattcaacttttacaaattctattttccaagtccaagtaaatattttaaagaactatcgtgcttaaggcattattatgattaaaaataaactgattgcagctgataagaatcgtgaattcagctcattatagtctcaacgtactttgtgagcactttgtattgcctcgcttcggttgatttatttatttctttttgggtttggtttggttttgttttggtttgctttctattttctatagttgataaggataaaattggttcatactcgaattattgttttacctcagaacataaaatagttgcaaataatacaaggcagagagattgatgttttaagcagtaaataaaggaatggtatattcatataaggattatatatacattcaaaatccaataatatcaaatatttcggatatctcaacaatcttgccaaaagtcggaaatctcgccaataacgttattttttgcttataaagaaatctgtttgccgttgtttttgcacaaacactcaaacacacaagcccagctgataagatagtcgagagtccatagaaatgccaaaccgagaactatacgaaagtaagaaagtaagaaagtgcgggcagaaggaagtgggtgcggatgggatcgaatttagcgcgtgcccaaatgtcccgttaatgaatacatttgtgtgagctgcggtattcgcttttgtgggttctggattttaaagtgaccgcagtgagtcatgcgaatgaataaatcacagcgggacccgctttaaatttaatcgaatttcatcatagaatggaatatattgcacccgttgaaagtatttacatatgtacatttaaacatttatgtgcattttttatatcgattcgttgaagagatcgagatctttacagaaaccttaaaagctgctggcttagtattccaaaagcaaggtcaagttcaaaaactttgtttttccatacagttcttttctcttttgaaccaaactgcatttggtatatgtatatatgtatgtacatatatgcatatgtatgatgctcctttccaatattgacaagatgatctatagattcgtgtaaatttgccccattaagggcaggcaatccaaggcccggtcgcat

SEQ ID NO: 24692 - DNA, 3623 bp, DROSOPHILA
cgtaataacaataatgagccagagacgattggtggctaagtatgtacactggcgaaaatacctttcagcaagcataaccatagcttcctttttacaggatccagataaaacgcgcagataaaaatgttaggcagtgacatctgttgcagatgaaaaggattaagaactacagattcaaaaggctgctccttttctttcagtgtgagagagggagagagagagagagggtttaggtggaggcaagtcggcaggggagcaggaagcatgaaattgagagaaaataaggataaacaagccgaaggatatgggacggcactgttgcttcgcaagtgtgtgtgtgcacgtcctgaccgcgtgcacacacacgccgtgtggccgtgtataagtgtgcgagcgagagggggcgatcgatggtgtgagtgactggcaatagccgccgcgtcttattgacattaaaaccgctgctgctgccgccgccgccgtcgccagtcgacttcacatatacccgctctctcgagtccctccccataccattccataccatcccatccctaccattcatcctggctcgttcttcttcctcttttatttttaaataacacccggcgcagatgctaaacaagacgccagaaattaaagtgcaaaggtgtgtgctgcagcaacaacagcaacaacagcaacaacaacagcgtcctcgacagaaggacgatactttggcgttgtacttagcgtcaaccgaagaatacgaagacaaggaccgcgaacaatgtgggatcaaggatctaagcagatatatatgtatgtatgcacatataccaaatgttccgagcgtccacatggtgcggatttaatcacgcacacacattggcattcatgaaaggatatcggatatgtatagagtatcaaacggaaccgctgcgcaagatggaaaacagatttgatcgctaatcaagtaaatagatgatacatatcattgtcaaacttgaaattaaatgaatcaaaagtactgaacatcctgaatcaagcaaatgacatatggcatcctatgtgaaaaaataatataaaggatctcttagtgatctcattcaagattagccaactatctcctcgtgatattataaaatatttacgactcactcatatctactgattcatgcactcctttgctaagagagttatttataggaactgtgatctaagaaggaaaactggtggaaacaatatgggctttttcggaatctattttaggtcacttgttaatattgttccattgcatatttaatccatatgaatttggtctgtggtttctgattatcaattttcaaagccctaattgcagttgaaaaaccgcagtggaaaaacacatttcaattcgatttgaaatgaagttcatggaataaccgaaacgtagtttaaattttaattaaaattttaatacagtttgtcaagtattttcgttccaaatcaaatttgtttaggtttacaagcgtaatttttattgtttaccaacgtgatagatgtacaataaaaatatataaacgatctagacccaagcaattgcattaaaaacttgacaagctgtatgtacatctacattattttcgagtaaaataacaacaagataaagctggcttgttctcaacaactatcaggctaaaaaaaaaaaatgaaaataaaaacaaacagaatcgcaaaaaattgccgaatggaaattttgtggcacgcaaacttgttgctccatctgcgtgtgagtgagatgtgtatgctagtgtgtatgtgagccagtctatgagcgcgcgagtttgtgtgtgtttgtgtgcgaggagaagcttactttgcgatgtttaaataataaatgatttatttatttttcggtttgtttttgttttgatttccacctgggctgatgcattttggtgcccacttttacgagaaaacgccgaactaatcgttttcgttatatgtatttattattatttttttgttgctttttgcatgtcaccaacagaaacagaaaaaaaaaacgaaacgaaacacactgaaaaacgcgcgcgtacacttgtatatatgtgaatgtgcgctggtattggcgcgcgtgtgagtgtgagcgaatttgcaagagacggggcgtatgagcaatgccgtggcgaaaactttgccacttttgttgtctgcgacgaaagcaaaaacagcgagacaccgtaaaaaaaaaaacaagtaatataaacacagctttacatgcgcagtttttgttgttgtttttatccggctgctgtggcgttgcactgcgtattactgttttacactttttttttactttttagagcgtccgcgttgcggcgacgcgttgtaagcggttcgaaaggtagcgcagcactggcgctctgccgccaattcgaacagctgagcgccagccgaagagagagagccgaagagtgccgaacgacgcagctccgctaccactaccaccgcaatggcgctcagtcgcggtcgctgtgcgctgctgtgctctgctgtaagcgctcttacattccgcgcccgaatttttcgtgcttttcccttgttttccctgtgggccagcgtttcgctgctgctcggactcggtttgggccaacacttgtcgcctcttggccattatgcaacgacagcgaaacgaaggtgctcacgaagtggccaagctgctctctgattggtcggcggtcagtgccacgaggccagccgaagttctctcgcgagaacccaagagcactctctccctctcttttgggagagatgagatagcaaagaaaagccaaaacactagaacaatccagaagccaagttttccggcttgcacatacgccgtataatccgcattttttgcgaactctaaactcgagtctatcagctataatattacaattcgttcactataaacaaataaactaatataattttgctcagaaatcgatgcactatgatgagagaatagtgaaaaacaattctcagttaatagcttttaaactgctctgcaaatgggaaaacaaattaaaatatacacattttcatgccaaataataggatatcctatccttcattatataagcataaacaatgaaaatattctagctcgctttgatcttttaatgtgtgtataatgtattagtacgtgtactttagtcaaagaactatgcacaaataccggttgaactttttttgggtatggaaaagcaaccgcatgtgagcgaaaagaatgtttggggattgaaggcgtgatattgggcggagtggccaaaacattggcaagggagccatcagcatcagcatccacatccacattcacatccacatcatcgccagcgtcgagagctctttcgatcgaaataaattcgaatcgagtgcgattcgtcaacaaggcgaagataaagatttcagagcaatagaacagaaaatcaatgttattcaatcaaaagccaatgcaaaattgctttgcactctggcacactgctatgtaaatatgttagagattcaacttttacaaattctattttccaagtccaagtaaatattttaaagaactatcgtgcttaaggcattattatgattaaaaataaactgattgcagctgataagaatcgtgaatt

SEQ ID NO: 24693 - protein, 180 aa, DROSOPHILA
MRSFCCCFYPAAVALHCVLLFYTFFLLFRASALRRRVVSGSKGSAALALCRQFEQLSASRRERAEECRTTQLRYHYHRNGAQSRSLCAAVLCCKRSYIPRPNFSCFSLVFPVGQRFAAARTRFGPTLVASWPLCNDSETKVLTKWPSCSLIGRRSVPRGQPKFSRENPRALSPSLLGEMR

SEQ ID NO: 24694 - DNA, 7594 bp, DROSOPHILA
gatcgatctgtgctgctccatcgaatgcgatgaaccctacagctacgtttggttgcgaaatggcgagattctgccagacagcgatgagttcaagtgagtataaatctttagttcattgaaatatattgagttgtaataacttgaatacataattagttataaaaacattgttaaattgctcagttttttataagcacccaatttccagcgattagcttggattgaataataaaagcgaatggtttccctttgtttcgaactatccacatacttatggcactttcattgctcactgcagttacattgatcacggcaatggacgcctctgcctgcgaatcaacgacgccttcgacattgactccggcatctacagctgtcaggtgtttaccagcgacatcaacgactccacctccgactccaccttcgactcccattcgatctgcagcttaatcaacagcggatgcagcgattgcagcagcagcggtgagctgtgcgtcctggagcgtgatcttcgtggccaggatgaagagtgtgttcagctgctgaagacgccacttccggtggtctgcgcatccggcgatgaagctctcttctacgcccgtgttttcccctgcgatgcggaagccgactggtatctcaatggccagcttttagcccaagcggatgactcacttaacatgacggtgcgtatgcgtaataaacgtaataaatatcggaacgctgtgctttttggcccaaaaaaacaaaaccgaagacgaaagcaaaaacagtgctcttcattttcaacacttgccttgccgcaggctgcttgttcgcacttttggcggcgaaaacaataataataattgtgtatatatctacatatgtatgtatgttgtatatattcatgtacatttcgacccgaatctgcgagagagtatgctcatttgcataagccgcacatatgaggagctgccaaaagatgcgagctgcatgccaacgaagttgctgcccgggattcattcgttcatcggcgctcgagcggtgcacatcgcgtgccatcggtatctcagacccaatcacccaccccacccccctatccagatgatagggcaatcgaagagcccggctcaaaccgaatcagaatccaaatcccaatcgatcggcacaagggcgtgacaagatgtcacaggtaggcgatggcgagccaaatggattgcaagtatcaatatcgctggcgttcggtttaagcccccataactattcccattcgcattcgcattcgataaggaacgccgcgtcgtttgtgctccaatgaaaatgagagcgggcgtgaaagtgtcattgtcacattgttgtccgctcatggaattccgctcgtggcgtagtttttagctcccatccgttcccgcttctcgcttaattggtgcgtgccacggagagggtcgctcagttctatagcaacctcagtccgatccgcgtcacgtcaccagcagcagcagcaccttgctccggagtcggttcgcccggattcgaattcggattcggattcggatcgcccccctctccagacacttgtgcacacagtatataattgtttacccatgcgagcgaggcgtacaccgcgagaaaagtaaccagtagtttgtgaaaaagttaaaagttgtggttggttaataaatcatcagcttaaagtagtttcatggaatatatttggaataaagtttcaaatccacagcctgatatacaataccatataatccaaagcatattaattttattatattgcttaataagcaaaaaatataaataatttagcttttcaaatcgattttaatatcatctctatagagaaccaaaacttgatcagaagatttcaatcaacaatgtttattttccaataaaatttcaattaaaaaagcttttgagaatgtacaataatttggttcacttaaagaacaataattctttaattgaaacgtaatgacagaaataagtggcaagcttttgtctcagtgcatgtgcgattttcagctaattttccacatatttcctctccctttttttttccagttggagtcttatcccgagaacggcattcggcttctgcgcatgcgtgacgtgaccgcatcgagaagcggcgagatctgtctgcaggtgaagcatccccaggcggagttccgtcgaattccgaccacacgcacctacaccagcctcctggtactgcccgccatccgtggcaacagctccagttcctcgctggcggccagaagctgcattttgacacgccccgaggactgcaccgccttgatcggtggacatgttcggctgagcgttcgctacgagccattcccgggcaccaaagtcatctggtacaaggcggtgagtagtggggcataccccctatatatataaatagccacacatctcgatgtggcgatattcggcttaaggtataactggtctggtggtgttgtgcaatcttgacctaatttggataaaacaggcagcaggcagcccagaggattacggatacatattccatataccacattctttatctgccataagcccactcggcggcaccctatctcgatagtagcccccactgtgtcgcttttgggcatttagaccaggtctctctgtactgcgacttctgctccacggtgactgtgtcacgatcagtttgcggtgttgttcgcttgggtttgctgggccagttgggttgctcgggtggtgcttgtgttgcttcgattgcctagactggctacgtaatggttgcaaaccgcaaatggtggtcgagtcgcaccaacgaaggttgactgcgtcgatacacgcgaaacaaatcagcaccaaattgagctatacgtcattccataactttatcttaaagagacagtcgaatttatcttgttttcacacctcatgctaggtaaacaataagatataataccatttgtacttttccaaaaactttaaaagtgtggcaagtattgtggaaacttgggctgatatcttttttccagtgcaccatctatgtctacttctcacacaaatctctcttcggtccacagtgtcatcccattgtggaaagctccaatgtgacgatccggacgacgagccaacagtcgacgctctacatcacggacatctcggcggacgacagcggcaagtatacggttgaggtgatgaacgactatggcgtggaggcagccgctgcctcggtggcagtggaaggtcctccggagccaccaagtggccagcccagtgtatcgctgggtccagatcgcgtggcagtggcctggtgtggtccaccctacgacggtggctgtatgatcacaggttttatgtgagtatcaaccgtttacggtatacttccacacaaattgctaatacaagccccgctttccttcagcattgagatgcagaccattggcgatgagaactgcgatgaggacagctggcagcaggttacccgagtggtggacagcttagcgtacaccgtcaaaaacctccagccggagaggcagtaccgattcagagtgcgtgccgagaatatccatggacgcagtgcacccggccaggccagcgaactggtacagattaccaatacgccacagaggagcacatcatcggatgccagcgatcgtttcggacaagcgacagtgagcgtgcagtctggtggagatttcaaatcccgcttcgagatcatcgaggagctgggcaagggacgatttggcattgtctacaaggtgcaggaacgcggtcagccggagcagctgctggccgccaaggtgatcaagtgcatcaagtcgcaggatcggcagaaggtgctcgaggagatctccatcatgcgcgcactgcagcatcccaagctccttcagctggctgcctccttcgaaagtcccagggagattgtcatggtgatggagtagtgagtataactacacatatctttagagaatcaccactgaccaattttcgaattccctagcatcactggcggagaactgttcgaacgtgtggtggctgacgacttcaccttgaccgaaatggactgcatcctgttcctgcgacaggtttgcgatggcgtggcctacatgcacggccagagtgtggtgcatctcgatctgaagccggagaacataatgtgccatacgcgcactagccaccagatcaagatcattgactttggtctggcccaacgactggatacgaaagcacccgttcgggttctctttggtactcccgagtttataccaccagaaatcattagctacgaacccataggtttccagtccgacatgtggagtgtgggcgtcatttgctacgtgctgtaagtggagcatttggagcatattatctctatgggattaactgtaactttatttttgtagactctcgggtctgtcgcctttcatgggcgataccgatgtggaaaccttctcgaatataactagagcggattacgattacgatgacgaggccttcgactgcgtgtaagttggtatatctttagccaagattctttaatccttaatacacttcatttagttcgcaagaggccaaggatttcatctcgcagctattggtccaccgaaaggaggaccgcctgaccgcccagcaatgcctggcgtccaagtggctgagccaacgaccagacgatagtctcagcaacaacaagatctgcacggataagctgaagaagttcatcattcgacgcaagtggcaggttagtaaatgcttcatgctcgctgctcccaaatattttaaccctgctcctgctgcttctgctgctcctcctgctgctcctgcttccgctaatccagaaaaccggaaacgccatccgtgctcttggtcgcatggccaatctttcggtgtcgcgaaggaactcagccattgccatgggagtactgagcagtccaaggccatcgatatcgggtctgggcatgctgaccaccagtgccattgggagtggaaccagctcccagatgacatcgctccacgaagaggaggacgacttcagcggcgagatgccgccagtggagaagcgcaccgttctcaagctgcgagataaatcccagtgcagtgaacgcagtgattcaggctacagtgagtgttccaattgtagtggagcccaggagacgctgctactctcgctggccaaatccaaactggaggctatagcgaaggcgagcaccttgcccacggtggtgcacgatacggagcaacccgttagcctggagctgcccaccaagggcgaagccatcatgcgctccgactttaccaacaccatcaagatgcgcaagaagtcactggaggacagtgctgcacgggagaaacccaggtccaaaccccaggtcaagccgctcttgtgtgagtccaagctgaaggtgtcccagctgaaggacaggttccaggtgtcccctgctcctgcttctgcatctgcatccgcatccgctgctaacaaacctccgcttgcctatgggcccttcaaaatagccaaagtggcgagtgtgggacgcatcagtagaagtaatcattgcttgtgaccccaaacggatcttgaagtcttgctaggattctttaaactatagttagaaacatcaaaataatctgaaagttacttaaacatggcgaaattaatagaaagtaacctagcctttgcttaactaaaaccaactgattttaactttctaatcaaacgatctctataaatttaactttacttaagctcacctacaagctacctaaaataacacatatttaaacaattaatctaaggttatatttgcatgataggataaccaaagtcttgcaaaataaaacctaactgtccatatatgatcataaatatgacattaagatccgtttagggtttgctcttgaaatcaaacgtatgactaaccgcctgattgttttccactttgcagcagaggagccgggaaggagcggtagaggcgcacccagtgtatccggcaaaggcaagtcaccccaggtgcgttccatgcccagctctccgctgcctcagcgatccgctacgccgacgcggctgatgagccaacgtgtccgtgaggcggccgagcgtcttgcccaacagcacacggtggccagtgctcagcggcatttgggcaatgggagaggcactggcactggcaatggaaatggcaatagcaatagtaatggcaatggtaatgggaacaccgcggagacgaatcgcgaatcacgcgcgcgacgtctcatcaaccgattcaatagcgaaacgcagcatatcacgtcctagtttaagtcggttaaatgccgacgagcataactttattacagataaagcagatatagcattgtttaagtaaaaaatatatatatataccccagagaaactttacgaaacactcgaatatgaatgcgactgcggatcagcatcccacccacccacacacacacgtctacccactcacagtaggatatatgtatgtatgtctgcattcaagcggatgcactccctccgttcagagggaactgtacttaggctagaggaagctaagtgtttaaattattgtatcgatttatatacatatttaccatactaattaaagttaatgtaacgaaaacgcaggatcagtaatcttatttagttcaatggtaatcaatgtgcgattagcggatgatcgcgctccttgagtcgcacccacagtccgccggaggctctcagcgtaatccggaaggtggccgcaatggttgtctttccggttacaggaagcagctggtagctacgcagcaggcgcgacactatggtcttgatctccatgatggcgaatcgattgccaatgcaatatctcggtccagcgctgaagggtaaaaaggcgtagggatgacggttctcggagttctcgggcgaaaatcgctccggctggaacttttccggatcgggataaatgtgggcaagacgatgggtggcataggggcaaatgaaaacgttgctgccggcgggcaatgtgtgctttgccaggcgaacctcttcgcccagtttacgagcaataagcgggacactgggatacagacgcagtgcctccttgatgcacatctccatgtaacgcatctcgtgcagatccgtcatcgtgggagctctattactgtcctcgaatatggtcgccagctccaggacacagcgatcctggcactcgggattctgtgtcagcagaaagagagtgaaagccacggcggcacccaccgaatcctggccagccagcataaaggtacaggcctcgttgacgatatcctcctcggtgaagtcccgattgctctcggagatctcgatcatgtggtcgagcagacactttcgctcgctattgccattattattgttctggatttggcgacgtctctggatcattttgcgtgtgaagtcattgaggcgcttcttctggttaagctcatcgttggccatcttggtccagtggtagatcccgtccagcagcagccagggttgcgtaaaccgcgcgggcatcatgatcttgccctggcggaacggcgagtcctccatcatggccacatcctgacctcttttcttgatcggcacacccaaaacggcctctgcaagtcgttcagggattaa

SEQ ID NO: 24695 - DNA, 3284 bp, DROSOPHILA
attcgttcatcggcgctcgagcggtgcacatcgcgtgccatcggtatctcagacccaatcacccaccccacccccctatccagatgatagggcaatcgaagagcccggctcaaaccgaatcagaatccaaatcccaatcgatcggcacaagggcgtgacaagatgtcacagttggagtcttatcccgagaacggcattcggcttctgcgcatgcgtgacgtgaccgcatcgagaagcggcgagatctgtctgcaggtgaagcatccccaggcggagttccgtcgaattccgaccacacgcacctacaccagcctcctggtactgcccgccatccgtggcaacagctccagttcctcgctggcggccagaagctgcattttgacacgccccgaggactgcaccgccttgatcggtggacatgttcggctgagcgttcgctacgagccattcccgggcaccaaagtcatctggtacaaggcgtgtcatcccattgtggaaagctccaatgtgacgatccggacgacgagccaacagtcgacgctctacatcacggacatctcggcggacgacagcggcaagtatacggttgaggtgatgaacgactatggcgtggaggcagccgctgcctcggtggcagtggaaggtcctccggagccaccaagtggccagcccagtgtatcgctgggtccagatcgcgtggcagtggcctggtgtggtccaccctacgacggtggctgtatgatcacaggttttatcattgagatgcagaccattggcgatgagaactgcgatgaggacagctggcagcaggttacccgagtggtggacagcttagcgtacaccgtcaaaaacctccagccggagaggcagtaccgattcagagtgcgtgccgagaatatccatggacgcagtgcacccggccaggccagcgaactggtacagattaccaatacgccacagaggagcacatcatcggatgccagcgatcgtttcggacaagcgacagtgagcgtgcagtctggtggagatttcaaatcccgcttcgagatcatcgaggagctgggcaagggacgatttggcattgtctacaaggtgcaggaacgcggtcagccggagcagctgctggccgccaaggtgatcaagtgcatcaagtcgcaggatcggcagaaggtgctcgaggagatctccatcatgcgcgcactgcagcatcccaagctccttcagctggctgcctccttcgaaagtcccagggagattgtcatggtgatggagtacatcactggcggagaactgttcgaacgtgtggtggctgacgacttcaccttgaccgaaatggactgcatcctgttcctgcgacaggtttgcgatggcgtggcctacatgcacggccagagtgtggtgcatctcgatctgaagccggagaacataatgtgccatacgcgcactagccaccagatcaagatcattgactttggtctggcccaacgactggatacgaaagcacccgttcgggttctctttggtactcccgagtttataccaccagaaatcattagctacgaacccataggtttccagtccgacatgtggagtgtgggcgtcatttgctacgtgctactctcgggtctgtcgcctttcatgggcgataccgatgtggaaaccttctcgaatataactagagcggattacgattacgatgacgaggccttcgactgcgtttcgcaagaggccaaggatttcatctcgcagctattggtccaccgaaaggaggaccgcctgaccgcccagcaatgcctggcgtccaagtggctgagccaacgaccagacgatagtctcagcaacaacaagatctgcacggataagctgaagaagttcatcattcgacgcaagtggcagaaaaccggaaacgccatccgtgctcttggtcgcatggccaatctttcggtgtcgcgaaggaactcagccattgccatgggagtactgagcagtccaaggccatcgatatcgggtctgggcatgctgaccaccagtgccattgggagtggaaccagctcccagatgacatcgctccacgaagaggaggacgacttcagcggcgagatgccgccagtggagaagcgcaccgttctcaagctgcgagataaatcccagtgcagtgaacgcagtgattcaggctacagtgagtgttccaattgtagtggagcccaggagacgctgctactctcgctggccaaatccaaactggaggctatagcgaaggcgagcaccttgcccacggtggtgcacgatacggagcaacccgttagcctggagctgcccaccaagggcgaagccatcatgcgctccgactttaccaacaccatcaagatgcgcaagaagtcactggaggacagtgctgcacgggagaaacccaggtccaaaccccaggtcaagccgctcttgtgtgagtccaagctgaaggtgtcccagctgaaggacaggttccaggtgtcccctgctcctgcttctgcatctgcatccgcatccgctgctaacaaacctccgcttgcctatgggcccttcaaaatagccaaagtggcgagtgtgggacgcatcagtagaacagaggagccgggaaggagcggtagaggcgcacccagtgtatccggcaaaggcaagtcaccccaggtgcgttccatgcccagctctccgctgcctcagcgatccgctacgccgacgcggctgatgagccaacgtgtccgtgaggcggccgagcgtcttgcccaacagcacacggtggccagtgctcagcggcatttgggcaatgggagaggcactggcactggcaatggaaatggcaatagcaatagtaatggcaatggtaatgggaacaccgcggagacgaatcgcgaatcacgcgcgcgacgtctcatcaaccgattcaatagcgaaacgcagcatatcacgtcctagtttaagtcggttaaatgccgacgagcataactttattacagataaagcagatatagcattgtttaagtaaaaaatatatatatataccccagagaaactttacgaaacactcgaatatgaatgcgactgcggatcagcatcccacccacccacacacacacgtctacccactcacagtaggatatatgtatgtatgtctgcattcaagcggatgcactccctccgttcagagggaactgtacttaggctagaggaagctaagtgtttaaattattgtatcgatttatatacatatttaccatactaattaaagttaatgtaacgaaaacgca

SEQ ID NO: 24696 - protein, 913 aa, DROSOPHILA; identical to SEQ ID NO: 15222

SEQ ID NO: 24697 - DNA, 4785 bp, DROSOPHILA
ttgaatgtaagtgacattcgcagaacgttttcgatatactcctacataaattttgaagtgaaagcaatgaaattaacaagtctttgattcgaaatattgcatggcaggtggagcgagtgttgtaatgatagtaattattaataatagtaatgaataatctccaatattctcataggacacacctacccagttggctttgtgtccggcaggcgatggaatctgtaataattacagcatcagttatacttatagtgactggaatggtttattgtaaacaatgagctataccaacgcaaacacacaaatctatatacgaagtgttgaatagttgttaaactcatgacacacctcaaaagtgaagtgagtgcaatgtaatattgtaattgattgaatcgaaagtggcggacaaacagaaacagatcaagcgaacaactgagaattgttatgaaatggattgcatagtttatagaaacgttttcatgtaacaagctgcaacagaacttcattcactcacaaatcacacacgtttgtaatgtaatattgataaataaatgtaataaaattataatatatctgtaataattgtaacagcacactacttacgcaataattttagtttagtcgtttagccttagtttctctctccatgcattacatgactctagtttagttcagttctatttttttccaagagcgctgctatagtgatattaacatttacagagcaaagatttgtgtacattgtaatttgtaaagtttacatataacaattgaaaataaatttaacactgatcaacataagcatgcgattcgacagtttaaagtgacacataaattgaggaccgctcgattccaattacatttatgtttattattgattagcattatagaacatgcttaactaaatatacgaaatatacaacatacatataatcatggaagttgggatttactttttcgagtaaatgatatttattcagcaacctagtagttagttgattcaaaaatgtttactgatggctcgagtgaacctctcatagtttcgctccttccactgcacattgatgagcattgtctccaaactttgactgatggtctgttctatatccttgagctgatccttggaactggccatgaagttcataaactcatcatagtccctttgtgtaaagatttgttcggaaagtggcggcagaagttcagacatagattctgactgaggatggtagctagaaggttgtgttagcacaattattgtgttatactgcaagaatcaatctaatttatatactcacaacttggaaatggagtccacgttatccatcaagtacttcttggccaaaaggaaccctacttccgaatcggcaatcgcctgaaagacagaagttgaatcctgcttccgaatgtcccccattccgtcaaagttcctttccaaatatctctgcagcacccagacctcctgcgaacaacccagggaatccagaatgatttgcttttcggtggccacattagccttctggtaccgagtccacaggaaatcccaatcctcgtcacagccatgtttgatcgccgtgcagtacacaacgccccgaatgcccagcggcactgggttaacctcgtcaggattagcctctgatcgccagctacggtagaagctcaaggcctgggtaacgcaatcggaaacctcgaacgagcatgcccagtccgccactatcgccttcaaaatggtcttgtcctgctgttcttcggaggcgactgtatcgttgatgccattcaggtgctcatatatcggagtgataagcctccttgtaaagttctgtggataagaaactgtagttgaaggaaataacctctggccaaagttaccttgaaaaacctaaagttcggcgtctgtcgaagaatgccactaacgaactgcagattgtcgaaggccgatttccagggaagaagctcccgttccctctccagatagctgatcacctgcagagcgatctcgtagtcctgctcccctgtccaagcgaagtacaggacatcgtctatgagctgggccctgttgaccacatggatggaatgataatcctcgctgttcaaagtctcaatcagaagtttccagttctgggcatcgtagttgaccttatacggcgccgaaagttggttgttaaagattacccactgatcgggtcctggcagatcgtgaatggtcttgggaacactttccagaaccagtcttatgggcagcttgggtaagagattcccaaagattgtcctgctcggcgttcttataagtgtatttctccagatatgacttaagtcctgttcggaacgcttcctcgcccaggaacaagtgcatcatgcgaatcaccgacgatcccttctggtaagagatttcgtcaaagctctcagaaatctgcgaagtcatttcaatgggtctcgaaatcggatgactactctccagagagtcctttcggaaaatggtaagaaggttggacattgattccaattgaagggtacgccactgtggatggatgtcctccacacacaaactggccacataagtggcaaatccctcgttcagccaaaggtccgtccaccacttcatcgtgaccaggttgccaaaccactggtgggccaactcatgagccactatattcgcagtctcttgcttggcctcctgcgaggagtactccggggaatacagaagggtgctctccgcaaaggtaaccagaccccagttctccatggcacccgcactaaaatccggcacagcgatctgatccaccttgggaagcggaaacttgatgccgaataactcctcgtagtatttgagtactttgggtccaagctccgcggcataatcacactgatcgatcgcatttggcctggcccaggtgcgaaaaagagttccattgggtaaagtagatggtttgtgggagaaatcatttagggaataggcaaccagataggtggacatcggcaatgattcctcgaacgaggtccatacataatccggaatggattcactgcaaaaaagataaaaatttgttgtttaactcttattgaaccaattttgaaatccaatttactgtggccttgtttcattcacgggcatgttgctgagaccggtgtacttcttgtgataacccaaggtgatggcaaaggatgccttgtagccaggttcatcgaagcagggaaatgccagtcgagccgcagctggctcaaactgagtaacggagatccatctaaaaaaggattgaatgaatttaaaagattgtgtctaacatcatttaaaaccattccacacctcgtttcattggccactgtattgacataggaacttcggtagtagcccgccagttgatcttgtaacttggccgaaaagggcaaactcagctcataaaattgtccagccaatagctccttacacgtgttgagaatgtagaagtcgtgtgtgggattcactgccgtagacgttatgcagttctccgttgtctcttctccgccaatttggctgagagtgatttccgtatcatcgatggtcagatcctttgagtgcaaagttatattgtgtgtgttttgcaaaacttctatttgaattttcacagttccgttgaagtgaaaatcgtccggattttccaattgtgtcaggatgcgaacatcgtaactttgtggtcgaagagccgttggcaagcgaaaatggtcataggtgctaccttcccccgcaaaacttaatccaagtgcagccagtatcaggaaaacgcacttcatcgtcaagttttaaaatgatgttgtgaacaaaactaagaaagtaataaatattatgtatacgccacttaagcccataacacacttagcataagtctaaagtaaagaataattcactcaaactagtttttcctattggtgtttttgggtttccaaaacatagcagctatacatatttagaacgaggtcgataacctcaagcatttcttatcattttgtccgaaattatcatgccaatataaaaactttcaaccaaatgttaattagcttcagttgtgatttaatcgttgccatgttactgcttgtgttatttttttttttcaataattacatcaattgttgaatgaatcatttgataacaaaaactgcacttcatatgaaatgtttataacaagtaagtaagcaatacacttcagttacttaatgtacaaaataaccaggttttatagaagtagcttgtagtttcccacctctatttttagtaatcaattagttctgtgatggtttttccttttctgtggcaataactaaactagtttcagctgcaatacgggtttccacatacacatctaatcacaacggagagccaacagcgaatgccgcaaaatcgtcgattcgatcaaataaaaagaattccgagcacgttggttcgcgagaggtgaacaacaagtagagattacccgagagatcagagaatattcattattttttacaatttcctatttattaagcattataagaggtatttaatttgcggtttagttgtttactaactgtagaaagtctacaggaaatgtttgattgtccgggtcaacttatcatagtttcgctcctgccactgcacattggtcagtattatctccaaaggaactcctgggaatcggccaaaaatagcttgaactcatagtagtccttccgggtataaatctgcctttgaaagggttccagaagtagagggatgcttttcattagctgattatagctcaaagaaaaatattgaatgtatagatatcaaactcaaac

SEQ ID NO: 24698 - DNA, 2465 bp, DROSOPHILA
catcattttaaaacttgacgatgaagtgcgttttcctgatactggctgcacttggattaagttttgcgggggaaggtagcacctatgaccattttcgcttgccaacggctcttcgaccacaaagttacgatgttcgcatcctgacacaattggaaaatccggacgattttcacttcaacggaactgtgaaaattcaaatagaagttttgcaaaacacacacaatataactttgcactcaaaggatctgaccatcgatgatacggaaatcactctcagccaaattggcggagaagagacaacggagaactgcataacgtctacggcagtgaatcccacacacgacttctacattctcaacacgtgtaaggagctattggctggacaattttatgagctgagtttgcccttttcggccaagttacaagatcaactggcgggctactaccgaagttcctatgtcaatacagtggccaatgaaacgagatggatctccgttactcagtttgagccagctgcggctcgactggcatttccctgcttcgatgaacctggctacaaggcatcctttgccatcaccttgggttatcacaagaagtacaccggtctcagcaacatgcccgtgaatgaaacaaggccacatgaatccattccggattatgtatggacctcgttcgaggaatcattgccgatgtccacctatctggttgcctattccctaaatgatttctcccacaaaccatctactttacccaatggaactctttttcgcacctgggccaggccaaatgcgatcgatcagtgtgattatgccgcggagcttggacccaaagtactcaaatactacgaggagttattcggcatcaagtttccgcttcccaaggtggatcagatcgctgtgccggattttagtgcgggtgccatggagaactggggtctggttacctttgcggagagcacccttctgtattccccggagtactcctcgcaggaggccaagcaagagactgcgaatatagtggctcatgagttggcccaccagtggtttggcaacctggtcacgatgaagtggtggacggacctttggctgaacgagggatttgccacttatgtggccagtttgtgtgtggaggacatccatccacagtggcgtacccttcaattggaatcaatgtccaaccttcttaccattttccgaaaggactctctggagagtagtcatccgatttcgagacccattgaaatgacttcgcagatttctgagagctttgacgaaatctcttaccagaagggatcgtcggtgattcgcatgatgcacttgttcctgggcgaggaagcgttccgaacaggacttaaactggttctggaaagtgttcccaagaccattcacgatctgccaggacccgatcagtgggtaatctttaacaaccaactttcggcgccgtataaggtcaactacgatgcccagaactggaaacttctgattgagactttgaacagcgaggattatcattccatccatgtggtcaacagggcccagctcatagacgatgtcctgtacttcgcttggacaggggagcaggactacgagatcgctctgcaggtgatcagctatctggagagggaacgggagcttcttccctggaaatcggccttcgacaatctgcagttcgttagtggcattcttcgacagacgccgaactttaggtttttcaagaactttacaaggaggcttatcactccgatatatgagcacctgaatggcatcaacgatacagtcgcctccgaagaacagcaggacaagaccattttgaaggcgatagtggcggactgggcatgctcgttcgaggtttccgattgcgttacccaggccttgagcttctaccgtagctggcgatcagaggctaatcctgacgaggttaacccagtgccgctgggcattcggggcgttgtgtactgcacggcgatcaaacatggctgtgacgaggattgggatttcctgtggactcggtaccagaaggctaatgtggccaccgaaaagcaaatcattctggattccctgggttgttcgcaggaggtctgggtgctgcagagatatttggaaaggaactttgacggaatgggggacattcggaagcaggattcaacttctgtctttcaggcgattgccgattcggaagtagggttccttttggccaagaagtacttgatggataacgtggactccatttccaagttctaccatcctcagtcagaatctatgtctgaacttctgccgccactttccgaacaaatctttacacaaagggactatgatgagtttatgaacttcatggccagttccaaggatcagctcaaggatatagaacagaccatcagtcaaagtttggagacaatgctcatcaatgtgcagtggaaggagcgaaactatgagaggttcactcgagccatcagtaaacatttttga

SEQ ID NO: 24699 - protein, 814 aa, DROSOPHILA
MKCVFLILAALGLSFAGEGSTYDHFRLPTALRPQSYDVRILTQLENPDDFHFNGTVKIQIEVLQNTHNITLHSKDLTIDDTEITLSQIGGEETTENCITSTAVNPTHDFYILNTCKELLAGQFYELSLPFSAKLQDQLAGYYRSSYVNTVANETRWISVTQFEPAAARLAFPCFDEPGYKASFAITLGYHKKYTGLSNMPVNETRPHESIPDYVWTSFEESLPMSTYLVAYSLNDFSHKPSTLPNGTLFRTWARPNAIDQCDYAAELGPKVLKYYEELFGIKFPLPKVDQIAVPDFSAGAMENWGLVTFAESTLLYSPEYSSQEAKQETANIVAHELAHQWFGNLVTMKWWTDLWLNEGFATYVASLCVEDIHPQWRTLQLESMSNLLTIFRKDSLESSHPISRPIEMTSQISESFDEISYQKGSSVIRMMHLFLGEEAFRTGLKLVLESVPKTIHDLPGPDQWVIFNNQLSAPYKVNYDAQNWKLLIETLNSEDYHSIHVVNRAQLIDDVLYFAWTGEQDYEIALQVISYLERERELLPWKSAFDNLQFVSGILRQTPNFRFFKNFTRRLITPIYEHLNGINDTVASEEQQDKTILKAIVADWACSFEVSDCVTQALSFYRSWRSEANPDEVNPVPLGIRGVVYCTAIKHGCDEDWDFLWTRYQKANVATEKQIILDSLGCSQEVWVLQRYLERNFDGMGDIRKQDSTSVFQAIADSEVGFLLAKKYLMDNVDSISKFYHPQSESMSELLPPLSEQIFTQRDYDEFMNFMASSKDQLKDIEQTISQSLETMLINVQWKERNYERFTRAISKHF

SEQ ID NO: 24700 - DNA, 2879 bp, DROSOPHILA
tcgactcacaagataagatgtagttttacacatctttatagtcaagtggcaagggtagataggttggggtaaggacgattagagtgttaaacaaatgttttcctagtcatagaaaatacatatatttgaaatcataaaagacgagcttttatcttcggttagcaacactcgtgtgcaccaaagcatttgaaacgtttatgaaatggcgcccaatgacttgtaatcgaaagcaacaccccgatcaccgatggctttcacaaacatatgttgcgtgctatcgatagacggtggaaacaacacgtgcactcgtgttttgtatttgtgttgtttgcatttgatttcatattagactaaaccgaacgcaaaatgagtgaatccgcaccggaaactgtgccagccaagaagccggcaaaggccaagaaggcggcaaagccggagaacagcataccacgcggccagcccaagtcgaaccggccgtggaagacgcccaagcagaagtaagtggtgtttctccattgtgcattgtgcattgtcatctaatcaattggcttcgcctgcagatttagcaagattaagaagaccgttaaccgactgtccttcgaaaagaagacggccctgcgcgacgagctgcgctacatcaaggagcgctccaaggagatcaaggacaagcgcaaggaggatgccgtccaaaagcaccagcgccgcgtggagaatgccgagcgccggctggcgaacgagcgccgctcggaggtcgtccaggtcatcaagaatcccgccaagctgaagcgcatgaagaagaaacagatgcgcatgatcgagaagcgggacgtcagccaggtgaaggtggtctgaggtggctccattagattaacttgtattttttgataaataaatctagttttaatgccaagaaagcgttttgtaacacatatgtatgtatgtatttaggtcgctacgtacacaattgtgtggcatacaaacgaatttagcttatcttagcctagtttaacaaatttacatagtaatccaaggcgtcgccctcaacatcgccgtctatctgtttgccgccgatctctgtgcggaatttggtcaatatatccttgcgcctactgttcagtgtttggcccgccaagcgcttgtcctccccttgtctcagtccatcgagcaacgccccaatgcgcgtccgcaggagcaaatccaggcggtgcaccagagactgatcttgtcgtagtcctcttgctaccgccggtggcaagtccaacgtcgtctccattgcgggcaaatcgagcagagatgcaataaaagcaagcaacgcagatcccgtggtatccatatcgaggccattaagtgtgagactgttgcgttcccaggcttccgaagtgtctggcacctctagacgctcgttcatctgccgcaccacgtccaccggcactcgagtggcatcgctcctaagtgagtttgcctgcagacaggagtccagcgaactggccatgtatatctgtccgaagatgcagccagagtctcgacacagctggtagagcttgtagcgcatgctgcggtaatagaagttatcgtcgcacaggatcagatgccttccgctgttgtagtcgccgctggaggaaatgcggcggacttgaggcggccaatcggtgtcttcttgaatggcggaaatgagtttttcaattactttaaaaatgcggccgcgctgctccttgtaggccaggtcggccgagggggtagcgtcgaggaagtcgtcgtagcacagatgaacgatgtggcggacgcggagggcagcctgttgacccagcagccaggagcacagcgaggatttgccggctgctggcaggccgataagtgcaacaagacaaatgcgccgcatcgcgtgtggttggttggttcgttttttttttttttttgttttggggttgtttgtaggaagagtacgtgtggtcgccgactgcgggtgtggagggcggtctggactctgcgattagctatctaggatcgagaacagcagctgcggcgttgcatgccactgctgctacatggacagattgccggcgacaggcggctggacaggtgtaagtactgccgtggcggccgcctctttcagtcgctccttctcttgctccctctgctgctgctcggccttgcgggcgttctcctccatttcctccatgcgcttggcgttgattgtggtctgcacatccacgtaaactttcatcatattctggttgaagcgcgcgaacttggtaacgcacctgtccacacagaggtcctgtcgtgtgaagcggcatttagtgacgaatacctccgtggattccccagccttatacatacctcatggccgcccaggtcgcgctggctgagattatccacgcatcggctgaaacacagttccgtcactttgttgtataatgtgaaaaagtctttgagctgaaaggcgtggccagtgagtaaggttcagcgggagttcagcacactcttttacttacgttgcgcagattggaatccatcggtcgatagcaagttgcgtttagctagtgttttaatacaacaattatacaatttaattttacaaaccgtcacgttcgtgacgagcggaacagctgattagtctgtgcttggtaaaacgatagtcgatagcacggcaagcagactaatcagtgtgcgttatcgagtttaaaatacagatacccaaatttttcgcattgtgttcgtttttactttttatttgagagcaactaaagtgttcatctccccaggggggcagaaagtaaaataggacgcgaattggttcataatatacgataccgcaatccctaataattgattttaaaattataattgattctgataaaagcttacgtttaaattga

SEQ ID NO: 24701 - DNA, 879 bp, DROSOPHILA
atgcggcgcatttgtcttgttgcacttatcggcctgccagcagccggcaaatcctcgctgtgctcctggctgctgggtcaacaggctgccctccgcgtccgccacatcgttcatctgtgctacgacgacttcctcgacgctaccccctcggccgacctggcctacaaggagcagcgcggccgcatttttaaagtaattgaaaaactcatttccgccattcaagaagacaccgattggccgcctcaagtccgccgcatttcctccagcggcgactacaacagcggaaggcatctgatcctgtgcgacgataacttctattaccgcagcatgcgctacaagctctaccagctgtgtcgagactctggctgcatcttcggacagatatacatggccagttcgctggactcctgtctgcaggcaaactcacttaggagcgatgccactcgagtgccggtggacgtggtgcggcagatgaacgagcgtctagaggtgccagacacttcggaagcctgggaacgcaacagtctcacacttaatggcctcgatatggataccacgggatctgcgttgcttgcttttattgcatctctgctcgatttgcccgcaatggagacgacgttggacttgccaccggcggtagcaagaggactacgacaagatcagtctctggtgcaccgcctggatttgctcctgcggacgcgcattggggcgttgctcgatggactgagacaaggggaggacaagcgcttggcgggccaaacactgaacagtaggcgcaaggatatattgaccaaattccgcacagagatcggcggcaaacagatagacggcgatgttgagggcgacgccttggattactatgtaaatttgttaaactag

SEQ ID NO: 24702 - protein, 292 aa, DROSOPHILA
MRRICLVALIGLPAAGKSSLCSWLLGQQAALRVRHIVHLCYDDFLDATPSADLAYKEQRGRIFKVIEKLISAIQEDTDWPPQVRRISSSGDYNSGRHLILCDDNFYYRSMRYKLYQLCRDSGCIFGQIYMASSLDSCLQANSLRSDATRVPVDVVRQMNERLEVPDTSEAWERNSLTLNGLDMDTTGSALLAFIASLLDLPAMETTLDLPPAVARGLRQDQSLVHRLDLLLRTRIGALLDGLRQGEDKRLAGQTLNSRRKDILTKFRTEIGGKQIDGDVEGDALDYYVNLLN

SEQ ID NO: 24703 - DNA, 4533 bp, DROSOPHILA
ctgccgttctctgtcgcgggcaagaagggaattttccgagaaaaggcggcgcgtggcacgcttctgtgactgactgtggccagggtctggtgccttctgccactgctgccgcttttgctcgagtccaggccaggccagatccgaccgacccgaccagcaccatacagccagcctatctatagcccggcagcgcaaattgctttctttatttatggactcaactcgagtcgagtcgagtcgaggcgcgagtatagagtcgcatagagtcgagccaacaactcgcgacgcacaaaacacgcagcagaatctccgcaaagagcgaaatttctaatttcaaaaaatttcttttgcgcctgtttggacgcatcttcccggttttatgttcacgtatggggcgaaatgacgttgtcgttttgaatacatgtttatgggcaagcaaatcatattgttcataatttatagtccccgagcgggctggcaaaatatgaatggaggtctgggagtggcgaactggaataccctttcgaatacggctgtgatatgaacgcacacagttgtctaaaactcaaaatcagaactaatttcattggcttaagctcttcaatttttcgcagaattgtattttcggaaaaattaaagacttgctgccgaattgttgcatacttttggacatctctataaaccttattaggttttgtggtcatacagaaaagcaaagatgttgtgtagtgtacattcctcccagatctccatgtcagaatgcccatcctgcccaacttttcccgattgcttgtgcaacgtcagcaagctgcttctgggagctgatggacagcgtgcaaatgcgccagctgtcagcagttagttgttccataagcaaagtctgcgagcatagatgaagcataaacagagtgcagcatgcataaccaagcagcgccgccctgacattagagaattccacaaaacttagattaaataacttaggaaactaacaggtagtgtgtcaggtcaaccccctcccccgatacagacttttaggttgatgaatcgctgtccgcgggacttcagttcgccgaaggtggatgcgatgcccgtccaagtggcctggaggaattgcagcttgtgctcgtctggagtttgctgcagctgtcgctgcaagttgtccagctggctggagagctcgttggccagctcaaagaagtctatcagcagggacacataatccacacgcttcagaaccaggtccttaagttcgatccagtgcttgtgcaaggattccgccttggagtccacatcgtagcgctcttggggactcagggactccagatggaccttgatggattcgagcagcaggttgatcagttcgccttttatctaaggggtaatcaaggtgatttttgtcattagcttaggtatctccttcaacaaaatacatcgttctatatatgttatagcatggcggtcaatttaagtagtactccagacccacctgaatcgcacaacaaacgtaaagaaactctttataaagcatttcggtctataagttttttgtcgaaccatgtttgtataaagattttcgattcgtaggtagtctgattcatatcgcttgatagatatagatatagatagatataagtattatttaaaaccacaaacctccaaatcctgcatgagttcatggtgctggagaaggaactgcttggcctgctggagatttccgcccatatccacgctttgctgcaattgatgttggccggatgctctcagccaggccaaaagctcattgtgatggttcaggaattcactcagtgctcgctgaaccttctgctgatcctcactgctgttggcacagatgccttgaatgtaaacctttctgttttccaactcatcaaggactctcttcacaccttgagtctccggctgagtgcgtcccacttcgtcgagaatgccgtaacccaagcgcaaaggttcctcggtaaagttgcgaacatctcgatccactttggagaacatggcataactctccggtgaatgagggggcagctttacgctggtcagctccagttctagtttctccaggacacttacagtgtgctcagccttggcgaaaaactcccgggactgatgcagccagtgttcccgctgatccaccaaatccaagtgctctgtgcagccactcaagaccgcataagccctagcacatgcgtcttcttcggtgaagtgaccagcggattgaaccttctccttggctcgcgtgatcttaagagctcgatcccggaggagcagggcctgctgtttccactccctgtatttggtgagcatttcgttggccgtgtgctcacactcgcccaggctgtacatggtattcagctccattctggcttgctggagagctgcctccaggtcgactaattctctgcccagcaaagccaatgccagacactgctccatttggattttcctcgtctgccaggcgagttccagggagtttctgcggtcatgcagggcctccaaccactgctgaacttggtgaactgccctcgtagcatctcgtttaatgtgctccggtcttgtgtcgagggtctccagcttttccagttcctccagttgggccagcagctcgttgccatctttcagggctgccattaccccggtgagcatgtctattctcagctgcttgaatctgttcaggaattcctggacacggggcacatccggtggatggagtgtttcctcgcaggccaattccagttggtccatcttcctgaagcactgcgtcatcttgtcgtggaactgtgtgcatagtatcagaaggtgttgacgatcctgcagaagattcagtatgtcctgccaaatgatgttgagcgtatcggccatggcattcaccagttcggaactgatgcgcttgctggccaacagtttgtccgccttctggacgaactcatccattggtcccggcaggctctgaaagatgttcgaggtcattttaaaggtttaatttgatattgaagatggactcacctgtagattgcgaagagtttcatcatgctccctttgcatgcgcagagattcatccagattctccccaagcgctgtgatcttcggctccagttctaccactttgatgtagatcttttccggactctggaagagttgatgatgtttaagatattctatggctacgcggttgagtggatttaagtgtggttttaaagtattatacgacaaagactgtttagttcattctcccattcacttacgttaacataaaatatctttagtaattagtacttggatttcgtttcatattctttatactttcaaaatttcccttctattagtatcgtttacgcattctatatgcctggagccccaaaattcccacacgttgttttcgcaattcccagggatatcgcataggacatgagcaattcaaagattttctcccacaagggtccgctgcattcctcgcctgcccccaaatccgttccagtcacgttcctgggctcccagcagctggctgcattcccattcatgcagctcgcagttgacatcggtggccaggagacgtgtgcgatgatctcgtgcagcgagggaaaagcaaacctgctcccgaagcagcttctaattttggtagcaccaccagaagctgcctccgaactcgcacaagtagcagaagtagcagaagtggcaccacaacctcagctctgtttgattgcaatgaaggtcagcatcggctgtttatggtaatggcatccgttagtttttcctgttgggatgagcatgtgtcgatggtgatgcggctggagctggagctggggaaaagtgccacatgccatggcgaaccatgaagaactcgcctgatggctagcaaactgttaaaaggtttgggttttatgtttagggaaagctgcgtgggcgttaatttgttcgacgaaatagttttgggcacggtacagtagtaactctgtaaacggaacttccctatcccgataactaaagatacttttttttaaattttaaaatgcttcaatgtaagtttgaattcttcgttttagacatcccctatattaaatatatttgaaagtggttcttgccacagatgttgcgctgtagacttccaatttagtcgctcaagggtttcgatttagatctgcggctgccattaatcaatttggattacaaattaataacccggctattaaattaaattgtctgccccactggcagcgatgtaaaccgattagaaaaaccagtcgaagtcgctgactcaatgcgacgtgagtgagttttcaatatgctatgcgcacaccaataattctcgaaaatctgaatatatttcgaagtgtaacgggcggcgtggtggaagtgggggaataatcacgccgtctaactgaaatatgaaccataaatggcatgacatcactataaacaggccgaccataactaagcttatgtacgtataaagcataaaataaaccattatgcatatggtcggggcgcctcacaacttcccttccccacaaatatgcatac

SEQ ID NO: 24704 - DNA, 1988 bp, DROSOPHILA
atgaatgggaatgcagccagctgctgggagcccaggaacgtgactggaacggatttgggggcaggcgaggaatgcagcggacccttgtgggagaaaatctttgaattgctcatgtcctatgcgatatccctgggaattgcgaaaacaacgtccatagaatatcttaaacatcatcaactcttccagagtccggaaaagatctacatcaaagtggtagaactggagccgaagatcacagcgcttggggagaatctggatgaatctctgcgcatgcaaagggagcatgatgaaactcttcgcaatctacagagcctgccgggaccaatggatgagttcgtccagaaggcggacaaactgttggccagcaagcgcatcagttccgaactggtgaatgccatggccgatacgctcaacatcatttggcaggacatactgaatcttctgcaggatcgtcaacaccttctgatactatgcacacagttccacgacaagatgacgcagtgcttcaggaagatggaccaactggaattggcctgcgaggaaacactccatccaccggatgtgccccgtgtccaggaattcctgaacagattcaagcagctgagaatagacatgctcaccggggtaatggcagccctgaaagatggcaacgagctgctggcccaactggaggaactggaaaagctggagaccctcgacacaagaccggagcacattaaacgagatgctacgagggcagttcaccaagttcagcagtggttggaggccctgcatgaccgcagaaactccctggaactcgcctggcagacgaggaaaatccaaatggagcagtgtctggcattggctttgctgggcagagaattagtcgacctggaggcagctctccagcaagccagaatggagctgaataccatgtacagcctgggcgagtgtgagcacacggccaacgaaatgctcaccaaatacagggagtggaaacagcaggccctgctcctccgggatcgagctcttaagatcacgcgagccaaggagaaggttcaatccgctggtcacttcaccgaagaagacgcatgtgctagggcttatgcggtcttgagtggctgcacagagcacttggatttggtggatcagcgggaacactggctgcatcagtcccgggagtttttcgccaaggctgagcacactgtaagtgtcctggagaaactagaactggagctgaccagcgtaaagctgccccctcattcaccggagagttatgccatgttctccaaagtggatcgagatgttcgcaactttaccgaggaacctttgcgcttgggttacggcattctcgacgaagtgggacgcactcagccggagactcaaggtgtgaagagagtccttgatgagttggaaaacagaaaggtttacattcaaggcatctgtgccaacagcagtgaggatcagcagaaggttcagcgagcactgagtgaattcctgaaccatcacaatgagcttttggcctggctgagagcatccggccaacatcaattgcagcaaagcgtggatatgggcggaaatctccagcaggccaagcagttccttctccagcaccatgaactcatgcaggatttggagataaaaggcgaactgatcaacctgctgctcgaatccatcaaggtccatctggagtccctgagtccccaagagcgctacgatgtggactccaaggcggaatccttgcacaagcactggatcgaacttaaggacctggttctgaagcgtgtggattatgtgtccctgctgatagacttctttgagctggccaacgagctctccagccagctggacaacttgcagcgacagctgcagcaaactccagacgagcacaagctgcaattcctccaggccacttggacgggcatcgcatccaccttcggcgaactgaagtcccgcggacagcgattcatcaacctaaaagtctgtatcgggggagggggttgacctga

SEQ ID NO: 24705 - protein, 660 aa, DROSOPHILA
MNGNAASCWEPRNVTGTDLGAGEECSGPLWEKIFELLMSYAISLGIAKTTSIEYLKHHQLFQSPEKIYIKVVELEPKITALGENLDESLRMQREHDETLRNLQSLPGPMDEFVQKADKLLASKRISSELVNAMADTLNIIWQDILNLLQDRQHLLILCTQFHDKMTQCFRKMDQLELACEETLHPPDVPRVQEFLNRFKQLRIDMLTGVMAALKDGNELLAQLEELEKLETLDTRPEHIKRDATRAVHQVQQWLEALHDRRNSLELAWQTRKIQMEQCLALALLGRELVDLEAALQQARMELNTMYSLGECEHTANEMLTKYREWKQQALLLRDRALKITRAKEKVQSAGHFTEEDACARAYAVLSGCTEHLDLVDQREHWLHQSREFFAKAEHTVSVLEKLELELTSVKLPPHSPESYAMFSKVDRDVRNFTEEPLRLGYGILDEVGRTQPETQGVKRVLDELENRKVYIQGICANSSEDQQKVQRALSEFLNHHNELLAWLRASGQHQLQQSVDMGGNLQQAKQFLLQHHELMQDLEIKGELINLLLESIKVHLESLSPQERYDVDSKAESLHKHWIELKDLVLKRVDYVSLLIDFFELANELSSQLDNLQRQLQQTPDEHKLQFLQATWTGIASTFGELKSRGQRFINLKVCIGGGG

SEQ ID NO: 24706 - DNA, 7358 bp, DROSOPHILA
cacttcatcgtcaagttttaaaatgatgttgtgaacaaaactaagaaagtaataaatattatgtatacgccacttaagcccataacacacttagcataagtctaaagtaaagaataattcactcaaactagtttttcctattggtgtttttgggtttccaaaacatagcagctatacatatttagaacgaggtcgataacctcaagcatttcttatcattttgtccgaaattatcatgccaatataaaaactttcaaccaaatgttaattagcttcagttgtgatttaatcgttgccatgttactgcttgtgttatttttttttttcaataattacatcaattgttgaatgaatcatttgataacaaaaactgcacttcatatgaaatgtttataacaagtaagtaagcaatacacttcagttacttaatgtacaaaataaccaggttttatagaagtagcttgtagtttcccacctctatttttagtaatcaattagttctgtgatggtttttccttttctgtggcaataactaaactagtttcagctgcaatacgggtttccacatacacatctaatcacaacggagagccaacagcgaatgccgcaaaatcgtcgattcgatcaaataaaaagaattccgagcacgttggttcgcgagaggtgaacaacaagtagagattacccgagagatcagagaatattcattattttttacaatttcctatttattaagcattataagaggtatttaatttgcggtttagttgtttactaactgtagaaagtctacaggaaatgtttgattgtccgggtcaacttatcatagtttcgctcctgccactgcacattggtcagtattatctccaaaggaactcctgggaatcggccaaaaatagcttgaactcatagtagtccttccgggtataaatctgcctttgaaagggttccagaagtagagggatgcttttcattagctgattatagctcaaagaaaaatattgaatgtatagatatcaaactcaaacctccttttacttactaatcacttatagacccaatgttgttgttgtggaacccgacctccgttttggccaccgcctggaaggcccacttcgaatcccccttgcgaataccttccttggcatcattcacggaataggcgaccaggtaggtggagattggcaacgactcctggaactcggtccatacgtaatcgggaaggaaatcactgaaagatggcgaatattatattaaagaatacgtaaagtatagagtaaaatttactctttgccggtatgcttcacgggcatattgctaagtccggtgaacatacaaggattaaatatctgttttcttcttcgagtaatcgccagtccacacctggtctcattggccacaggatccacgtaggagctgcggtagtatccccgcaatcggtctgacaatgtggacgaaaatagcaaactgagctcatagacttggccagccaaaagttgtctgcaggtgcgaaggatatagaagtcgtgttcgggatttacctctgtggaggacacgcagttattctttagatcctctccggtaatttggcgaagagtggttgccgtctcatcgatcgtcagttccttcgaatgcaaagttatgttgttggtgttttccaagacttggatttggattttcacacttccgttaaaactaaaatcatcagcatattccagctgggttagcacgtgcaggtcatacttgataggtcgaagtgccgtcggcaggcgataatgattgtaggtcgaattgggtgtggctaatcctaagccaagggttattacaaataacacaagccacttcatactgggttctgcaaaaagtgaatcccgcacttgaattagttaactcctgaaagaggctctggtataagtaaatctccactttcgcatttgcatctttttaagttttttttccgtgctgcgtttattattatttgttacaaaaccggaagaaattgtccatcaaaactacttccattcataattgcataacttaataaacgaatcgttttcctagttttaacatcaaaactgttttaaaaatgatctaaccaatgtctttgtgatttaatcgctgacttttgtttcccaaaactacgatttaatctaggagtactccgagaatacttgatagtacatctgaacacagcggaatccacagatcgaatgatgctaatcttaaaaaatttggtaacaatttctgagctactactgagctactgagtactactcaaatagagattataaaaatctagttcttagtttataaaacctaatggagtgctctcttctccttgttataaataatactgtgaagtggtttcttttttatgtgttatattacaacaaattgagacctgatgtctcatctctgcacgtttggctggagggagtaaaaatcagaaggttcagattaagcatgcagattaataaatatatttattatttttttggaaaaaattagcaaaaagaatttcgaaatttcttcgtcgttctatcgtcactatctgagaaacgggtaatcttgttttgtattttcaatcttcacttagaatactataaaataaagtaggcttcctgggaggatctaaactcattcgtgagcattacaaatggtggcgtatagtccgtgagaatttatgatagttccaatccatccactgcacattcgtgagcatcgtctccaggctctgctgcatcgcctgacgaatgcccttcaggaaatgtcgggaatcgttggcaaaggacctgaacttgttcagatcatttattgtgctaacttgctcggataacggcgtcaacagtcgggacatgactctcgtctgcggataatagctggagcgaaaaatgagccatataatcggattcccattccaatagttatacttactatttgtggataagctcaacattctctatgaagtactgcttggccaggaggaagcccacctctctggaggccaccgcctgaaagcacagcgatgagtcctgcttgcgaatggcgctcttggggtggaaggacttttccatgtaacgctgcagtatccaaacctccttcgagcagcccagggtactcaagatggtctgcctctcggatgccacatttgatttccggtaccgcgaccacaggaagttccaatcctcctctgtgccttgacttattgcggtgcagtacactgtgctgcgaaggtttaatggaaccggatggttctcgtcaggattggtctctgcccgccatcggcgaaaataggcctgcgcctgggtcacacaatcggaaacatcgtactggcacgccacattgaccaccgtggtcttcaaaaggacctcatcctgctgcgtcatcaaactaaaggtgtcgttcatgccgtgcaggtgctcgtagatcggagtaagaagcttctgcatgtagcgctgaaaattcaggatagcattcatgaggttcatcatcattcattgatctaagacatactttaaatgacccaaagttgggagtttgtcgcagaatgcggttcaacaacttcaaattgtccagggctgatttccaaggaataaggtctcgttccctccgcaaatagttggtcacttgcagtgcggtttcgtagtcctgttcccccgtccaggcgaagtacagaacatcgtctataagctgggctctgttgatcacgtgaatgctctggaaatctttgctgttcaaagtatcaatcaacagcttccagtttctggcatcatagttggccttgtaaggagtcgacaactgtatgttgaggatcagccattcttcgggtccagctgaatgatcaatggtcgtaggcacaccttcgtccgtactgctgcactccatccacgccttgggtgacgtgttattgaagtcattctcatcctgggtggtatagctcagtggcacccaccagcagccaacgcggtcggcttgtggtatctgggaattgcgcaagtaacgttcctgggtaatctcagcggttccagtcgaatagtcacgggtaatattaagcacaggaaatctgagtgaggcagttaaatatagtagagtactagaacaagagtctggacttacccggtttgcagagtccacgagtccataatggtatttatgtcatagtgcccgggtagagctccattttgatgagctgctgtggtcagtgactcccatagattattctgttcggcattcttgtaggcgtaaagcttaagatactcccttagccccgtacggaaggactcctcgcccatgaacaagtgcatcattcgtaacactgcggatcccttttggtaagagatggcatcaaagctttcctcgatctccgtcaccatttgaatgggcctcgatatgggatggctgctaaccagtgagtccaggcgaaaggcggtcatcagagctgtcagcgagcccttatcccttgagtgccactccggatagatttcctgtactcccaagccggccacatatgtggcgaatccctcgtttagccagaggtcggtccaccacttcatcgtcaccagattaccgaaccattggtgggccaactcatgagctattacattggccagatcctgtttatccgccagtgatgagtgggttggcgagtagagaagtgtggattctctgtatttgaccagaccccagttctccatggcaccagcgctgaaatccggaacagccatctgatcgatcttgggaagcggatacctaatgccgaagaactcctcatagtattgcagcactttgggtccaaactccgcggcataatcgcactgatctatggcattgggtctggcccaagtccggaatagagctccatttggcagagtggagggtttaaaggagaaatcattaaccgaatatgccaccagataggtggacattggcaccgactcctggaactcgcaccatatgtagtttgcaagggactcgctgctcatgggaaataatattaaataagtaaaataaataagctgacgggcaaaaaggacatactgtggcctgatttcccttacgggcatattgctcagtgcattgaactgcttgtgatagcccaaagtgaccacgaaggatgccttaaaaccgggttcatcgaagcagggaaatgcctttcgagcggaggatggttcgaattgcgtcgcagacagccagctgaaatgagattttgggcattagatagatgaagcttaaacttaatggatttgacccaccgtgtcttgttggtcacaggatccttgtacgaactgcggtagtaaccaaaaagttgaggtgttagatcagccgagaatggaaggaacagtttgtatacattgccggccaaaagttccttgcaggtgtgaaagatgtaatagtcgtgggtgggattaacggatgtggaggatacacaattatccatatttcccgctccactaatttggcgcagcgtgatccgggactcatcgatggtcaggttcttcgagtgcagcgttatgttcctggtattttgcagtgctttaatcacgatttgcacatttccagcgaaacggagatcatcaggactttccaaaagtgtcaggatacgtaagtaatacctttggggtcttaaggcagttggcagtcggtagtggttatacctagaaatcgagttggccacagataaatccaggccaatagccagaacgaacaagagaaaccacttcatagccgaaactgaggggaaaaatatatatatgtgtaccacattcttacaatatattcatatatatacaatatatataatttataataaaacacataaaaacagaaaaattatcttcagctcgaaggaaataatttgttcatttttagttacgcaaattttattattattatgatatagcttgcgtaaaatatatatttcattcatggcttatcaaaaagattatcacatacgaatctggcgatctgtcgatgtcatgaaccggaatattaatcagatagtgtagaggtaattgattatttgcattataatcaaatcgcacttgtttattgtttaaaatttattatttttgaaaaatttctaaacaaagaagctgattatagttatagttgttgtttgtgaatatttgttttgcctctttatctgaatttctaatagttcacaccaaactgtgctaaattattagaaacagcttaaccacagacacagtcttaaatcaaagttcaaccattcatagacacacaatcgaatcactttagttatttggcattacatttagaacgtgtttcacgatttaacaacaaattggtttgcttagaaaaaactaaccgatagcaactagtggcactactgatctcaccagaggatggtgaccgaatgcgtctagttctacgatcgaactgagtttctgattttcagagagcaatattttcagagaggtcgaaaagcgagactaatttggaaaattagcagctcagagtatcatattattatcagctgcaaaacagagtgcggcttacccggcgtatacgttattttacatcccattactcgcagtatatagttaatattgcaattattttaaaatgtctttttcgagatgtataagaaagaatccggtctggtatttaaaattaaaaaatatatatattttgtatgaaattcattacaatgcatactatgttagtcttcaatcttaatagcttgattttacgctatattagccgcagaaagtgaatttaaccattactacttgctattaggaaataatttaaaaggtctttcacctcccattctttatatatccacttccaattcagaaatgaaaagactttcatcttgagatacacgaatactagagtattaaatagtttatttaagcgactttaaacattcataacattcctgctgaaatcaagagttgcttctcttagtgagctgatgagaggctggactgggagctgggtaatctagagcagttgctggatggagcgggacatctgatggtagtttcgctccttccactgaacattggtgagcatgatctccagtgtctgttggatggcctgttccaatcccttcagcgactgacgggagttgttcacgaagtccttgaactcgttgaagtcgctcagcgtgatgacctgctcggaaagcggtgagagtaggcgggacatgtccttggtgagcggatggtagctaaaaaaaaaaaaaacagaaacccttagccgaggttctatccatcacagatgcgaaaacttacaacttgtagatgaagtcgacgttgtccatgaaatactttttggccagcaggaagcccacctcattgaaggccaccgcttggaaggcccacatcgag

SEQ ID NO: 24707 - DNA, 3328 bp, DROSOPHILA
tgagatcagtagtgccactagttgctatcgtttcggctatgaagtggtttctcttgttcgttctggctattggcctggatttatctgtggccaactcgatttctaggtataaccactaccgactgccaactgccttaagaccccaaaggtattacttacgtatcctgacacttttggaaagtcctgatgatctccgtttcgctggaaatgtgcaaatcgtgattaaagcactgcaaaataccaggaacataacgctgcactcgaagaacctgaccatcgatgagtcccggatcacgctgcgccaaattagtggagcgggaaatatggataattgtgtatcctccacatccgttaatcccacccacgactattacatctttcacacctgcaaggaacttttggccggcaatgtatacaaactgttccttccattctcggctgatctaacacctcaactttttggttactaccgcagttcgtacaaggatcctgtgaccaacaagacacgctggctgtctgcgacgcaattcgaaccatcctccgctcgaaaggcatttccctgcttcgatgaacccggttttaaggcatccttcgtggtcactttgggctatcacaagcagttcaatgcactgagcaatatgcccgtaagggaaatcaggccacacgagtcccttgcaaactacatatggtgcgagttccaggagtcggtgccaatgtccacctatctggtggcatattcggttaatgatttctcctttaaaccctccactctgccaaatggagctctattccggacttgggccagacccaatgccatagatcagtgcgattatgccgcggagtttggacccaaagtgctgcaatactatgaggagttcttcggcattaggtatccgcttcccaagatcgatcagatggctgttccggatttcagcgctggtgccatggagaactggggtctggtcaaatacagagaatccacacttctctactcgccaacccactcatcactggcggataaacaggatctggccaatgtaatagctcatgagttggcccaccaatggttcggtaatctggtgacgatgaagtggtggaccgacctctggctaaacgagggattcgccacatatgtggccggcttgggagtacaggaaatctatccggagtggcactcaagggataagggctcgctgacagctctgatgaccgcctttcgcctggactcactggttagcagccatcccatatcgaggcccattcaaatggtgacggagatcgaggaaagctttgatgccatctcttaccaaaagggatccgcagtgttacgaatgatgcacttgttcatgggcgaggagtccttccgtacggggctaagggagtatcttaagctttacgcctacaagaatgccgaacagaataatctatgggagtcactgaccacagcagctcatcaaaatggagctctacccgggcactatgacataaataccattatggactcgtggactctgcaaaccggatttcctgtgcttaatattacccgtgactattcgactggaaccgctgagattacccaggaacgttacttgcgcaattcccagataccacaagccgaccgcgttggctgctggtgggtgccactgagctataccacccaggatgagaatgacttcaataacacgtcacccaaggcgtggatggagtgcagcagtacggacgaaggtgtgcctacgaccattgatcattcagctggacccgaagaatggctgatcctcaacatacagttgtcgactccttacaaggccaactatgatgccagaaactggaagctgttgattgatactttgaacagcaaagatttccagagcattcacgtgatcaacagagcccagcttatagacgatgttctgtacttcgcctggacgggggaacaggactacgaaaccgcactgcaagtgaccaactatttgcggagggaacgagaccttattccttggaaatcagccctggacaatttgaagttgttgaaccgcattctgcgacaaactcccaactttgggtcatttaaacgctacatgcagaagcttcttactccgatctacgagcacctgcacggcatgaacgacacctttagtttgatgacgcagcaggatgaggtccttttgaagaccacggtggtcaatgtggcgtgccagtacgatgtttccgattgtgtgacccaggcgcaggcctattttcgccgatggcgggcagagaccaatcctgacgagaaccatccggttccattaaaccttcgcagcacagtgtactgcaccgcaataagtcaaggcacagaggaggattggaacttcctgtggtcgcggtaccggaaatcaaatgtggcatccgagaggcagaccatcttgagtaccctgggctgctcgaaggaggtttggatactgcagcgttacatggaaaagtccttccaccccaagagcgccattcgcaagcaggactcatcgctgtgctttcaggcggtggcctccagagaggtgggcttcctcctggccaagcagtacttcatagagaatgttgagcttatccacaaatactattatccgcagacgagagtcatgtcccgactgttgacgccgttatccgagcaagttagcacaataaatgatctgaacaagttcaggtcctttgccaacgattcccgacatttcctgaagggcattcgtcaggcgatgcagcagagcctggagacgatgctcacgaatctggaatatgctgatgattttagttttaacggaagtgtgaaaatccaaatccaagtcttggaaaacaccaacaacataactttgcattcgaaggaactgacgatcgatgagacggcaaccactcttcgccaaattaccggagaggatctaaagaataactgcgtgtcctccacagaggtaaatcccgaacacgacttctatatccttcgcacctgcagacaacttttggctggccaagtctatgagctcagtttgctattttcgtccacattgtcagaccgattgcggggatactaccgcagctcctacgtggatcctgtggccaatgagaccagtgatttccttcccgattacgtatggaccgagttccaggagtcgttgccaatctccacctacctggtcgcctattccgtgaatgatgccaaggaaggtattcgcaagggggattcgaagtgggccttccaggcggtggccaaaacggaggtcgggttccacaacaacaacattgggtctataagtgattagtaagtaaaaggaggtttgagtttgatatctatacattcaat

SEQ ID NO: 24708 - protein, 1082 aa, DROSOPHILA
MKWFLLFVLAIGLDLSVANSISRYNHYRLPTALRPQRYYLRILTLLESPDDLRFAGNVQIVIKALQNTRNITLHSKNLTIDESRITLRQISGAGNMDNCVSSTSVNPTHDYYIFHTCKELLAGNVYKLFLPFSADLTPQLFGYYRSSYKDPVTNKTRWLSATQFEPSSARKAFPCFDEPGFKASFVVTLGYHKQFNALSNMPVREIRPHESLANYIWCEFQESVPMSTYLVAYSVNDFSFKPSTLPNGALFRTWARPNAIDQCDYAAEFGPKVLQYYEEFFGIRYPLPKIDQMAVPDFSAGAMENWGLVKYRESTLLYSPTHSSLADKQDLANVIAHELAHQWFGNLVTMKWWTDLWLNEGFATYVAGLGVQEIYPEWHSRDKGSLTALMTAFRLDSLVSSHPISRPIQMVTEIEESFDAISYQKGSAVLRMMHLFMGEESFRTGLREYLKLYAYKNAEQNNLWESLTTAAHQNGALPGHYDINTIMDSWTLQTGFPVLNITRDYSTGTAEITQERYLRNSQIPQADRVGCWWVPLSYTTQDENDFNNTSPKAWMECSSTDEGVPTTIDHSAGPEEWLILNIQLSTPYKANYDARNWKLLIDTLNSKDFQSIHVINRAQLIDDVLYFAWTGEQDYETALQVTNYLRRERDLIPWKSALDNLKLLNRILRQTPNFGSFKRYMQKLLTPIYEHLHGMNDTFSLMTQQDEVLLKTTVVNVACQYDVSDCVTQAQAYFRRWRAETNPDENHPVPLNLRSTVYCTAISQGTEEDWNFLWSRYRKSNVASERQTILSTLGCSKEVWILQRYMEKSFHPKSAIRKQDSSLCFQAVASREVGFLLAKQYFIENVELIHKYYYPQTRVMSRLLTPLSEQVSTINDLNKFRSFANDSRHFLKGIRQAMQQSLETMLTNLEYADDFSFNGSVKIQIQVLENTNNITLHSKELTIDETATTLRQITGEDLKNNCVSSTEVNPEHDFYILRTCRQLLAGQVYELSLLFSSTLSDRLRGYYRSSYVDPVANETSDFLPDYVWTEFQESLPISTYLVAYSVNDAKEGIRKGDSKWAFQAVAKTEVGFHNNNIGSISD

SEQ ID NO: 24709 - DNA, 1489 bp, DROSOPHILA
cccgtaaaacaacatgatctcgggacagttaaaaagactgcaaaaaaagagttaacaagttgccacagagcgaagaaacaaaaaaaaaataaagaaaatctcgccacaccaaccgattttggcggctgtttaagtgaattaaatattgcgcaacatctgggggaatacgatgaataaaaaaaaaaactactacttctgcagaaacttgcccatgttcattggccatataaacggtaacaacttcgacgatccaaatctctcccatgttgttgcatttgtggtcaagctgtcgctcaattgcagtccgcaaatggcttaaatgcgcgctcatgaccgcaggcaataaaataattaagacgaacataaaaacgccggcaaaaaaaattggctgcataattcacactttgagcttgtttcaatgcttcgggaccaggccaaaacggtacgtggtttcatgcgaagtttaataagcctttttggtggtgagaaattggtgatttgttaaagggaaattgatttggcttacaagtcctaattagctttatttcttttaaattgcagggaacttacatttactgcatacgatacaagcatatatttgttggagttttttattaatgatttcccaaccaaataaatagctacactaatcaaacagatttctacaatcgaaaccgataaagttgcatcgcacaatcggcaaattgtagagcaatcaggcaaaacaacgataataacacccaactgtcgtcgcagtgttttgtcaattttgaggattggtcaacgtgtcgtatacacaatttgcacaatcgaacgtaaacattgcggcacagcagcccgcaaatgaatagtaacaggcgctggcgcagccaaactttaactttaactgcagcaagcacactgagattagtaaacaattatggttttcgcgattttcgaaactgcaacaagttaattctccacccagcaattggcggcgaataaatttactcgtagggcgttaaccagacagaaaacaggaaaattgcacaagttcaggccaagacctggtaattgtccactccactgacatggtaattaatttcttgcaataaatccaacttatttgcaaccacttacttgtcaatgtaatcgatcgtttcgatttccttttgcattttttcaccatcgcgactgtcctccaaattggcggcatctgaaagaaggaaacaaaagcacgcataattagtttagtttacactttcgtgtatagggtagaactttgccgttgcataaattatagttgcaaacaaaatttatgagttgcattctccgtaaaatggtaaacacatgtcacatccaacatgaccaacataaattataattagcgtagcaaaaagtcgcagacaaaacaagaactctaattgtaggcaaatggcaaacacatacaaaactcacgcaccgcactcgaaacccaaaagaaaaaggtgtacaaataatcctgtttaac

SEQ ID NO: 24710 - DNA, 196 bp, DROSOPHILA
gatgccgccaatttggaggacagtcgcgatggtgaaaaaatgcaaaaggaaatcgaaacgatcgattacattgacaagtaagtggttgcaaataagttggatttattgcaagaaattaattaccatgtcagtggagtggacaattaccaggtcttggcctgaacttgtgcaattttcctgttttctgtctggttaa

SEQ ID NO: 24711 - protein, 64 aa, DROSOPHILA
MPPIWRTVAMVKKCKRKSKRSITLTSKWLQISWIYCKKLITMSVEWTITRSWPELVQFSCFLSG

SEQ ID NO: 24712 - DNA, 4934 bp, DROSOPHILA
gacgccacgcacacgcaagacatcgaaaaccataaattagatctctgaaaaaatgtgagaaaaatctgaaaacacgatcaacttggatgaaccgcccataagaaccgaaccaaatctcaatattttcaacccacatcaagagcaacataaacacagcccagcgatgttggtcagtcgaacaacaagttttcaagttttgaagttcggttcggttcagttcagttcgagattgtgtaaatgcaaattgtcatgtcacttggccgcagggctaatttatcccaagcactttccacttgcaacaacagcaaacaacaacaaaaaaaagtaaaatacaggcaattggccgctgtaatgtgtttgataaaaaacactcgcgcatgaaatcaagccaaattgtgtcaagggggctgcatgacaacgggcggcagcaacaacaatacaaattaaataaaattagcgactattttgcacggaaatgtggaaggggggaggggggagggtatctgaggttcgagatcggagatccaagaggggcgcaaaacgcttgagcaactttgccccaaaagttgatggacggctaactgagcgccctacacatgcgccatgtattcgatatacccctctctctctctctgtctacacagagagaaattggcacttctaacactatattatggcatttacgaaatgttgcattttactttgcttgttggtataactttacttaaacattaaatctaaataattgcaatattcgaatatatatttggtaatctatgcttttgaatctctttttcgtcgcctttttatcgccgtgtactttttcggtttatcttgttcacagtttgcgtgtgtgggcgatggcataatggggttttcgaacgacattgaactcgaaaaaattgaaaagtgtcggcggcccatgcaaaccaagctgtctttgactttgctttactcgaaatctagtttatctgtgtgtgcgtgtgtgctcctctctatttgtttatgttttccatttcgcctttgctttttcagcaacaacatttgaaacataactccaaattcagttctgtctaaatccgattctaaaggtagacatttctcaaatattcccacatttttggctctaatcccttgactaatcatcatcttctgttcccgtttttttgttcatattttgcagaagcaaaagccggaaaaggattggaccaaaaactaaacgcattagattgcaattcgtgctgaaacgatatacagcgaatagagaccaccgagaactcgaagacacatcaccaacatggttgactactataaaattttggatgtttcgcgatccgctaccgatagtgaagtgaagaaggcgtaagtaaacaaatgactttcgaagtaacacatatcctccggtcaacatattcgtttcatcacaacattcaccacttgcagatatcgaaaactggcactaaaatggcacccagacaagaatcccgacaacctggatgaggccaacaaacgcttccgcgagctgtccgaagcctacgaagttctttccgatggtaagtgccttgctcaagcgcagatttcttcgagcgtcgaaaaacaaagaaatttgggttgggtatcacgtgatccggattcggatgatccaggctgcctggcattaagtctttatattgtgtatttagcacgtaagcgcagaatctacgatgcccgggccacgctgcacaaatcctcgaacagcggaagcagcagcagcaacagcagctcctatacccgctatcgcaacggcggcaccggtggatcgtcgtcctatggacgggactacgactacgactactatccgggctcggggtatgggtctggttccgggcggcgttccggcaaccggtaccaggccttcacgtttcgcaacattttcgagggcactccgttccacaagatgttcggtaaaggcgagaggccaaaagcgttgcaattgtttcgttactttggttttgctgactgacatcctggcgcacgtcgttttgtttttcgttcgtcattctatctgcaactaaacgctgttttcgtacagtgatgggggagcattcataagcattcataacctttcccaccactgtttccatgctaagtctaagctaatcctcgcagctcgagcgtttattactaattaattgcatttactttcctgttgtttcacacccaacttaccatgtactcccatttcttaacagagaaaaagcgtcgcatatacgatgagtatggcaaagatggactgggcgatcgtggccagagtcgctcgcatgcccgccaccattatagcacacacgatttcgatgacttcgatattttgggcggctttcagtttgcattccgcccgcccgaggaagtgttccgtgagttcttcggcatccactcgcccttcgccgacttattccgaggtgagtgttttgatgggatgggtaaacgtgtgtagagagtgttctaacttttatgattatcgttttgcagatgccaatggacattcgaatggcagcacaagcggctcgagtggcagtcgacgcaatggcggcagcagtggatcatctcgccaccatcatcatcaccaccagcacaaagtggccagtccgttcggggctccaatgcttaactactcaatgatggacttctttatgcccaccagcggcttcacctcgttctcgtcgatgacccacggcaatggcagcagcggtgtcacccacatctccagcggacccggtgccagtgtcaagcgcacctccacttcgacggtgtttgtgaatggcaagaaactgatgaccaaacggtatgataaactctatctggccatcatagaatcgtttcatatctgcatttgcattttcagggtcgtcgaaaacggcaaggaaactgtcttttcatatgaaaatgatgttctgaaatcaaagactgtgatgggctcccttcaatagctaattaattaaattcacacataatatatatatatataaatatcaacaaaaatcaacaaaggaaaagtcataaatgtaaagccgaatgaatattaacaagcccaagaagaactcggaattcgttaccgcttcgaaatatgatacttttaaaactttaaaactttgctctacactacaatttagttacttttaatggaccgaacagcaccataaatgaatcaacagccagcgaaaggaccaagcaaaaattaatcaacagcagaaacactaacagcagcgatatccacaccaaaaatatggaacatggaacaggccattgaattaaatcaaaattccccgtaatagcgaaatatggaaatttattttttaagcatagtttttgaacacagctgccctacaacaaaattgcaccggtggaataaagccaacaccatcgagcaccacgagaattaatggaaaaaccatactgaaaatttagccaataagttttaggggccagattttaaatatgctgttcggagcgagtgtgtttgggtgtatatctttttgggggggataattatgtattcttcgtgtatgtatcgttagtcacttaagttgccacaatacttactaggaaatcgaaagcggagaaattcaatctaagcaatgaatcggaactaaaataggctttgcgttaatttttctttacattgtaagggatatgaatatgaatattctaaacgatgacatttaatttttataaatatttcataacctagatttctttattaatttcgatgctgtatgctagcgtatagtcgttttttaaatgcttaagactattctcacataacctgcagagcgaaaagaaaattaatcgtaacataatcgccaataatttaatactttgttaagcgaaaatttcataatgagaataaaaaaaaaaacacatgagaatgaaaatatacaatagatgcgaaacaattaagacaagtgttttattactactttaaatatagtttcatttaattaattcgttgaatttctgcgatgcaagctgatcgatgataattctgacataatattaaatattattataaataggtatttttatataaacaattataatcacttatgcgagcatttatattgatgtatagaatcaagttttaattgaactcgcttttaagttatttttaaatcagcaataatgaataataaaccatgaaatcttaagagtgaaattttaaattttcccgccaactctctttggttggcaacgcgaccatcccctggccgtgctgccaacttttagcgtgaaaattaaaagaaattgaaatatcataagtaaaaaagccagaatcaagtggaagaaagctaaattggcaacactgatcgctggcggtattttcctacgatccaccaacgatcacacttccccaaaattattaacaaaacgcagcaggatcggagcaaatggcccaaaaatgagtcgcgatagtgatcccatgaaatggtaccacggcaacctgtcccgcgaggcagccgacgaactgctaaagcagggtaagtgctggcgcaggacgccaattggcctgacatcagtgatgatcgctgggatgtgggcgtggtggagcacaatgatgggtaattggtatggcaatcaatcaacaggttacgaggacgggacatttctggtgcgcgagagcagcacagcggccggggactttgtgctgagcctgctctgccagggtgaggtgtgtcactaccaggtgcggcgacatggcggcgaggacgccttcttctccatcgacgacaaggtacagacgaagatactgcacggcctggacacgctcgtcgactactatcagcaggcggccaatggtctgcccaccaagctgacggtgcccttgatccgcgatctgccgccgcacaacactcgcagccacggagtgaccaatctgctgcatcgcgccacaagcaaaa

SEQ ID NO: 24713 - DNA, 1953 bp, DROSOPHILA
tgtttatgttttccatttcgcctttgctttttcagcaacaacatttgaaacataactccaaattcagttctgtctaaatccgattctaaagaagcaaaagccggaaaaggattggaccaaaaactaaacgcattagattgcaattcgtgctgaaacgatatacagcgaatagagaccaccgagaactcgaagacacatcaccaacatggttgactactataaaattttggatgtttcgcgatccgctaccgatagtgaagtgaagaaggcatatcgaaaactggcactaaaatggcacccagacaagaatcccgacaacctggatgaggccaacaaacgcttccgcgagctgtccgaagcctacgaagttctttccgatgagaaaaagcgtcgcatatacgatgagtatggcaaagatggactgggcgatcgtggccagagtcgctcgcatgcccgccaccattatagcacacacgatttcgatgacttcgatattttgggcggctttcagtttgcattccgcccgcccgaggaagtgttccgtgagttcttcggcatccactcgcccttcgccgacttattccgagatgccaatggacattcgaatggcagcacaagcggctcgagtggcagtcgacgcaatggcggcagcagtggatcatctcgccaccatcatcatcaccaccagcacaaagtggccagtccgttcggggctccaatgcttaactactcaatgatggacttctttatgcccaccagcggcttcacctcgttctcgtcgatgacccacggcaatggcagcagcggtgtcacccacatctccagcggacccggtgccagtgtcaagcgcacctccacttcgacggtgtttgtgaatggcaagaaactgatgaccaaacgggtcgtcgaaaacggcaaggaaactgtcttttcatatgaaaatgatgttctgaaatcaaagactgtgatgggctcccttcaatagctaattaattaaattcacacataatatatatatatataaatatcaacaaaaatcaacaaaggaaaagtcataaatgtaaagccgaatgaatattaacaagcccaagaagaactcggaattcgttaccgcttcgaaatatgatacttttaaaactttaaaactttgctctacactacaatttagttacttttaatggaccgaacagcaccataaatgaatcaacagccagcgaaaggaccaagcaaaaattaatcaacagcagaaacactaacagcagcgatatccacaccaaaaatatggaacatggaacaggccattgaattaaatcaaaattccccgtaatagcgaaatatggaaatttattttttaagcatagtttttgaacacagctgccctacaacaaaattgcaccggtggaataaagccaacaccatcgagcaccacgagaattaatggaaaaaccatactgaaaatttagccaataagttttaggggccagattttaaatatgctgttcggagcgagtgtgtttgggtgtatatctttttgggggggataattatgtattcttcgtgtatgtatcgttagtcacttaagttgccacaatacttactaggaaatcgaaagcggagaaattcaatctaagcaatgaatcggaactaaaataggctttgcgttaatttttctttacattgtaagggatatgaatatgaatattctaaacgatgacatttaatttttataaatatttcataacctagatttctttattaatttcgatgctgtatgctagcgtatagtcgttttttaaatgcttaagactattctcacataacctgcagagcgaaaagaaaattaatcgtaacataatcgccaataatttaatactttgttaagcgaaaatttcataatgagaataaaaaaaaaaacacatgagaatgaaaatatacaatagatgcgaaacaatt

SEQ ID NO: 24714 - protein, 11 aa, DROSOPHILA
MAPRQESRQPG

SEQ ID NO: 24715 - DNA, 5322 bp, DROSOPHILA
catcttgtcgtcaaataattgtaagtcatttgtcagccgacacaataaaatttgtgaataaaatatatagagacacgagtgatacgacataaacgaaacacattaggtatacttaaaaataaataatctggaaaatagagaaactctcattttaagatatcaaaaagtgtctcatatgaaattcgatcattctgtcaatttgtaactcgccaagtttggttttaatttattcatacgaggtatcaagtagctgagcctgtataaagtgtccgtattaattaagctaattgaataacttgcagcttaatctacattaagacaagacagcgagatttcagtcaagcctttcaggtcccaaacaaaaacattaaagatagaatttcatttttcgcatgctagctaacaggaaaatctaatgaggtcaactattatgaacttgtcctccggacaatgcaatcgtatagttatagaaacagagagcccgtaatccctataatcccctaatctttaaacgtatttgcgttgggtttttatgtagcacttgtgcgattagactgaaaatatatattagtttccatatggattataggaattcaatgtggggtaacaaaaatctgaaattaaacaaaatccgtaatcaaaataatagaaatcgttattcattcgattgtggaaaaaaaaccaaaaaccgtgacagatacagacaaaaacgaaacagcgattacgattagattgaatgaaggtggcagcacaacaacgataaatttgcaatgttcataaatgaatggggaagtgtgagagaccgacaaactttaatcacaacaaatataaccttattgccccactcttttgaaatgaagtagcaaggtcaagtgtagttttgctcaagagcctaggaaagtttctaaatcacataattgccaatatcgcaagctcccaatataaatcctcctatatcttctattatattaattatgcaatagtatctaacgggttaccgttaccgtcgatggatttcgataaaatgtaagcaaccatcgataatatcgataaatttatatccaatattacataccctcgagttgcgagccttgtcactggatgatgccgactccttggccttgggcctttccgccttactggtggccacaatgggcaagccgccgttttcgatcattgtcaccacaatcttattgttccgactgcttacggtgccaccaccaccaccgcttgcgtaggatgagttcgccgccgcagctgaggctgcatttgtggccgctagattcttctgccgcagggcgttcgatagccgttgcttgcgttccgctcgggcctcctccttttcccgctgcaacttggcaatagtggcgggcgtgtggctcttggagcgctttagaaatctcatcagttggctcttaacattggtggcggcacttccatttccctggcttgtggcatcgcctatttcctctgccctgctggatcttcgggatatttgagccttggtgggtacctccaggcgacggaagaccccatcggccattcggacgaaacagccctccgacatcttgtgaaaggagtcggatggcagtttgtgaaaatcgccattgggactgcgatagtagcagtgatccgtccgatgatagccatctcccacaatataaaactcattgcgcccctccttgggcgccacagctgctgctgctgaagccgaggattcggcagccaggtcgtcagtcttggcacttcgatccacgggcagttggaaggccattagttgggtgatgctactactgctcccaccagcagcatcctctgctgtaataggcaggacactacccgaagtcccctgcccggtattaactggtttcagctcactgatcgttaccggacgacgttccgggttcttgcgcataatgcttccattgcgcagaagtgaatctcgcaggagagagagctcatccttacgcaatggttgcaccaatgtggggtaatgtttcgaagacgaagtcgatttgcgggtagaggttcgacgatttccaaactgtgaagccggttgtggtggttcctccttgttgttgttattgctactgtggtgcatctgccggtgactggaagtctggcccatggtaggtgctttggtggttttgcggtgggtggttcacttggttgtttcgtggttgggttgcggtggtatttcttcgttctcgacgcgactcggtgttcacggtatacggattattggcccagttgcaacgaaactgagacacatattccctcgttcttcgctttggcaattatcacagcgaatttcgtgtgtaaacattgagagatgcgcgcgtatacgtgtgcataaaagtatgaataaattttgttcgttttgtgtattttgtggcacaacaatcacaattcaggcgcagctttgtcgcttttatttcgaaaagaccatcttgttaaattctattagagcacaatgagtgaacattggagaagcaatcgcagtaaaagtcacagtctctcggtcactaaattgcaaacacattcaccgtgccaatcttactgagcacaaataattgggattcgcaatgcacagagtaaaacaataacaatcataagaactgataggtccattaagcaagccgcttattcagttaaagaaggtatggagaattttgaatagcacaactaaattttcttgttgaatatgaaagtaccacatatatctttgaatcttatatgaacgtatctagtcttgtcattcacaaatttatggttatatgacaattgtaaattcttttctgaaaagtttaaaattgggactaataagtgttgctaaatatttgtgtctctgtgcatgaagaatatgttatctttgctttcttctaggatatttgtaaacttgttgcttacatgacgcgtaagggggttttaaaaagtgaagggtgggtgcttttagataacaacacatgtctcttatcagttatcgcactttacacatctctctccgtgtgagtgtctccgttttttttttgtggacacaagacactcgcgataagttccacaaccgttccagctgggtttgcttttgaatggctaaatgtgtatttgagagtccgtcgctgtgcggtttgtggatcgtaagccttggcacgcccgatacagatacgcagatacacagatagtagaagaccagcaacaaaaacaacaacaacaaaataagcgttaaagagacaacgatgaagccccacacattgctgttgctatttctgtgattccctctcgctctctacgcttccccgtgtcactctttccctctgtccagtagttgttgctattcttctgctagttacctcgtttaagcgttacttacacgcacactagcgcacagcgactgttgcttttgcgcgtgtgtgttttgggtaggaatttgttcgtttttttccttttcattccgctttcgttcttttcgcttgcactactactgtttttcttcattttttttttttttttgtatttcttgtcataccgtactttataattaaattaacttatcacccgcaattggctcatttctcaatgtatctgcgagttgaagtggttggctcaaaaaaagctggatacatttcactggaactgcaacacacacacacacaaacacacacaaacacacatttatatgcgcactcatacacagcgagtccaagctggaaatttataaattaaacactatttaaccgaatttatttataaacacacgtgcgtgtgtacttagtcagttagagtgtgagagcgactgtgacttttcctacgtcaattcggtttattttaagctgcgtactcatgcccttgatttcattctaagtgagcttagctgatcggattagccagtgacgttgttctttatcgcggatgttgtaacgcctgcgatttggattcggatcacaacgatgacaactgcgcttcagcttttttgcaatctcttcgccttacttctgttgtttttttctttatttttcgcgttttgtattgtttgacgtaacgcccttgtgcttgtgcgataataactggtcacaatggcaaacggcaaattataaattgaaagtaacaaaaataacaacaagaataccaggggagtcaactcatcgcggggcgataacgatacaggctaggcgatatagcaacgatatcggcggagagcgacggttaatgacaacagaaaacagcgcgacgacggtgaccacacgaatgaagtggaacttaatactaaaacaagctttcgaccatcgctgctgtatgctggctacttttgccattgtggctgccgccactgtggattgtaattctgtggatgtggcgagcgagcgagcgagcttggcatttttgccaaagttctgcgtctgggaaggtcgttgttgttgttgttgctgtagctactccaagacaacaacgacacaccctatgaaaatcgtatgcaatctgcaggtaagtgcaggtgattcatacacccacacatgcacacttactcaaaaaaactggtagaaaccacacatatttctcgaaaaacattgaaaaactttaaagagaaggagagagaactcggaagagctttggcaaagggatccccagtttgggaacctgtctgcgagccgagcttaaagcccacataaacatcaactcagcataatttaaaaagacttccactggaaattccaagatagagaagtaaagattccagtatgtagcttcttaaggaatcgaaatctttaaagatttgaaaagaatctgtcaaaaatgaatattccatgcgtaaaacaaatcattttttaagataaccttaaaaatgtaatttttgtaatatttttagtgttataaaaacaataaaattgaagttaaaacaagatagaaacccaacaacttttgtaaaacttcggataagtatatgatcatcttgatcttcatcacactaagaagaaggaattaaagaggatataactagccaaagaaaagacgttataagttagtcactcacgattccacacctaacgtccacaaaggcaactagttaagcttatttacctacaccacgtaaactattcaagtgtatgcatgtcggatacaaacacacaaactaaggcaaaaaattatttaaaatcaaaacagttatatgattgtgcggagaggagtacgaatcacacggatttgttgtggacaacaaagataaaggcagagaaacagagaggagatagaacgaccgacgtgatgtgattattgagaattgtttaaatactataattgcacttctgaatggacgtcgtcagctgt

SEQ ID NO: 24716 - DNA, 1501 bp, DROSOPHILA
gcagccacaatggcaaaagtagccagcatacagcagcgatgaatttaacaagatggtcttttcgaaataaaagcgacaaagctgcgcctgaattgtgattgttgtgccacaaaatacacaaaacgaacaaaatttattcatacttttatgcacacgtatacgcgcgcatctctcaatgtttacacacgaaattcgctgtgataattgccaaagcgaagaacgagggaatatgtgtctcagtttcgttgcaactgggccaataatccgtataccgtgaacaccgagtcgcgtcgagaacgaagaaataccaccgcaacccaaccacgaaacaaccaagtgaaccacccaccgcaaaaccaccaaagcacctaccatgggccagacttccagtcaccggcagatgcaccacagtagcaataacaacaacaaggaggaaccaccacaaccggcttcacagtttggaaatcgtcgaacctctacccgcaaatcgacttcgtcttcgaaacattaccccacattggtgcaaccattgcgtaaggatgagctctctctcctgcgagattcacttctgcgcaatggaagcattatgcgcaagaacccggaacgtcgtccggtaacgatcagtgagctgaaaccagttaataccgggcaggggacttcgggtagtgtcctgcctattacagcagaggatgctgctggtgggagcagtagtagcatcacccaactaatggccttccaactgcccgtggatcgaagtgccaagactgacgacctggctgccgaatcctcggcttcagcagcagcagctgtggcgcccaaggaggggcgcaatgagttttatattgtgggagatggctatcatcggacggatcactgctactatcgcagtcccaatggcgattttcacaaactgccatccgactcctttcacaagatgtcggagggctgtttcgtccgaatggccgatggggtcttccgtcgcctggaggtacccaccaaggctcaaatatcccgaagatccagcagggcagaggaaataggcgatgccacaagccagggaaatggaagtgccgccaccaatgttaagagccaactgatgagatttctaaagcgctccaagagccacacgcccgccactattgccaagttgcagcgggaaaaggaggaggcccgagcggaacgcaagcaacggctatcgaacgccctgcggcagaagaatctagcggccacaaatgcagcctcagctgcggcggcgaactcatcctacgcaagcggtggtggtggtggcaccgtaagcagtcggaacaataagattgtggtgacaatgatcgaaaacggcggcttgcccattgtggccaccagtaaggcggaaaggcccaaggccaaggagtcggcatcatccagtgacaaggctcgcaactcgagggtatgtaatattggatataaatttatcgatattatcgatggttgcttacattttatcgaaatccatcgacggtaa

SEQ ID NO: 24717 - protein, 375 aa, DROSOPHILA
MGQTSSHRQMHHSSNNNNKEEPPQPASQFGNRRTSTRKSTSSSKHYPTLVQPLRKDELSLLRDSLLRNGSIMRKNPERRPVTISELKPVNTGQGTSGSVLPITAEDAAGGSSSSITQLMAFQLPVDRSAKTDDLAAESSASAAAAVAPKEGRNEFYIVGDGYHRTDHCYYRSPNGDFHKLPSDSFHKMSEGCFVRMADGVFRRLEVPTKAQISRRSSRAEEIGDATSQGNGSAATNVKSQLMRFLKRSKSHTPATIAKLQREKEEARAERKQRLSNALRQKNLAATNAASAAAANSSYASGGGGGTVSSRNNKIVVTMIENGGLPIVATSKAERPKAKESASSSDKARNSRVCNIGYKFIDIIDGCLHFIEIHRR

SEQ ID NO: 24718 - DNA, 9023 bp, DROSOPHILA
ccaactgccccattgcgatttcactttgaaatgggctggttcgcctcgccggacagaagcagaaattagcacttggggaacgctcctctatatatcggccatatatgcataatgctcgctcgatcgcggacgggagtatgcggaatggggttagggtgcggaacgatgccggaataaatcaatattaatatagcactctgcgattcgcaactccaggtggcaaaaatatttacgtatggctaatcgggaagggggtcttatgaaggaagtcaagggaaagaatttgatttggccataaatcaaataaaactttaaagaatgcggtcaagggaaggttatggtaatcaaataaatattttaagcctgtcttgtcactttatctcttaattaacaaacaatttattgcgcctcttgaaaacgttcaataatggaaatgttttttatatgagtagtattctgatcgtaagtaggttaattaggttttaaaatgttctcttcagccataacctgcattttatcccacacaattctattttatggccaggctttctcatttgtgtaattgaaaatttcagttttatgattcgtgcagtaattcaaatgggttttattgcctcggctttgttccatttaatttttgtttattcagagttgcaataaagctgccctgatgacgactcaacgagactcgcccgtcttggattcttagatcatagctcacgagtgttggctgacaagccgctaactgttatagctggccgtttagtgtgccaaatactttcccaggccagcccagctcgtcaaattaattgaagaatcgagccaagagagccgagcagacgagctgcgccagagtcagagtcagagaaagacgcagaaagcagccaaatgtaaattcacgcttcgggccgagcttcggcttttcctgagccaaattgggaagttggtagcttggtaagttggtaagacgagctggctgccagcgatcagttgcagacggtcagtcgagcgagacagttgtgtgcgcgccggtgttggaaacccgaactcgaattcgaaccactgaagagccagccaagctcaggccagaatccaccatcgactcgaatcgaatcgaaacgaatcgaatcgccacaaaaataaaaaagaaaccaacacaaacaggtaaagagaggcggtaaaaaagaaagtcactgcccaagaatcgggcagtaagaaggggggtgctccgaactcaggactgaaaacagaaaacttcaaactgaaaactaaaaaccatccaagaagcagttcgccagcgacagtctttcacggcaactcgaggagatcgcacgaatcggttgcgaatcggtctataaacccactactatcggttgttatcggttctgtgccacgatcagtgaataatatttagtcaaggttagccttcggattacgaataccagaaacattgtgtgaaagcagagggatcatccgtgattcccaaataatttgtgtcactacgccagcaaattttgaaatatggctttaatatagaaaaataaatttgtatttttctttcctctacaaatggataacataaaattatctgtaacactgaagagtgtagaacattttcatataaataattctgaagattactcctactaccttttggttttcctgcttcgttgataaagaagtagaacattttttgttatttacaacaaaattattcgtgttatattttcaattactggaacctcagtttaatttagaattaacagctcccttagatgagattgtctaattgatttcgtaaatattgctcacaaacttgtgaaatctagagtgaatttcaactaaccaataagaccaagggcgtttaaaaaaggctgaaaggtttttaataaattctgctaatatttacagtacccaataaaaaaactgtgaaattgaaccaaggattatcatcgattttgctgtgtgaaaatatgagtatcctttaagactaagttggcattggactaaaaagtacgtgaaagtggagcggcatgccagcgatttcgatctgttccatttaaccttccactcttgtagtattttttttgcgggaaatgtaagcgtttgcatgcccagtttttcctgaccccacgacacacacccacactagtttcctcctcctgattttcctcggacccaaaggagggcccataaagctcagctcgacgcgatgcagccttgaaacgggccaaaacgtcttgggcaagaacttttaattgattttcaactgcggaaggcaacttgtgcccggagtcggactcttaactggccgggtcataaattgtatctgcggcaatttagggccaagtacaatacactacgagtacaacacgattcccttccctttccaagaccaatggcaatttctctggtttttatgcgctccattttcacatgtgctgctgatgttgtttggtgttctgcggtcagcagaccaagccaggccaaaccgaaccaaaaccaaaccaaaccaaaacgaactatatagaatgcgatgcgaaccaagttgagtaatcatctctcgtggctctcagctttcttctgcccagatgacccacatacgaagcgacttgaagcagttaatttaagtgtttcctggccagtttcagattcagctacagcatctcgaccagtttcagccaagttatagtttacactgtttacattggccagcactttgctgccaaaacaaaacacactcgtcgtcggccaacggggcgtatgaattgggctgtgcatacttgcagcaaggacaagctattaactgagcaaagtctgctggcaattcgagtggctttaattcgttttactcatttttcgtacatttttgtgtagctcagtagctggttcatgaccaagtttatgcagcttgtcagtcagcaaagttttcgaaaaggggattcccctgtccagccaagactgccagcttgttccgccaggtggcgccgccgtgacgataacaaagtcctaattcaagtgacgtgcgaatgcatgcgaaaaagaaacgcaagcaaagtgcaaaaacataagagagaacgatagcaactatttttgcgtggacagtgcactaaagcaaatttaggacatttttgtgcaacatcatggtataaggctccagaagttccatgaactttgactgatgacccaaaaactttttaaaaaacatattataagtttatggattggaataaacattttcatatctgtcctagctttttgaacttaaaacatctacatatgtacatattctcagtctttggcgaactatttttcagtacccacaaactttagtcgtagactttttaaagaagtgcctcaccctaagcagccgaaccccttttctgtgatttaagctcccaaaaaactccagcccgtgcatctgctcccccctaaaaagcgcttactgcaaatttagagggggcgtggccgttgaagcggcacgtgtaaagcttatttttctacaccacctcgtgggccattgtcttggaaaattaactgcaacgcagctgcgaagacaaggctccgcaaacatatgagacaaactcgaacaaagaaggatatcaagctgtgggaaatctggcgcaggtgggcatggcagagggggcgtggcagtgggttaggatatgcaaatcctgtctgcacgtggccttttgtgcggcctgcatatttattgatatgacgctgatatgacaatgcggatagaggacaggaactggagctgagccaaggatccaaggagccaagcagctccaacatcaagtggcagctgccacgcctcaggccaccgccttcaatagttaccccagttccacctcgctcatcccctccttcaatcgcactcggtcccctgagtggggcttaagtaatttttgctggctatgtgacgtgcaagtgcacagcaaacacaacccaaatgcactgggagaaactgaaccaattacatatcttttagagatttgattgattgcgttttttaaagatttatgatatttgagatttgtttataaatatgctacaatatttggtttatttagttttattgaactaattagtctttcgaacataatttagttttgcaataatttcatctttttttctgtgtgtacccctcgcccggtatcttttgcatcagcatcacgcacatgaatattaatgtagaatgcacacacggttagctgcgtttttctatgggggcattaaaatattgtatagtgggagcagcgttccatatgagttagttcctacaatagacaacaccagagcggctaagaagaagaagaagaagaagacgaagaatctgatgaagaagaagagagagccaagtggttgccaaagctgaagaactgcaagaacttgagcccccattctttctgtcccacgcctgtcagaagttttgcattgcattgttgccttgccctttagctttcaacccttccctacccccctgcctcaaaaaagacccgccaaccatcattcagtaaccccaaacgcttttcttgttcttgccttttctgcggcatgacgcgtgaaatgttcctagttcggtgagaaaaatggtagataaaacgctttgcgaccagggggacggaacggtgcgaaaagtaaatgcaatttccccaagacttcaataggcaggagtttataagtacttcgtggcagaagggccttgggaaatcgagggggcaagtgcaggggcttacagtgggcaaagtgcatgtgcaacattgtggcttgcttagattaaatttgtccagatgtcattaaagcagttcctgatatcaaaagattcagaaagcaagctgaagtttcttaagaatttctttgtggttttctatactgaaagaaatcacaattcttcgttaaaaccttcattaaaaattaattaaatctcagactttggtaaccaaatcgctttacaagtctcgtgttttcgaggaaatgaacgcccactgttcttgagacttggttgcctgggacaggtgatatgtcatcatattttgctcggctcttccccccaaccccccattttcctaggcacctcctcagctcagaaggcatttgcctgtagcatcggtatttaataaacaccgctgaggagcttcgcagagtaaaacttttaattaagcgacggcaacggctgatgttgctgctggctgtcttccactccaaaaaacttgagacactggaaagccataaaacagcgacttgtcggcttatcaaacacagagccctaaaatccgtaaccgaaacccactcaaatctgagatgctgcgacgttgctgctgcagttggccagtgggtcactggggtttcactttgctttatggccactttgccgttcgcttatcagcgctggacttgatttaccgaaagcgttttactcatttttcaataagcggcagcggcggcatctacacttgcagctacaaattgctgcgaacaagttttttttgggaaaacgttgcgtcgccgccgacgtctcagtcgctttcactaagccagcagcagtcgcacttgacagtgcgacaataacagcagcagcagcggcagcggcagcagcaacatggacaacaacaagagcaacatctgcgacatcagcagcagcagcagcagcaacaattgttgcggttgtttgccattgccattgccgctggctgttggtcgtgctgattgtcatgacttaaaagccaccagcagtggcaacaacagcagcacaacacaacaatgacagcagaccgaactagcgaataccctttgaagccggacattctcgagggactttgaaatgcgtttttacaccgattccatgcgggttcaatggatggtggtacccgcctgtgtctctcagccttcaactgccattgtggcgcctgcggctgtctgaaaaggtgttgttgttgctcaggtggatgctgcttttagtgttgcaattgttgcaactgttgctgctgttgctgttgctgctttgtgtcaagtgccagccactggacatgtgaacaccgccggcggcaactttgaggcgcaactcaaaaacatgtttacactcgcactctcacacgggcgccgctcctttgtctgctttcttcagtggctggcttattgaccgaaagaccactgtgtaatttcacaatcatgaaaaagaaagtgagtgcacagggagaaacagtcgcagcccagaaagatccagagagttggggctacaaatgtcaatgaagcccttttaagtttacaagatagagagaatgtatagataacatacgtacttcttacatcatttctattattattacattgagccttgacttatcaaaaaaatatccattttgccttttgcagatctgacaacatgaagttcgtgattttgctgtgcgtgctgagcgcgttgctgctgcaaattgaagcgtcgcccctccagcggctttcgagaagcgagcgggctgtttcccgccaacagacggtcaacaatgaggtggctccggcggtagctcctgccagcgatgatgacgatgatgacgacgatgaggacgacgatgatgagcctgatctaggagatctgatcgatgacgatgatggtaggtttagagcaattctagttcactgaatgcacccaggccgcaccaccagcacagcaccactgtttgaactgttcgaaccaccgaactgaaccactgaaccactgagcaatgcaatgagcacccagccaaacgtgatatttgtcctgcctttattaaccaacattttttgtgactctcttctgtggctcccttctccttgggtaacaaagttcttttgatttcgggactttcagatgatgatgaggaggaggacgatgacgaggacgaggaggatgatacgccccagggtcaggctgctccagcggccactgccagcgatgatgacgaagaggaagacgatgatgatgacgattatctggacaggctgttcgatgatatcctgggcggtaagtgttgttctcaagaactttagttaggtgttaaactgattgctccctccgggggcgttagaaaaatgaaaagctcaatattattaaaatacatccgatattttagatgatgaagatgaggatgatgatgacgagacacccgctgccaccgcccagcagagcgctgtggccgccgctcccgcccaaactctggatgaggtcgcccccgctgccgcctcctccgtgagcgccggtatctccgatggtgttgatctgcccgccgagtccggaaatgccgctgaggtcctggccgctggaaatgctgccgatgagtccgtttccgctgccgttgctccggcgcaaaacgctgccgccagcagcagcaacaacgaaggtgaacaaaatgttttttacgatgaagacgcacttgtagatggtgttagtggtggcacaagtagtttaagtagcacccttgcaattgacgaacaacagaaacaaacaaacatagagctgcaacaacagcagcaagaacaacaactgaaactgccacaacaacagcaatcattggcttcatctcagcatgcgacgaccacaacaacaagcacagtcaacaagaacactctaaccaacaacaacatcattaacaataagctggtggccagtgggacgaccttggggcaacccgcggcagttgttgcaggtgcggttgctcccgggaatgttgccgctggcgccgatgacactgacaacgacgatgacgattatgatgaggacgacgagaccgatgatgatgatgatgatgatattgatgatggagtcgatgaaattggtgaaattacaggtatcgccggtgacgacgacgaggaggccgacgatgatgatgacgatgacgacgatgacattatcggcgatgacatcatcgaggcccgccgtgaagcacgtgagtccaaatcgaagtcggaaacggcgacgaaagaaaccaaggccaagaaatcaacaagtccctcaaagaaggccaagaaagagctgaagcattaaccaaacaaactgctaaatgaacaacaacaaccgcaacaaccactaaagacagggacccacaacaacaacaaaataacagagaacgacatgccccaaaagcaaaaaaaagacgaaaaaggaaagcgaattttctgaacattttcccatggggcaggacgcgatccggacttttgcaattgcatctttgcctgcactgactatcctcccacatccctcgctatcctttaatttatgaaacaaaatctgagttaagtacatatgtttatgcatccccgaaaaggggatggaattatcgagagtttggtgctagtcaaactatctgcaaaacaacaaaagcagcacaattattcccaattctttccactgtatccctccaacgcacaattgttgagttatttacgcacggactgtttcacctgactaaagaaatgcaacaccaactgtacgcacaactgcaacgctagttgcagctgcaaccgcaacagcaacatgtttaatgcccaagcacaaaaatggttgaattcaaagagatcacaaagcaaaagaagatgatgatgatgatgaagaagatgaagaaggcgcagaagaatcgaaaggcggaagagcggcaagaggcagagcaagagaagaattgatagaaagagatatcgctgaaagaaaggcttcccttgctctctctttcccattccatcacattcacatatctccctctctctctctgcctatctttctcacacacacacacacgccccgcacgtatagctaaattgatgtaacaccaacaaacacaacagcaataagaattgttcactttgtgtaatttatttatttctagttgtaatatctttttcgtatttatttgtgtaattaaacaaagcaatcgatcagattcggaattagatatcattatgtaaacaactgcctatctcactcgctctctctcttactatgtctatgtctgtctctcttatgcacacacacacacgcatttaagcactat

SEQ ID NO: 24719 - DNA, 1464 bp, DROSOPHILA
tcagtcgagcgagacagttgtgtgcgcgccggtgttggaaacccgaactcgaattcgaaccactgaagagccagccaagctcaggccagaatccaccatcgactcgaatcgaatcgaaacgaatcgaatcgccacaaaaataaaaaagaaaccaacacaaacagatctgacaacatgaagttcgtgattttgctgtgcgtgctgagcgcgttgctgctgcaaattgaagcgtcgcccctccagcggctttcgagaagcgagcgggctgtttcccgccaacagacggtcaacaatgaggtggctccggcggtagctcctgccagcgatgatgacgatgatgacgacgatgaggacgacgatgatgagcctgatctaggagatctgatcgatgacgatgatgatgatgatgaggaggaggacgatgacgaggacgaggaggatgatacgccccagggtcaggctgctccagcggccactgccagcgatgatgacgaagaggaagacgatgatgatgacgattatctggacaggctgttcgatgatatcctgggcgatgatgaagatgaggatgatgatgacgagacacccgctgccaccgcccagcagagcgctgtggccgccgctcccgcccaaactctggatgaggtcgcccccgctgccgcctcctccgtgagcgccggtatctccgatggtgttgatctgcccgccgagtccggaaatgccgctgaggtcctggccgctggaaatgctgccgatgagtccgtttccgctgccgttgctccggcgcaaaacgctgccgccagcagcagcaacaacgaaggtgaacaaaatgttttttacgatgaagacgcacttgtagatggtgttagtggtggcacaagtagtttaagtagcacccttgcaattgacgaacaacagaaacaaacaaacatagagctgcaacaacagcagcaagaacaacaactgaaactgccacaacaacagcaatcattggcttcatctcagcatgcgacgaccacaacaacaagcacagtcaacaagaacactctaaccaacaacaacatcattaacaataagctggtggccagtgggacgaccttggggcaacccgcggcagttgttgcaggtgcggttgctcccgggaatgttgccgctggcgccgatgacactgacaacgacgatgacgattatgatgaggacgacgagaccgatgatgatgatgatgatgatattgatgatggagtcgatgaaattggtgaaattacaggtatcgccggtgacgacgacgaggaggccgacgatgatgatgacgatgacgacgatgacattatcggcgatgacatcatcgaggcccgccgtgaagcacgtgagtccaaatcgaagtcggaaacggcgacgaaagaaaccaaggccaagaaatcaacaagtccctcaaagaaggccaagaaagagctgaagcattaa

SEQ ID NO: 24720 - protein, 429 aa, DROSOPHILA
MKFVILLCVLSALLLQIEASPLQRLSRSERAVSRQQTVNNEVAPAVAPASDDDDDDDDEDDDDEPDLGDLIDDDDDDDEEEDDDEDEEDDTPQGQAAPAATASDDDEEEDDDDDDYLDRLFDDILGDDEDEDDDDETPAATAQQSAVAAAPAQTLDEVAPAAASSVSAGISDGVDLPAESGNAAEVLAAGNAADESVSAAVAPAQNAAASSSNNEGEQNVFYDEDALVDGVSGGTSSLSSTLAIDEQQKQTNIELQQQQQEQQLKLPQQQQSLASSQHATTTTTSTVNKNTLTNNNIINNKLVASGTTLGQPAAVVAGAVAPGNVAAGADDTDNDDDDYDEDDETDDDDDDDIDDGVDEIGEITGIAGDDDEEADDDDDDDDDDIIGDDIIEARREARESKSKSETATKETKAKKSTSPSKKAKKELKH

SEQ ID NO: 24721 - DNA, 4921 bp, DROSOPHILA
gggcagggaaccgctcactaacgtatacaggatgacgcccagcgaccaaacatcgacctccggtccgtcgtactttttgccctgaaacagctccggtgccgcatatggcgggctaccgcagaacgtgtccagctttgagccgggtgtgaactcgttcgaaaagccaaagtcagcgattttgatgttcagttcgctgtccagcaaaaggttttcagcttttaagtccctgttataaataaataattccggttaataaggtgccaactataataatgggcctttggtttgtcctagcctgtttatataaatcatctgattttaattagcattgattactcttacctgtgaattattcttttttgatgacaatattgcacggctgagacgatttgtcgaaacttaactcgcgcctccttctccttcatgcgtccgtggagaaccaggtagtcgaagacttctccgccagatgcgtactccatgatcagatagagcgtcttctccgtttcgattacttggaacaatttaactatgttggggtgatccagcatcttcattattctaacctgtgggcagagtacgattagtaaataagtcaaggtattcttttaagctaagtacaaacctctctaaagagtttctgtagtgacccaggattgagttgggtcttgtcaattatcttgatggcgacctccttgccagtgggcaggtgtttcgctagtttcaccttggcaaaattgcccttgccgatcgtctttatgagtttgtatttgccaatatgctcctcagtagcacgccatcgcataggagcactactccgcatttgcatgttaggcgaaccctgtaaaaacaatggtcaggggtaagtaaagttatgtattttggtgtgcatcaggtgtcggttataatttatatataaaacccaacatttctgtgacaatcctgatttatgaccctttaaaaaccgcattgctaacgattaatagttatattaaatgcgattttaaaccacagtggtattgctttctctgaaccaaatgatgaaaattatattgaaatatggtagataaaaatggattttggtttttatcccgtttacctgcgcagcattgttgctgtacacattgctgcggtttgccaccacgctgggtacgcggctagtgggatgatgtcctacaggcgggtgagttgaggctgttcctgacctcgactcgtgtcccgaatgggatcttggatcaacgctgtgtctggtcgagctggtcacatgctctgctcgactggaattgtacggaggaataggagccacaatcggccggtccgaacgtcttttcgaactggctgcattacttcctgttcccgaggcaccagatgctccatgacgatgtgaggatttttgggccaacaaagcttcaaattgtcgcaaattctcctcacgccgcttagacgctgaaatggtagtggccgtaagcttagatggagccactccatccaccacgctgctgctgctaccgccacgactggccgagccggaggtggacgtggtggaggaggagctcctggccgccggagtgggtccagtgccagctggtcgccataccgctggctgtttctcgtcctgcaagtgctgcttctgcttaaaagtggccctcatggccagcaccgtatcattattcttcgtatcggaggcagtacgtgccagtttagccttcacagcatttgctccgtttgcggcagcagccgagttcttggaataggctccgatcgagttacgaccatcgctgccgcgctggaattccgataacatcagctcattgctgtcatccagttctcctgcccgcctgccgcccaaatactgaaaatcattctcggaggacatgtcactaatgcccggtcgcagaaggttttccgtttcaccgtagcgcttgctctgcttgcgcttgatctccagtttcatcacgtccatcgatgattgggattgttggttttgctgctgttgcttaaagctctcctccacgttatggatgtgcttctcgatggagccgagggcaaaggacacaccggcatcgtcttcggtggacagaaggcgtggcattggcggcttttggcgttctttgggcgtgggatgcggctgtagggtgggtagagccgatacggctatcctgggcaatggagtggcttgggcatcacgtcgtcgaagctccactatgctgtcgtcttcggtggctccatcgagatccttgttggcaagatgtgtttgacgcagttccatttccttttccgtttccggcaagttactgctgctattgttgttgttgctgctgtggttgctgttctggttactagatggcgccacactgagcttgggcggcgcaggtgccgcccccttgcgggcggcatacagccggacactcttcctggtggcatcgccgcgattcaagtcaggtgttgtggtagtggtggcctccatagctcctccgttttgctgctgatttcggtttttctgttttttttctcttaaatttttttgtcgtggcactcttcccttgagtgtgttggtgcacaagtacttgttgctcggagagatcgcaactttttcttttttcttatttctttttcaagttgcgcttggcgtgtttattgttcttacactgtgagtttggggaaaattattaaattggtcttggggcttcggaagtacaatgcagctcacaccgacaggagtaagtgcttgtgtgtgcgttcgtttgcattgggctttctaaattctcaacgttacttttgtttgttttttgtcgtctaaccaacacacaacaagtcgcagttgttgcgcattaaaacctcgaaaatgaattaaacacacagctagcaacttccatttctacgtatgtacatatgtatgtacagatgggcggacgggaagcgtgtgtgcgtgatatttacgacaacaggcggacaagagctaatctgtctccccggtgacactgaaataaacacacggcaggcgatgtggggatgtgaaagggagggcaatatacctaaacacacaattacatacatagcaaaagagagtgcgcgagagagaaaagcgaagtggcacctacacacctgtggtggaggtgagctcttgtgcgtgtgtttgttttcggtctctctctaaattgctctctcctatttctactgctgttgcacaagctcagctgagatgccctcgctctctctcgtgtgtgtgtcacgcttttcctgtccccacccccaccctcctctcccacgctctcttttcagttttatgattcatttgccttttcgctattttcctttgttgcttttaattactgtctaaatagttacgatgtggagatctacaagtatctgaacaattcgtccgtacgagtcgtttagttgctggctggttatattccatttttattcgtcgctgcttcagtgagcaaagcgaaaagctccaatgcacacacacagacacacacatgcacggtcgcaccaacacattgaagcaaatgaactacttttagacaattgagccgactttttcactgctgaaaaacacagttaggctatatacattggtcgtttgatagtgtgtgagtattttctttctttttttttcacttggtctgtggactataaaaaatcacatttcgcgcaaatcccgattattaaaaggttcgtttcgttggccggaggagttctttaaccacacacggttatcttatcgcagaggcacgcggctttcgcaatttttcgcactcattttacgtgggggtttgggtattcgtactaaattatagctcctcctctgcaactctgacgtaaacgtcgtcgacaggctacgactacaactatacgatttacaccaacaaaaaacagcaaaacacagaagacaccgaaaaacaaagctaaacagggctcagcagccaaagagccacttggccactcagcaactggaactggagtgccggagagcgagagcgcggagtattccaaaagcacggaatcgcttcgagcagcgacgtcgactgcggcagcggcgtcggccttaatacaccaacacaccagcacaagcacacgatcagtgggcagctctctccactggtggagcactactaccattaatacagtatctctatccgtatctgcatctgtgtacttgttctcccacaaagagaagccccgtttggagctcgaaagttttgagagtgtatgagtgtgcgagtaccactgagcgtaacgctgggaaagaaactgttagccgtgtttgctgcagggtttagtgttctgcgcatgtgcgcaatatataagttccaccaagttacgcaaagcgcttcttccctgatttactgcgattaaagtaacattcggttggactttggttttctattaaaatcaatcaattacccaataagttcaactgcttcctttaaagttaatcagttgattaggtgatgcattacgtaagagttctaagtaataaaaccaaaaggacatgatgtctgaagtctgagtcggaattctacggtcgtcgcgaagatttcactaatcaacttcccccgttcccctgttttactctatatcaatcaccagaatacaaagaccgaggaatacacacagtttggtactaaaaatgcaatcccgaaagaacattattatgaacatcttgtcgtcaaataattgtaagtcatttgtcagccgacacaataaaatttgtgaataaaatatatagagacacgagtgatacgacataaacgaaacacattaggtatacttaaaaataaataatctggaaaatagagaaactctcattttaagatatcaaaaagtgtctcatatgaaattcgatcattctgtcaatttgtaactcgccaagtttggttttaatttattcatacgaggtatcaagtagctgagc

SEQ ID NO: 24722 - DNA, 1773 bp, DROSOPHILA
ccctgtttagctttgtttttcggtgtcttctgtgttttgctgttttttgttggtgtaaatcgtatagttgtagtcgtagcctgtcgacgacgtttacgtcagagttgcagaggaggagctataatttatgtaagaacaataaacacgccaagcgcaacttgaaaaagaaataagaaaaaagaaaaagttgcgatctctccgagcaacaagtacttgtgcaccaacacactcaagggaagagtgccacgacaaaaaaatttaagagaaaaaaaacagaaaaaccgaaatcagcagcaaaacggaggagctatggaggccaccactaccacaacacctgacttgaatcgcggcgatgccaccaggaagagtgtccggctgtatgccgcccgcaagggggcggcacctgcgccgcccaagctcagtgtggcgccatctagtaaccagaacagcaaccacagcagcaacaacaacaatagcagcagtaacttgccggaaacggaaaaggaaatggaactgcgtcaaacacatcttgccaacaaggatctcgatggagccaccgaagacgacagcatagtggagcttcgacgacgtgatgcccaagccactccattgcccaggatagccgtatcggctctacccaccctacagccgcatcccacgcccaaagaacgccaaaagccgccaatgccacgccttctgtccaccgaagacgatgccggtgtgtcctttgccctcggctccatcgagaagcacatccataacgtggaggagagctttaagcaacagcagcaaaaccaacaatcccaatcatcgatggacgtgatgaaactggagatcaagcgcaagcagagcaagcgctacggtgaaacggaaaaccttctgcgaccgggcattagtgacatgtcctccgagaatgattttcagtatttgggcggcaggcgggcaggagaactggatgacagcaatgagctgatgttatcggaattccagcgcggcagcgatggtcgtaactcgatcggagcctattccaagaactcggctgctgccgcaaacggagcaaatgctgtgaaggctaaactggcacgtactgcctccgatacgaagaataatgatacggtgctggccatgagggccacttttaagcagaagcagcacttgcaggacgagaaacagccagcggtatggcgaccagctggcactggacccactccggcggccaggagctcctcctccaccacgtccacctccggctcggccagtcgtggcggtagcagcagcagcgtggtggatggagtggctccatctaagcttacggccactaccatttcagcgtctaagcggcgtgaggagaatttgcgacaatttgaagctttgttggcccaaaaatcctcacatcgtcatggagcatctggtgcctcgggaacaggaagtaatgcagccagttcgaaaagacgttcggaccggccgattgtggctcctattcctccgtacaattccagtcgagcagagcatgtgaccagctcgaccagacacagcgttgatccaagatcccattcgggacacgagtcgaggtcaggaacagcctcaactcacccgcctgtaggacatcatcccactagccgcgtacccagcgtggtggcaaaccgcagcaatgtgtacagcaacaatgctgcgcaggtaaacgggataaaaaccaaaatccatttttatctaccatatttcaatataattttcatcatttggttcagagaaagcaataccactgtggtttaa

SEQ ID NO: 24723 - protein, 421 aa, DROSOPHILA
MELRQTHLANKDLDGATEDDSIVELRRRDAQATPLPRIAVSALPTLQPHPTPKERQKPPMPRLLSTEDDAGVSFALGSIEKHIHNVEESFKQQQQNQQSQSSMDVMKLEIKRKQSKRYGETENLLRPGISDMSSENDFQYLGGRRAGELDDSNELMLSEFQRGSDGRNSIGAYSKNSAAAANGANAVKAKLARTASDTKNNDTVLAMRATFKQKQHLQDEKQPAVWRPAGTGPTPAARSSSSTTSTSGSASRGGSSSSVVDGVAPSKLTATTISASKRREENLRQFEALLAQKSSHRHGASGASGTGSNAASSKRRSDRPIVAPIPPYNSSRAEHVTSSTRHSVDPRSHSGHESRSGTASTHPPVGHHPTSRVPSVVANRSNVYSNNAAQVNGIKTKIHFYLPYFNIIFIIWFRESNTTVV

SEQ ID NO: 24724 - DNA, 3687 bp, DROSOPHILA
actttccctcaacacattcacagttccatatgtttaacggcgcttttcactaacgaattgtttattgtttgttgtttccgcgttttttattgatttggcagggcgttttttccacaatcataataaatgccagtcatttcccgttagttttttataacccatcagtagcagtagcactacttccttcgttcttcctcttctcccgttgtaaagagtggttttaccgttagggttttattagcacttttcactacaatagctgaagttccgatttgggttttgcgcacgttttacgtagctagccgaaaactgataaaacatccgcatacatgttgtttttgctcagccagcgcctcacgaactgagtttaagaacggcgaaatacgcgaaaagccagcatctcagctcagctgtgattgcggtactttcgctctctctctttggcgccatccggaaaagtaccgtactccacgtggctagcgaacagctgttgccgcagatgttccactgagcatgcgcaaaaggagctcgccgcgggaaactgggaaattagaaagctccgttactggaaaatcggtttagtgggaacggttgctagctattttcatatgccataaaagtttctccaccaacacgacacctacaacttgatggcacccaaaagttggcgcgaaagtcaacacttcgcacataaagacatctttccgcttggccaacttttcgggccaacaaacttttcacattacaaaaagcgcacattttttaacccacatttggcataaattttcgcattacttgggttaaccagagctctagcacaaaagaatggtagatattataaattatttggggagtttagaaaaccactctcttctaaaactctactcaaaataaaatcaaaaaattcgtcttaataggtgtttaatgcatttatgcattttagattggcaattagaaacagaaaccgtaaatagtattattattactgatttaatggccttcaaaccctttattgttaaaaacattatctttttgtcattacttttgttttaattttagttacgttttttattgttaaataattacaaaaccctaatgcacaaaaatgcaaaaaacgtcgaagccagcaagcgccggcagcgaaagtgttcagcaacaatggccatcgtgaccgctgtggttgtgcgagtggccatgtccgccggatctgtggaccgccttctcctcctcctcgcctgactgcttcgcagccttggcctgatcctcatcggcaaactcgctgaggtcgcgtcgcatggcatatgcatcctcgccatcggcatagtacttgggctccacctcgatgatcttgaacttgagggcgttggtgtagaggttcagggcagcccgattgctcttcctcacgtgcagggacacgtactgggcattgaagcactcgaccatggcctgggaggcctgattcatgagcttctgggccaggcccaatcgccgataggaacgcttgaccgctagcgaggtgatgtgcccatggcggctctcctcattgggctccggctcctccatcttggccaggacatagcccacaatggcgcccttgtcgtcaacggccacgtagctaagctgaggccaggttagtccgtggtaaaagtagtacttcatctggtagttttcgggtagacacagcagattgcagtgctgcatggtcattaggtcttccggttttgcgcagcggatgttcatggtgaggctgtgtagatgtgcttcctagtctcggcgagctttcctggctctgccgtggtggtgtggctgttgattctgatgatcccaagcaagtggttgctgatcctccggctcctcctgacccaacagctctcgaaccagacgaaatttcgatagaaacgccttccagatgaggaaccagcctgcaaaatagacaaatttcaatatgacttgttgctcggatcgtagaaaattgtttccattataacgtgatcgtctgcgggcgcctgcttacccaacaaaataattgctgcgacgatactaacagaggctaatatggtgaaaatgaaagccaagcccgtttgcagggacattctaacggggtagtacgaaatcaggaaactataagcattaaactataaatgaaatttgaaaataataattaaaactacttgtcaaagggtttaattttagtttccagcagcgaattaaatgttttttctccctatttggattgctatcacaataaagaacagctgtcctctgggtgtggccgttattcaacactgaatgaaaccagggatacaatttcttgtgctctttttgtggtaataagtgggatatttgcaaaaattaacaaaagcacaaataaaaatattgcaatcaaatatatttatattcttctggcaatctaaaacttctgcttttctagttttaacatttatttaaaagaccctggcacaagtgactttagttgccaccaaaaaccacatggggttagaagttccactaagctgtctgaaaggcctttcaatagaagctgttcgatgaatcgtcctttgagacaggcacactatacacatggtcacgcctttgggttagttttattcaatatccacctggctgtttaatttatttatattcgcgaatgagcacacttcttccacactaagtttatacaccggcaccagtctgaccagagtttgcgtgggccgaaattccaagatatcttagtttgcagagaataccaatcatactgctactatattgaaatagaatgggataaattcaaatctgttaatttacgtttaaaaagtattttaaccctatgatgtcagttaactcacatagtatagactaatccatagaaaaggaaatggtttaatagctgccttaatagtctaaaaatactgcacgttactaaaatactagatgaaaatacaaaacggtaactgtgaaaacagctgatttgcagcaaacaaagttacctctgcaaacacaacgcatttaagcaaatgccatttgtgcagtttaactaagtaaaatgcaggaattttcagccaaacgagacgctcttttcgcatgtctcgacgatgcgagcaaagagttgcggggaactgccttggatcagagcaaggccaaggcgttttccatcaatgccctcgatcgaggaaacaaatccggaaacgaatccggacaggtgatgaactaccgccagggtcgcagcattgttactggcctcgatgcggaggatggaagactgcgacgaatgcgcggcaaggagagcattttcaagaagcccgaactccccattggacgctgtttgaagccaagaaaaacgccagattaccaggtgacagaccatccctctgcaattagttgtccccaccctaaacgtttgacctactctctaggtaaacccgcacaaatggaagaagtactccctgtctgatgtggacatttccgaacagagcaactccgccgccgccttgtccttcctgcgacaaatggatgcacagcgcgaggctgagggcgtcgataacgaatctccacctacagatggcaagatcgagttcaagaggaccagcaaactcagccgcaagctcaagagcctcaaacagcaggaggtggatgatgtggagctggataagccgcagttaagaggttccaagctggtgatgcctgagt

SEQ ID NO: 24725 - DNA, 1071 bp, DROSOPHILA
gtgccggtgtataaacttagtgtggaagaagtgtgctcattcgcgaatataaataaattaaacagccagaatgtccctgcaaacgggcttggctttcattttcaccatattagcctctgttagtatcgtcgcagcaattattttgttgggctggttcctcatctggaaggcgtttctatcgaaatttcgtctggttcgagagctgttgggtcaggaggagccggaggatcagcaaccacttgcttgggatcatcagaatcaacagccacaccaccacggcagagccaggaaagctcgccgagactaggaagcacatctacacagcctcaccatgaacatccgctgcgcaaaaccggaagacctaatgaccatgcagcactgcaatctgctgtgtctacccgaaaactaccagatgaagtactacttttaccacggactaacctggcctcagcttagctacgtggccgttgacgacaagggcgccattgtgggctatgtcctggccaagatggaggagccggagcccaatgaggagagccgccatgggcacatcacctcgctagcggtcaagcgttcctatcggcgattgggcctggcccagaagctcatgaatcaggcctcccaggccatggtcgagtgcttcaatgcccagtacgtgtccctgcacgtgaggaagagcaatcgggctgccctgaacctctacaccaacgccctcaagttcaagatcatcgaggtggagcccaagtactatgccgatggcgaggatgcatatgccatgcgacgcgacctcagcgagtttgccgatgaggatcaggccaaggctgcgaagcagtcaggcgaggaggaggagaaggcggtccacagatccggcggacatggccactcgcacaaccacagcggtcacgatggccattgttgctgaacactttcgctgccggcgcttgctggcttcgacgttttttgcatttttgtgcattagggttttgtaattatttaacaataaaaaacgtaactaaaattaaaacaaaagtaatgacaaaaagataatgtttttaacaataaagggtttga

SEQ ID NO: 24726 - protein, 196 aa, DROSOPHILA
MNIRCAKPEDLMTMQHCNLLCLPENYQMKYYFYHGLTWPQLSYVAVDDKGAIVGYVLAKMEEPEPNEESRHGHITSLAVKRSYRRLGLAQKLMNQASQAMVECFNAQYVSLHVRKSNRAALNLYTNALKFKIIEVEPKYYADGEDAYAMRRDLSEFADEDQAKAAKQSGEEEEKAVHRSGGHGHSHNHSGHDGHCC

SEQ ID NO: 24727 - DNA, 2987 bp, DROSOPHILA
gcgtgtggtttggtgcggggggagagcaatgggactgcacagaaagaaaaactgataggatatgtggtgcccaaatgccattttaaattatctgccatttttttattttttaatagggcccagtattattggtattaccaaaaatttacaacctaatataaaattttcttattggcctaaatatcaaatgggccacgtacaccataaaaaaaatgtaattttatcacgaaattgtgaagagctgccaaaaatgtaaagatcgattgtagttagttactcgacgccggtatcggcaaaatttttgcaccgcctttgttattgtttatgctaggacgctcgtaatcagcgcaaaaagcgttccccacagctgtttaatcagcatcgattcggaggtgttgctatagtggtggttaagcgggggcagtcaatgagtccatgagtcatcatgtcattcgctgccttatcgcaatacagggcgaaaatgagggtctgcgatgagcagtggttccattgtttaccaaggaacctgatcttcagctcggaaaaagcttgtccatatcattaatatatacaagagtttagttacaagggctttacgactttccatgttcccaattaatttgcataggttatctttctgtattcctttctttttgacattatatatttatttagccaaagtaatatgactttatttgcaatttatccacttcatatcaattttcctaaagagtgtgtgcgatgttactctttgcgttgttttcatttaaaaacgtctttcacaaagttcgaacttgttttgatcgagagacgagaaccacaactgcggtctagttgcactagtttaatgcttgtacgagaaagctgcattcataacgccaaaacattgacccatttggtttatcgcagcttcccagagccacacactgcacactatcagaaaatgcagttctcactccctccatgagccaatcaccgccagatgagcagtgtggttgagcgaactctgctggcgagatgtatttattctacaccaaaggtctcgcctttgaagggcatgggtcttaacaatattataagtagttaataatactttgcaatggaattttaggcaatggagcaccgaccgcagtgccttgcattggacccgatgagctgccgccgccgtatcagcagagtaccaacaccggaggcgtcccgatggtcacctgtcgggtatgtcaacacatgattgacatcaccacgaagcgggagcagcacgtggtcaagtgcacccactgcaatgaggctactgtgagtaattctaagcagattctttgaatccaattgtaacttaatacgcttttggctatcaacagcccattcggaacgctccagcgggcaagaagtatgttcgctgcccatgcaactgtttgttaatctgcaagagctcgtcgcagcgaatcgcttgtccaaggcccaattgcaagaggatcatcaacctggccccaagtcccgtcaccccgcccgtgccaaccatgccgggcatgtgccgcgtcacttgtggccactgttcggacacgtttttggtgagttattaatccaaatcacagcagcaggagtcttgtaacgcttgctcttacagttcaacacgtatcacaacgccttggcccggtgtccacactgcaggaaggtctcatcggtgggctcgcgctttgccaacagccgcgccgtgatgttcgccatcgtggcgctggtgttcctcatcacaggcatcgctgtaactatcggcacatactcgattgcttcggtaagccaaatcaatttaaaatcaagctgaagtatgtgattttctaaacccatatgtgtgtttccttttgcatttttccaggatcatggtggcatgtacttcctctacgtggcgctgttcgtgatttcgggttgcatgctggccaggtccgcctactatttccgccttaaagtgagcgccatcgatgggccaatgtaaagctaaagcacggggccagtagcaaggaagaaagtgcattgttttatttttatatatatatattattcatatatatcattccttttgatattaaatttaaaactaaacacaagcagccaatttgcagacggaacatatgaacatttctccagcagttcagctacatacaaaaattcttcgtttcgagcaaaactaatagcaaacctagctaaatttacgaaagaaggtctccccgttgaagagcataattaggatattaaggccgtaactaactaaacactatactaaaagcgaatatttcaagggtcgccgtgcagctaccattcaagtgctaaaagtaaaaaaggaaaaccccgatctgtgttggcagtcattagttattagaccagcgaccgatcaatccacagtgcatctcatttttagaatcgtcaggatccattttaaagattgtacagtttcgttgtttaagtgtccgatttgttatccgttcgtgcctgtcctgcaagatatttcggtattcatacattacgtattcgttgatacgcttttgagttttgtgttgcctaaaatttaaccaatgcactttttctcagttctcgccaaagcggaggaaagcgttttgttgcctggcgttagaaacaatttgaagggtatgctaatagtgctaatgaaggtacatacacatacgcgcatatacaataccataaatacataattataatgcaaataaacaaagcaacatttcttgaacaacagagaacaagcaaacgctcatgcagatataaagaaaattaatttagacagcaactgctaaactgcgaaattgcatatatatatatgattaaaaggaacggtttacttttgaaatatatatatatatatacaacaacatttatatttagtacattataaattagcatacatacactgtaaataaaaagaaataaaaccacaagcaccaccaactttttggcgacaaaatgacaaggctatgaaagta

SEQ ID NO: 24728 - DNA, 716 bp, DROSOPHILA
cgaactctgctggcgagatgtatttattctacaccaaaggcaatggagcaccgaccgcagtgccttgcattggacccgatgagctgccgccgccgtatcagcagagtaccaacaccggaggcgtcccgatggtcacctgtcgggtatgtcaacacatgattgacatcaccacgaagcgggagcagcacgtggtcaagtgcacccactgcaatgaggctactcccattcggaacgctccagcgggcaagaagtatgttcgctgcccatgcaactgtttgttaatctgcaagagctcgtcgcagcgaatcgcttgtccaaggcccaattgcaagaggatcatcaacctggccccaagtcccgtcaccccgcccgtgccaaccatgccgggcatgtgccgcgtcacttgtggccactgttcggacacgtttttgttcaacacgtatcacaacgccttggcccggtgtccacactgcaggaaggtctcatcggtgggctcgcgctttgccaacagccgcgccgtgatgttcgccatcgtggcgctggtgttcctcatcacaggcatcgctgtaactatcggcacatactcgattgcttcggtagatcatggtggcatgtacttcctctacgtggcgctgttcgtgatttcgggttgcatgctggccaggtccgcctactatttccgccttaaagtgagcgccatcgatgggccaatgtaa

SEQ ID NO: 24729 - protein, 232 aa, DROSOPHILA
MYLFYTKGNGAPTAVPCIGPDELPPPYQQSTNTGGVPMVTCRVCQHMIDITTKREQHVVKCTHCNEATPIRNAPAGKKYVRCPCNCLLICKSSSQRIACPRPNCKRIINLAPSPVTPPVPTMPGMCRVTCGHCSDTFLFNTYHNALARCPHCRKVSSVGSRFANSRAVMFAIVALVFLITGIAVTIGTYSIASVDHGGMYFLYVALFVISGCMLARSAYYFRLKVSAIDGPM

SEQ ID NO: 24730 - DNA, 2873 bp, DROSOPHILA
tcgtttagtaaattaaaaatattaattttttttcttgatcaatcatctcataataagtacagcgaatgttgaatagattctatttcaacggaaggataactttatatttacaagcaaacattactttatcaattttgttagttcgtgattagaaaccctataagtaattcaaaaactaacacacaagcaacaaatttaattgtggtcactaaattagggaaccaccctagataaaaaagctttatcatttccggcagatgtgaatcattttaaatttctacatatatcattcttctgactgtgctagctttcgattatttcaacataggggcgtagataaaatctacaattaaccagataatttaattggaaacctccagagcagttaagttcaataaaccggtgaaagtgggcacaaaaaagaaattcctggaagagcaaacaagttgacattaattaatcaagtgatgattatctaacattacagccgttactcgtagagaaaaaaagtatacctcattcgttgatgaatatgcaacaggtaaatggaattctcatttcggatcattagttgatctggccatttccgtttgtgattttggttaccataaaagctataaagataagatcgagcgtgcagatcctataaacgcaacgcaagtttgtttcagaagatggacacgcccaatatattttgattttattatttaatttgttaaattctttatatatacgcactcccgctagctgagtgatctaatagtggaggatatcgactttagcgctgatttcagaaatgaagtatgtcattaagttgaagtacatatctactttactaccataccatattgacaacgctttacaaataatgataacttatgataccacatcaaatttcttgtgacaattttaataagaagatcaaatatgcttatcaaccatattgccgggcctttaaaaagagagccaattacttcagtatcagttctttatcaagcttcaacctcagtggttgtccaaaatgtttagctctacgagaattattttgtgcgcatttctattgctgtatccttacggatccctgatagaagcccaggagggcaggcgctatgtgtgtctattatcagatcctcccaatcagtgcagtgaatattgcgtatccgcactgcagccggtcatcgatcacctttcgaaggagcaacaggactggggagcctgcgaggtgaaacttaatggaagcgtcgcgaaactggataagatcgaagaccagttgacggcgacacaaatccaaatagaagcccagcaagcattccttgtgaacaacatttcgaaggcaatcaaaaccgaggaccttgagcaaaaactaaaggatatcgaaggcaatcagacagcgctgagtaatcagttgaaagatggacagaagaggacggaaaaccagttgacagccatccagaagactctatccgatatcgaaaggaaactcgtgctgcagagatatcaacagataggatcgagatatttctacatcgaacacaacttacaggtgaactggaggaccgccgagcagaggtgcattgaaatgggcggccacctcgcagcattccaaaatgccgaggaatacaacgccatagtgggccaattgaacaaggcgaactactggctgggtgtcaacgatctggccaagcagggcgagtttatatccttggcctccggcaaacgagctacctacttcaagtggcgcaaaaatgaacccaaatacaataatcctacccagcactgcgcctacgtttttgggcacgaaaacattatgatcgttctgtcctgtaccactgacgttatgcatttcatttgccaatcagacagtgatgtttagttttaaagtatcaacacatgtatgaatgaatattacaacaaaaccacaaatactataattcactttactgcatttgatgcaaaaattgatgggaacatttaataacgcttttagcaataatttttctttgtgagagggtttaagggcaattttttttgacaacaagtgattgccacagataggaaattatttcgtttcaaattgtcaaaaaagtcgacatggcgccgtaaataaattggctgaaatgagtaataggcttaagagattgctgttatcgaatttattttatttgtttttctggttttggttccccgcacgtcgtaaattaagattgattcctcgttaagattattaaatttatcgtactcgacaagcactctttataagcaacaaatgaataaagaaattttcgactttaatcacaaaaactggcttatatcaattttaaaaactcctattaaacaaggcaataaactgtgtaggttcgtatttcaattaatatttgctaactaaaatatttttggaatacgatatttttgtgccctagttgcacatctctagcatattataagccgatagctccggccgattcccatggcgttccgcttggcatccacctctggccactctaatcaaaacaatacaggaaaacaggcatttttgtgtacaaatattaaaaaaaacattctgcgctacaaaaatggccttggagtccggcagcagcagctcggagtcgggcagctcatccacaagcggatccaccagttcggaaacgggcagcagctcggacacggattccagcagtgcgacgccggaggagaagccatccacgaattcctccgccaaatcccagacgcaaacacaacaacaaactaattccggaaatgcacagagaagaaagcctgttcctgcggcgtcggaggataaacccaagccgagcgtagcgccatctagcaaaaaagtaaacaatcctcccaaaagtaaactctccagcgatgac

SEQ ID NO: 24731 - DNA, 873 bp, DROSOPHILA
caacctcagtggttgtccaaaatgtttagctctacgagaattattttgtgcgcatttctattgctgtatccttacggatccctgatagaagcccaggagggcaggcgctatgtgtgtctattatcagatcctcccaatcagtgcagtgaatattgcgtatccgcactgcagccggtcatcgatcacctttcgaaggagcaacaggactggggagcctgcgaggtgaaacttaatggaagcgtcgcgaaactggataagatcgaagaccagttgacggcgacacaaatccaaatagaagcccagcaagcattccttgtgaacaacatttcgaaggcaatcaaaaccgaggaccttgagcaaaaactaaaggatatcgaaggcaatcagacagcgctgagtaatcagttgaaagatggacagaagaggacggaaaaccagttgacagccatccagaagactctatccgatatcgaaaggaaactcgtgctgcagagatatcaacagataggatcgagatatttctacatcgaacacaacttacaggtgaactggaggaccgccgagcagaggtgcattgaaatgggcggccacctcgcagcattccaaaatgccgaggaatacaacgccatagtgggccaattgaacaaggcgaactactggctgggtgtcaacgatctggccaagcagggcgagtttatatccttggcctccggcaaacgagctacctacttcaagtggcgcaaaaatgaacccaaatacaataatcctacccagcactgcgcctacgtttttgggcacgaaaacattatgatcgttctgtcctgtaccactgacgttatgcatttcatttgccaatcagacagtgatgtttag

SEQ ID NO: 24732 - protein, 283 aa, DROSOPHILA
MFSSTRIILCAFLLLYPYGSLIEAQEGRRYVCLLSDPPNQCSEYCVSALQPVIDHLSKEQQDWGACEVKLNGSVAKLDKIEDQLTATQIQIEAQQAFLVNNISKAIKTEDLEQKLKDIEGNQTALSNQLKDGQKRTENQLTAIQKTLSDIERKLVLQRYQQIGSRYFYIEHNLQVNWRTAEQRCIEMGGHLAAFQNAEEYNAIVGQLNKANYWLGVNDLAKQGEFISLASGKRATYFKWRKNEPKYNNPTQHCAYVFGHENIMIVLSCTTDVMHFICQSDSDV

SEQ ID NO: 24733 - DNA, 4294 bp, DROSOPHILA
cctactcacaaatttgcggctcagttgtcattatcgatatggaaggtaataaattctaggcaggaaatacaaattatacaagttacttaatacatattaaccattttgcagggctgccacttagccacattacacaatttacaccgtcatttgccgccatgttgctggattacattcaagaatgcatctgcatgcgtttgaaagcagttcacatagtgaataattcatatatattcaatatgctctttgccgtattcaagccattcattcgcgaaaagctgcgcaagagggtaagtttgaataagaaatacatgaaataatgttaagttatatgtaataaattcctatttggtagatcttcttccatggcaaggactacaagtccctgatctcccatattgaggcgaaggctttgcctccgaaatacggtggttctgccacatgggaactgccacacggcaaagttttgggcgaattctttgagtgctattccaaggattatgaacgtaagatattcataaacagcaatatcaggctttatatactaataaacttaactttttttttttttagtggctgacagctatgggtatactgaggggtataagatgaagaagtaatagtacaaggaatagtccaaaactaaccccccaaatccgcacaatcctcccttccccctttcgattcgtattttagtcacttaagttgggtcatttgtgatattgcaaatattgtcgtacgttaagtaatagtctctttgccctttaaatgtaaggttaagaaaattattcacaataattaaaatgatcacgatacaagctcatgagctaggcattaaagtggataccatatatactatatattttgtataattgttattgaactaataaagatgaaaaaaatgttgttaaaattcaaaacaaacgttgtgagctgtaatgaaataaaaatagttatgtgcaatcttacccacttaacctactaaaatgataatttcctttgtagttgaagattttatttgacacgaaagccatgggtcaagaaatcattttaatacaaaacatatctaataactaaggaatgtaaaaagagtattcgttagctaagcgaagtccaccagacgtttcgacttcgaaggctatctaatctttggcataggcacgggaatgcttgcaattttcagttgggtgttttagagtgtcactaaactatgagctacgactaaagcactaggacggcttaactatctaaatggcgtgaatgtggcggttctgttcaatcctgcttattgtcgctgatggctgtggatgcagtggccacactttcacccgtctgggatttaataatggttggcttacggcctttttcgaggagcggagaactgtccggagatcctttgacactcttttcgcacaccaaagtggaggccttggacttcagttcctcagcactggagaattgagagcgactcttatactggccattcgttttggttttggtcctcagatcgtatctacgatttcgacaggaagccaatagaatctgaaccggagtccagcagagtagagttatgcctacgatcaagcaaattccggcgaatatatgtccggagagcatgacaatgggcagcaccttcagttgatctgccatatctggagtgattcttactttctgttcgaaccatacgagtgggaaaaatatccttggtattccagtgtataagctaatgccttggattggctccacgagcatattcacttgaaatcgggcagccacctccaggggaataccagtacttggctgcacaaccatataaaactcgtgatccttctggttaggactcaagccctctacctgatctgggtagtaaggatcggcgttgaaaaagtgtggataggacataaaaacaggagatccaaagcgacaggaactgatgttcatcacacccgacggaacacattggccaccacaaaaacaaaggttctcaggatactgggtgcctgaaatataaatctctaatagaatgggtactcacaattaatcaattcttatcaagactcaccattatctacagatcgtggtccgcctgagaatttataaccttccagtccttcaatatccacagtttccacataatccagcggaatagttcggcacatatcgggcgtaaatagaccaacactatcgccgggcttcagatgctgtggctggaactccccggcggatccattggtcataccgcaataggaatcaaagaatccagtgttctcctggtaattccacgagtgcatctgacccagtttggccagttgatcggcgccagtgaagacattaaaaactccggtaagatcggcacttccattgcgcgtatagaaccaaccgaacttatcgaatggaaccttcacctcatcaccaaaaatgggcatggccatggccacgtcgatcattgcgtcattgtaaccggtgaagagcagctcatcgatcgatttttggacagacatctcggcaccgtacatctttagtcccacatcgacaagggagcgcttaactggtggccaatatttggctgtggcggctgcagactgaaatggaaatgtatagttatagttatattatgtaataaaagggaataggatacttaccagagccactgcattaagcgtggtaatctcatcgtccaggctgccattactgcccgccgcatcaaagtagaacaagctgcgcctgcgataagtgacggatgcattttctggatgccagtgaatgtccaccttatcgggtcgctcgataaaacgataaggacccacctgctccagaatgggctttgtggaaaggttgccgaaatcctccggattcgtccagttgtacaggtagatgtccagactgagatcaattggcggactcttccaattttcatagacacgtgtgtcgggggccagagccatttcctgtcgaagaacagaagccgcaattggtattaattgaaaatctcaacgagttttcctcgatctttgactcgcgccaattgagaggcggctgtttttcttttgactttcaattggctttagccactaatcgaatgcagctggccgggctaacactggagtgaagtgaaatgaacttaactgaacctctgtcaatgactgggattaccttgtgcatgatccaatcgaacaggtccacccagaacatgccgcacaatatgccaaatagtcccaggcaaaagccgaaaatgccgataattaatttgcgattacttttttggccccacattgcgctgttttgtgttggcatggctcacgctgggcgatggtgtgtggatacctaatggtggctgtaatgatatgcaagtcattgaaacatcaatgaaaatggataaattgatagtctatttgccaacatataaaaatggatcaaatgaaagaactcataaatgtagtgcaagttgagaatgtactgataagttttctattataaaatcattatgaacaaatcataatacaataatttaaaatataactttacacaatattattttgtgaactcatgttcatgttgcctactttcaggcagtgctagttaaagaataaaaaaaatgtagaatcaaatctcttattaacagatgcatcaagtcacatattaatataagtatggcgaacaaagaaatcaacaaagaattgaatacaaataaaatgcaaaaagcgcagcattttattgagtgacgaattcccatagcgtctatttttatcaatataattgaatcaatttaagcaaagcgtgactttcaattgctgtttacactcatgtagaatatactaagtccggtaagtatatgtgtacatatatacagaactatagtcgaatcccctatcagtggtgataattacaaagcttcccccgacactcaacgatgatgtgttttaattagttatgatagtttgaagctgcattgcaagcaatacgtgtaattatccatttcgtttacgaataacatgcatgaatgtggataaaatattttatgatcgcattcggtaggcgaattttcctatatggggcattcactgtggtccgataagcggattctgaactcttaggtaaacagacccatgaggaagccacagacaattgaggaaattgaactgcactgcacttatcgcttatcgggaatccatcctctggcaattatttgaccaatctgcccagagttcccatcaccaaacactatgtatcacttgagcataaatattgcatatgtacgtacatatgccacaggttcgcatctctgtgatatatc

SEQ ID NO: 24734 - DNA, 1982 bp, DROSOPHILA
atgccaacacaaaacagcgcaatgtggggccaaaaaagtaatcgcaaattaattatcggcattttcggcttttgcctgggactatttggcatattgtgcggcatgttctgggtggacctgttcgattggatcatgcacaaggaaatggctctggcccccgacacacgtgtctatgaaaattggaagagtccgccaattgatctcagtctggacatctacctgtacaactggacgaatccggaggatttcggcaacctttccacaaagcccattctggagcaggtgggtccttatcgttttatcgagcgacccgataaggtggacattcactggcatccagaaaatgcatccgtcacttatcgcaggcgcagcttgttctactttgatgcggcgggcagtaatggcagcctggacgatgagattaccacgcttaatgcagtggctctgtctgcagccgccacagccaaatattggccaccagttaagcgctcccttgtcgatgtgggactaaagatgtacggtgccgagatgtctgtccaaaaatcgatcgatgagctgctcttcaccggttacaatgacgcaatgatcgacgtggccatggccatgcccatttttggtgatgaggtgaaggttccattcgataagttcggttggttctatacgcgcaatggaagtgccgatcttaccggagtttttaatgtcttcactggcgccgatcaactggccaaactgggtcagatgcactcgtggaattaccaggagaacactggattctttgattcctattgcggtatgaccaatggatccgccggggagttccagccacagcatctgaagcccggcgatagtgttggtctatttacgcccgatatgtgccgaactattccgctggattatgtggaaactgtggatattgaaggactggaaggttataaattctcaggcggaccacgatctgtagataatgagatttatatttcaggcacccagtatcctgagaacctttgtttttgtggtggccaatgtgttccgtcgggtgtgatgaacatcagttcctgtcgctttggatctcctgtttttatgtcctatccacactttttcaacgccgatccttactacccagatcaggtagagggcttgagtcctaaccagaaggatcacgagttttatatggttgtgcagccaagtactggtattcccctggaggtggctgcccgatttcaagtgaatatgctcgtggagccaatccaaggcattagcttatacactggaataccaaggatatttttcccactcgtatggttcgaacagaaagtaagaatcactccagatatggcagatcaactgaaggtgctgcccattgtcatgctctccggacatatattcgccggaatttgcttgatcgtaggcataactctactctgctggactccggttcagattctattggcttcctgtcgaaatcgtagatacgatctgaggaccaaaaccaaaacgaatggccagtataagagtcgctctcaattctccagtgctgaggaactgaagtccaaggcctccactttggtgtgcgaaaagagtgtcaaaggatctccggacagttctccgctcctcgaaaaaggccgtaagccaaccattattaaatcccagacgggtgaaagtgtggccactgcatccacagccatcagcgacaataagcaggattgaacagaaccgccacattcacgccatttagatagttaagccgtcctagtgctttagtcgtagctcatagtttagtgacactctaaaacacccaactgaaaattgcaagcattcccgtgcctatgccaaagattagatagccttcgaagtcgaaacgtctggtggacttcgcttagctaacgaatactctttttacattccttagttattagatatgttttgtattaaaatgatttcttgacccatggctttcgtgtcaaataaaatcttcaactaca

SEQ ID NO: 24735 - protein, 534 aa, DROSOPHILA
MFWVDLFDWIMHKEMALAPDTRVYENWKSPPIDLSLDIYLYNWTNPEDFGNLSTKPILEQVGPYRFIERPDKVDIHWHPENASVTYRRRSLFYFDAAGSNGSLDDEITTLNAVALSAAATAKYWPPVKRSLVDVGLKMYGAEMSVQKSIDELLFTGYNDAMIDVAMAMPIFGDEVKVPFDKFGWFYTRNGSADLTGVFNVFTGADQLAKLGQMHSWNYQENTGFFDSYCGMTNGSAGEFQPQHLKPGDSVGLFTPDMCRTIPLDYVETVDIEGLEGYKFSGGPRSVDNEIYISGTQYPENLCFCGGQCVPSGVMNISSCRFGSPVFMSYPHFFNADPYYPDQVEGLSPNQKDHEFYMVVQPSTGIPLEVAARFQVNMLVEPIQGISLYTGIPRIFFPLVWFEQKVRITPDMADQLKVLPIVMLSGHIFAGICLIVGITLLCWTPVQILLASCRNRRYDLRTKTKTNGQYKSRSQFSSAEELKSKASTLVCEKSVKGSPDSSPLLEKGRKPTIIKSQTGESVATASTAISDNKQD

SEQ ID NO: 24736 - DNA, 3248 bp, DROSOPHILA
tgcgggaacttatttgtctaacactaaaactaatttcatttacgtttaggaataattcaattatcaaacgattccttagccatttggagttctgaagaagacacaaagttagcagatttgatctaataaagtaactggtataggttgcgtaaagtgcatcattagccgatagctcaataaaattaatttaaggactcaaattaaaataataataataatatacaagttttaagcctaaatttaaaactattttcaggctcctctcgatttcttgcatgctatgaaaaaatgtacacatattttttgtaattataattgtccaacataaaaatctaacaacaataaagtgggaatctaaatcatagtcgcttaagcatagtcaaattaacaagtaatatgtaatatcggttaactggaacttatggaactggtcgtttagcacagaatatattgttcggttatcggttatgaatggtgtgtggagttctgtgtgtttatgtgggaactgtggtggtgggtgctgttgctggtattttgatcaacaaaatacggtcctaaaacgggagaattacaaactcgttaatacaaactcgttaataaatgtcacagaacatttagttagattagccgaattttgtcagaaagcgcttacggttagtttcggttcggattaaaagccaccaaatttggattgtttatgttttttgtggtgttagtcacatggggatttcctcagccgaggcgcaaaccattaagcccaaaatcgagctttacctgccgcaagacaatttcaaattcaacgacaacttcaaacaaaggaacaccaagagagcctatgttatgactacgttgtggttacgataacgcattacaatctctacgcctacgtatcgggctcgtgttatttgaatacttcaacaatcggtttggtttctggttagccgtgcgtgtgggtgactgagtttcagaattttgatatcttattatgatttcgttggacttaagcagtacttgagttatgggaggcgccactgatcgcattgaacaaagccatgctattgcgctggtttatgctgtcggcatcgtcgccgagcggctggaaggactcgtcgtccagcaactcactgagcgcctggcacagcttctcgtagttctccttgagcacatgatggtactccttctggtcagcgctgatgatccgctcgttgaggaacagggccttctgacacaccacaatgaagtcgctgcaagaaagagaccacaattaataaacgtaaagcactagtcactagaaatgcataccgaaaaacatccttgagatctccgacgcgatccattgagaagttgttaaccacctttgcatcgagaaaggcatgagcgtaggccaaaggaccagcatttacagtcaccgccacacttccctgcagacgcagctgcaacttcttcacatcggccggtgggagtatgatctcctccagctctgaaaccttggattgcatttcatcgatggccacctcaatggggctcagttctatgatttcacgggatttgacgggtatacgtttaagaacatatgggaaggagtattgagctgcaataattgatgctttaatatggtacaaatgaaattaaagacggtttttacatactttttataaccgtcttgcgtttccattgttcttctacgctgccacgggctgcacccgatttggtgaacggagtctcgtacataaaagtatccacatcatgattctgctcgaattcatttagcctttggtctagctcgtccttggagaagaaaggaatcacatgggtgacctgtatgtaggcaagtttggcatctagttcgtctactttaacctgaaaaaatgagttgtaaaattttataatacttaattgtttgtcttaaaaaatcgtctataaataataataaataataatataatgcaataataatgcaatcaatggtggacatacactagtaacttcgagatcaagtcgtccctccagcaaatatcagaatgaagtttgtttcagaatacttcccaccttcaacagatttggttcaaatagctcagcaactttactaggtactagtaaattgtttgttatttttatacaactaccacaatccgcacactagaaccgcaaaaatatccaaaattttgtagagatcgagttccttcttttggcacaaaccataagttcatcagattgtcggacatacggtaactatttcacaatacattgtccgttcccttatggagcagctctttgagttcccggctcgtgcgatgggtctgggattggtccagatgccgcagatgcagataccaatcccatgtaggagggagtactcgctaaatccgaacgcagtggaattcgtgccatcttttcgccagaaatccgagcctccaagtccatcgaccaaaacggaggcgacctcaactacaacattgctgcgtcccgaggtcgttggtgatgccgtgaatcgtgttgaaaatgggatttttctcgagcgccagatctttgacaccctaagtcaactgggagacgagcaaatgcctctggaagagatcgcggttggtgtattaccaggaggacaaggtcttagtatgactttcaccaccaaagagcacgatcagatgcagcctttggaccgaaatactctagtaaaccacagtaaacagtgcctccagctggctgtgggcgatcaggcgaagttggcgaacagacctgagaccgttctaattgcccaattcctcatccgggtcaacgatcttttgaacgagaagtatgaatacggtggcgatggatccgtgtgtcccagatgcaccctgtgctcaaatcgcagctatacggagctggaaatcgaaaaccaaatcgagtgcataaaggcttttgagaaatttttcacctttacggaatcaactcgctaccaagacatagtttctcacaaagcctttaaggagctgtgccacaggctgggtttgatcgtaagccgagatcagatccaggttaaccgcccctccacagtggtccctccacccacggcacagtcatctagtataaccctttgcatgtccaagaacgaaatggaatctaatgtagaggccaaggcttatagaggagatgacgaatccagtttcaacggttgtgaactgaccgcgaatggaggtcaacatccatctatttctaatgaatatttgaggggaaagctttacaggtgggtgggtcttaagttaagt

SEQ ID NO: 24737 - DNA, 705 bp, DROSOPHILA
atgtattgtgaaatagttaccgttaaagtagacgaactagatgccaaacttgcctacatacaggtcacccatgtgattcctttcttctccaaggacgagctagaccaaaggctaaatgaattcgagcagaatcatgatgtggatacttttatgtacgagactccgttcaccaaatcgggtgcagcccgtggcagcgtagaagaacaatggaaacgcaagacggttataaaaaaactgagccccattgaggtggccatcgatgaaatgcaatccaaggtttcagagctggaggagatcatactcccaccggccgatgtgaagaagttgcagctgcgtctgcagggaagtgtggcggtgactgtaaatgctggtcctttggcctacgctcatgcctttctcgatgcaaaggtggttaacaacttctcaatggatcgcgtcggagatctcaaggatgtttttcgcgacttcattgtggtgtgtcagaaggccctgttcctcaacgagcggatcatcagcgctgaccagaaggagtaccatcatgtgctcaaggagaactacgagaagctgtgccaggcgctcagtgagttgctggacgacgagtccttccagccgctcggcgacgatgccgacagcataaaccagcgcaatagcatggctttgttcaatgcgatcagtggcgcctcccataactcaagtactgcttaa

SEQ ID NO: 24738 - protein, 234 aa, DROSOPHILA
MYCEIVTVKVDELDAKLAYIQVTHVIPFFSKDELDQRLNEFEQNHDVDTFMYETPFTKSGAARGSVEEQWKRKTVIKKLSPIEVAIDEMQSKVSELEEIILPPADVKKLQLRLQGSVAVTVNAGPLAYAHAFLDAKVVNNFSMDRVGDLKDVFRDFIVVCQKALFLNERIISADQKEYHHVLKENYEKLCQALSELLDDESFQPLGDDADSINQRNSMALFNAISGASHNSSTA

SEQ ID NO: 24739 - DNA, 7770 bp, DROSOPHILA
atcagaaataagtatacatctagctattgtgcaatgtggatctgggtgcgccgatttatattactgaccgcagattgctgacaacaaaaaaacaaagaaggggtgaagttatgtgaagtatatgtgtctcctttagtaaaggtagtccgccgatctactaaggatagctcttggtgtatatgtaataagctgcttgctttatatatttatgcacgtattatatacctatgtatgtgggttcatgcgcgttcttgcctagtcctagtaattattaataagtttcaattagctgtcatttaacaacaaatatataaaacgatgcatgcttttctcgaaagttaagaattacagaaatgcgtcacaatcatgatgaagacaacttgatgtgcaactttgtatatgttttggtatatatatatagactgttttttgagcctccacaacttagataaatggtcgtctttttcttttctacatctcacttgagatcgctcctccctaaggtatgttttagaaacattcaacaattgcatgtagaacggccctaaaaaccactggctcgtcttttcctcggggctaagtgaacttgctggaaactaggtaacattggccatcattgcatcgcattgttacttgtctcggagtggtgttgttagtaatcctgaagccttaataatagtatacatacatttgctgtctgtgtgttctatgaactgttcaaatagagggaaattaacaaaaatttcatgtataagtaccaactacatattcgagcacgggtataataattacaatagatgttcggggcgttgctattgggcacacttcaatagagtagaatgagatatcatgaactaatcacaccacgacactatcgctacgtgctgccacagacgactttcttgaaagtgcaatttaatgaagaaacaacccgagtcggatatctatgagtttgtgttctttgatcgtttgtttgccaagcaaattgattactggatatcgacacataaatgcagtttatagagcgttgattggtttcttgttaatatttattgttacggttttattgagtggtgtgtttgttacccttatatattcacttctgttccatcttgcaagctgcgcgatgacatatattgctggcccattaactaggttcctaataaataacgtatgtaaatatgtgcgtatctatgcgggtgctaatgcatgtcagtgtggatagatagaggagtttgtctgcttgattgtaatgtgtagtaatatatcaatacgttcgatctacggagagatgctaacattaattatttcttgagattccagcagggtattcgccgcattgccttcatattcactcattcaatagatacaaactgctcatgccacgccctcgttccattccattagagggttgtggtgcgcagcatggctaccttgccctccggcttgctggttggtctctccttatccgtgtccgccacctcctgctgctccttatccttcttcctaatcgcacccttcttgtccgcatcattgtgccttccggcagttagtttgcgcacaatcaggctcccggtgtgcttgatgttcctcttcaatcgattgcccccaccaccgccaccgccatcgcctttgaccttttgcccactgccaccactaatgactttggcttcactggttttgccgccttcaacgccctcagcatcctcttccataatcggatttattgggctaaagtcagcgaagagtggcacatccacggagtgacctggctgtgtgtcaatcacgtgtagatcttcaacctcctcgctggactgcatattctccttggaactgaagggagagtacatttggaacgccgacagcaacgagttcgattttttctgatcctcgctaccacctgtggacagcctgctcttcttacgccgctgggagccctgctggctggttagtgagcggcatagaagagagagctccgacagccgggaggtgctgtcgttgctaggcctccgacaattggtggtggtcatggtgtcagttggatcagtgggccgcgaggcggtggcggccgcattcccctcgttgttcgtttggttaagtcacagcttgaggtcaaaagcaatgcgcgacgcaatgttcttgaagccaatgctggtgcctgaagatcaataaaaaagttgagttatttaatctttacttagtgttataaacaaatcataccggaaattcgcttgaagcgcactccattcagagagagtcgtggcagcttgcacacttctatttcccattgcaccagtgagtccgtattgggatctccatgcacgcaccacaggacgaatctatgaagtagggtaaaggattcataaataccaatttatttcactgatatccatttattaactcacctttcccgctgttcgtagtcgcaattattctggtccagcacctccctgatcttttgcattatctgatcgggcatcaggggcgatgtggttttcattgaccatgtgaatcgtagaactcgtggcttagccgcctcgtctgcgattgtgggactgaaaatatataacttatttataatcgaaagtctcgcggtccacagccgtttaagtgacatttgtacgttattctctcttgtaaatttttgttatgatttattaatgtaataagctgcatacgtattcattgcacttgattgcttttaaaaattaaataaatttcaactttcaacactttcagaacgttatttgtactctcatttcaatttggctcatttatttataatattagacaagtttaaatcaaatatttagagaatcctataaaattggttattatttgttaacaaactcccagcttttttttaaccacacccagagtcttgtggacagcaaatgcaagtgttaatggataatgaaataaaattgaaatgcatgtggggatattcttttgctcgcaaatgtttcacatcgtttattatggatttattaaattatcaattgttttaattatgcgttatttctttgaaacttaatatgtatagataactactgatcgagccactgaaggcgcccgatgataacacgatctatagataatcagctgtacaaataaaatggtcacatgcactagtggtaatacattgttattccttgaatttaagttaaattggttttcatgtatcgctttgtattgttttttagtgactacgtggtatgcttaattactagatacgctgcacatctggcttctgggtgattatgaattgcaagatcgttagtttgttggctggctgcttggttggttggttggttggttgatattgattgattgtatgatccacggatacaatttaattcaagctcatatcgaaatacaaatacagatccatacatacatacacatacatataaatacaaagatcgctaaataaaattcaagatcatcgttacaaaattagcaacttcttttggtgttttattgtggctactataaaataatgatttgggcgaaaacaccacgcactttagttcagtttagatcgttttagttgagttaggcttaagttaattttactttttgcagttatatctcacgttcacttcatcagtgatatttgtttgtttgtataactataattgcgatacgcatttaacataaatatatatgtagtttaggtagtactcgtaggtgtaatatttagtagttaatataatccataatcgtgacagtgacagcaatggtagtcaggattctttctgatcattgcatttatcatatctttgtttcttagtggatttctgtttgtatcggtttcgtttcggttttaatttgtataattcattatttattttgtattgccttttgctggtcgcggtcgctcctcgcatcgttttacaaacaatgaaaacaaagggtttcgtaatttctgtttgtggttgctttacttttaaatatatgtatatgtatctttaatttatataaatttatatgtataattagttaataattgtaataaaacataggcgtatttgtgaaatttcaattaacgcaacggaactcaacgttgtcggtgttcatttgaaggggttcgaatcgaaaccggaaacggatctgaactcgaaatggaattcgaaagcgatttcggatcggcaacggcaacgtgaacagtatcgtttcccgatctgatccgatccgagcgatccgattggattcgaccatatctgtgtctgtctgttcatatctgaacctctccgtcacgcgcgtttactctaggggaatcgtttgtttcagtttcagttttagaactattaacaagaagtagttaatgcttgttttgttaattactggtttggcctaaaattaaagaaaaaattttaaacaaattattcacggctggaaaaaatattaataatgggtaaaacaaataccagaaatgaaaccaaagaagacagataagaataaaacggaatatgggtaagtttcatttttcatgtttcttcatagaaaaagaaaagtaaacgcaatcgttcttcaactgataagtacattgcacattgtacatttcaacaatttttgtctttctatttgtcaaagagcataatcgtaattaattgaatcatgtatttaataaatgaaagaaatagacaagaacaaaagagccttcctagcgtgaggtgatataatggaagtacatagttgtacaaagcaaacgtggatatacaggatttgaaaaactacgtaatatttatatatgctttttgtaagaaatcaatcgagaataaaacaaactaaaggttgtgacggagattttgagagcgtagagaggaagcgacagacgtcatcagattattattatcagattatatattggattggattcagttccgtataacatgtactttttcgcacattgtcacatatgcttgtatgtatagttttgtatttgtttagcacctgaatcaaaggcggatttctattttggattcgaatattgatattgcaatcggtgtgatggtttgagttccgtattatttttcgtttatagtaattgatcgatcgtattatatggtacatcccaaccgaataatagccagtcgttcactgtttctaaggctgagccacattcagagtatatttcacaaataacatatgtaagtagtatggtacgtatgctaactaaatatggataggaataaaaatgttttttagcaatgcattgcgagcgtctaactaatcgaccgaaccgacatatgcaccccacccattgtcaccgatccactgatccaccgatccacaatcaccgaacccaatggaaccaccacaataaattaggggcaaatagtgagtgcatcggaccgatgtggtgcatatgcggtatgttggcggtcgtttttaagcaaaagtcctgggtgtacgttaaatgtgtgttgttaggtgtttattgtatatacatagagagtacatactttcctgctgaaagtctttcagttcaacaaatggaaaaaaaaggtaacaaaacagaagaaaaaaagaaaagaaattccatatacaaaacatgtgcatatcattagtggaggataatcaactgtttcataattatgagttagcttttcggattaaaacaaaatatagctaattatctcataacgcccattacactttttatccatcatgcattcgaatgcaagtgctggttgtcatttaattagtaactatcctaatcggtcgaataacttgcgcagttgcatagctgttatgttggctgatatggggaactttttttttaggagttgctaactttatttatcctgaaaattgaagctgcttctctctctttctctcgataaaattattaatttaacagggtgcagttaagtagtttaacatcgtgattcttgtgagagggtgagggggctagacatgaatatccaaaacattgaaactatagtgcacgttatttaacacccttccaagtggcaatacagtgcgattcagtccataaaaataaaacttttaaatgcagaaattacgaaacgtacttgtcaatcatgatgcccggattactacaatcgccaatactgtatacttatacaattttcccaactaaacctataccttttcatctcaaatgttgtctgtggttcctcttcgcctgtccttccttagagctaagctcaaaataagcatttaactatagtctgttttgatttggaaaattctgcatatccaacgggtgtttttgaacgagattttttagttatgtgctcgatggacatggcattgcaacttctttggtagcgattacttttggggctggtttcagtgatttattggcggactctcagaatggactcggtacgaaatacaaacatgagcataataaacacacatgggtgtatgtgcggcagatatgcaattaaatgaaacataaatatgaaacataaaatgataaacgagaaaaaatcaaacaaacaagaagtaaattaaaaaagaaattaataaaccaaattgatgtaagaaagaataacaaacgaataataaatgtatcgaattgcagtttgcatttgcttttcttgtaatattccattaactgaagaaatgaatttgccactttgtgatatcttgaagccactacttaccgtttgctaaaacgtgaggagagtttggagaagaagctcatgcgacccggatgggaggagtcgccggaggcaccgctggtgcccgagtattccagcgctgtgttgtttcgtgctctggtttgacctagggattgcaatgattccatagttagattcggatcgctaacgcactcaaggatgtgtacacgaacacagactaaatgctaactgattccatttggtttgtaaactagggtattactaaagtaactccgagtacgcacatacggttccactgctgggctcaaagtgcaatgcgagtatattactaacaaataaatgctatttgctaaatgaagtgcttaacaactattttactcactgggaaaatctaaaggtatcgcaattttacgaaatcaaaacttatcttccaattgtatttatgttagctattactatctttaatatattctttaaactctcccatactattgacttcaattgataacatatactagtaatctcattgcactttgtcccatatgcaaacatttttcaattaactttattttagtgaacacgcgattgttaaatatagacagacaaatgtccgttctcaattgtacagttattttggtcgctatgaatagttttccatccgtatttccaaatacacaaatatattaaatatttacaggtgggcggttttggatgggatttggttgattcgatgcataataggcaaacgaactagatttacgaatccacttagacaaacgtgcagaggggtgcggcattggatcgcggaaatcataagcgatgcgatgcgtataaaaacataaagtaaacattcagttaaatgtatcgatcgagttgattatatagtaattaatcgcttgacaacctaaaagaaaataatagaggcgcgtttgatatgcattttgtatggagaagaggtgcagtgcgggatacaattgaattgttctagtggatgcagcatgaaaacgggttcagtttcaaaaataatatcaaaaacatcactcgacaacgcgttaacatctactaatgagtttagcctagttcggccttaaattttttttaaatgttttagtagaagaaggtggggataaaattaaattattatctttaa

SEQ ID NO: 24740 - DNA, 1460 bp, DROSOPHILA
cctaggtcaaaccagagcacgaaacaacacagcgctggaatactcgggcaccagcggtgcctccggcgactcctcccatccgggtcgcatgagcttcttctccaaactctcctcacgttttagcaaacgtcccacaatcgcagacgaggcggctaagccacgagttctacgattcacatggtcaatgaaaaccacatcgcccctgatgcccgatcagataatgcaaaagatcagggaggtgctggaccagaataattgcgactacgaacagcgggaaagattcgtcctgtggtgcgtgcatggagatcccaatacggactcactggtgcaatgggaaatagaagtgtgcaagctgccacgactctctctgaatggagtgcgcttcaagcgaatttccggcaccagcattggcttcaagaacattgcgtcgcgcattgcttttgacctcaagctgcctagcaacgacagcacctcccggctgtcggagctctctcttctatgccgctcactaaccagccagcagggctcccagcggcgtaagaagagcaggctgtccacaggtggtagcgaggatcagaaaaaatcgaactcgttgctgtcggcgttccaaatgtactctcccttcagttccaaggagaatatgcagtccagcgaggaggttgaagatctacacgtgattgacacacagccaggtcactccgtggatgtgccactcttcgctgactttagcccaataaatccgattatggaagaggatgctgagggcgttgaaggcggcaaaaccagtgaagccaaagtcattagtggtggcagtgggcaaaaggtcaaaggcgatggcggtggcggtggtgggggcaatcgattgaagaggaacatcaagcacaccgggagcctgattgtgcgcaaactaactgccggaaggcacaatgatgcggacaagaagggtgcgattaggaagaaggataaggagcagcaggaggtggcggacacggataaggagagaccaaccagcaagccggagggcaaggtagccatgctgcgcaccacaaccctctaatggaatggaacgagggcgtggcatgagcagtttgtatctattgaatgagtgaatatgaaggcaatgcggcgaataccctgctggaatctcaagaaataattaatgttagcatctctccgtagatcgaacgtattgatatattactacacattacaatcaagcagacaaactcctctatctatccacactgacatgcattagcacccgcatagatacgcacatatttacatacgttatttattaggaacctagttaatgggccagcaatatatgtcatcgcgcagcttgcaagatggaacagaagtgaatatataagggtaacaaacacaccactcaataaaaccgtaacaataaatattaacaagaaaccaatcaacgctctataaactgcatttatgtgtcg

SEQ ID NO: 24741 - protein, 322 aa, DROSOPHILA
MSFFSKLSSRFSKRPTIADEAAKPRVLRFTWSMKTTSPLMPDQIMQKIREVLDQNNCDYEQRERFVLWCVHGDPNTDSLVQWEIEVCKLPRLSLNGVRFKRISGTSIGFKNIASRIAFDLKLPSNDSTSRLSELSLLCRSLTSQQGSQRRKKSRLSTGGSEDQKKSNSLLSAFQMYSPFSSKENMQSSEEVEDLHVIDTQPGHSVDVPLFADFSPINPIMEEDAEGVEGGKTSEAKVISGGSGQKVKGDGGGGGGGNRLKRNIKHTGSLIVRKLTAGRHNDADKKGAIRKKDKEQQEVADTDKERPTSKPEGKVAMLRTTTL

SEQ ID NO: 24742 - DNA, 7875 bp, DROSOPHILA
cttaaatggtgttgtaatgtttttagcgaaccaaattgttttttgctgtgcgcatttattactggaattctttgttctcccaccgccatagccgtttgctttaatttatttttatacaaatcaataataataaaacacaaattaaacggtccataacccgaagatggttagactactactactaaattattgcctggataaataaaccatttctatttctgaatatataatttatagtttgtagaatagtaaagtcttatcgtcgttgcttagttgcttaaggatacctgattaactagcaatgtttcgagcttgttatctttttactaaattatatcattcattaattgacttcattcatttgtggtagcgccacctgtggggcgctatgcgcactctgcaatttaattataacagctgatcgacaacctgttagtcggctatctctcttgcactctcatctgtcgaattttttgtaatgagccagtgaaggagtgagcgagatcgagtgtgagaatcgttttggaggagatgctctcttttattttttacactttgaaaaacccaaatataaatattttaaaacgatttttaacggaaaaaatatacattaaaaacgttggccaaataagtttaggagcctaaaattactgaaaaaccttttttattttaaatcttaccgaatcagttgaatattaaataagagacttatgtaattaaattaaactatttaaaatatgtaacacagaaattaatgcatatatgggcaaaaaaattaattttgttaaattaattcgttcttcaatttaaacatattacagatcatttgcgtttggttatctaagtccgacaagtaaataaatttttatcttgtattgtttttattgcaggcttttttgcgagtgtactcccatccatctcactcccactcgctggccgaccgaataaccaaacgattgtcgccggtcgtcagtcttgaatttttcgtggagcgattaacacacagtgaacatagatcgccaaaggctacaatttgctgaatcggattctaaccattcgcattcgcatccgcatcctcagaaaaccaagacgaaaattagatcggtggccaaatgcaggctacgaaaataaatcattaacaggcgaaatacgtgtgtgttttctgtattttgttgttgatttttttttttttttgcttcgtttgttttgcttacttttttgaccgacttctgggacaagaacaacatcgagagctacagcaacaacatggatgccgaggtgtgtaattaaattgcaatcgttaaatttaagacacatgcctaaaaaaagaaaacccaaaacgcaaaaagtgaaacccaaaagacgaaagggccgaaaaagaggaaacccacagagaaataattacgacgcacaataaaaaacgagttaattttgccggctgtcaaacaacaactaaaactcaaattcaaagcaaaaaacaaaaaccaaaaaaaaaaaaacataaacacagacaacttcttttggcaaaaccaaagaaattcaagtgtaaagtcatacaaagaaaaaggcaacaaacgttttagtacagctgttgcattttttttcttggccaaaatccaggggtgtggtggagtttatttgaaagggggctggttaactgagataagccagcttaataacagcaattaaccattggaatgtggtataaaaatcgtagaggaaactgattaagtatgcaaataattgtgatgattagagcattgtgaattaggcggaactaagtgtaactaaatttatttaaaaatattacataaacaaatagaactaaaataagaatgattgtttgcaaggcttctttcctatttaattgagttaataacttcaatgaatccaataaattcagatatcacatatgacttggtttttatggccattaggcttcaatattggcatcaacttccgctaaacgagttcattgattactgcgaaattcctgcttatctgatggattggatttatggatttgctggcacttatctccagtgaaagattaccaagaatttatggtagcaaaacccctccgagatgagacacccctgcattttgcccagttacgcctgaggtgtttatttttattatttttttttttgcaattagaaaatgcaaatgatgaaaaatggaaaatcacacacttttatgcatttgcttgatcaaggtcagaacttgttctgcccagacaccaatcactattttacttttatacactcagctcaactaccagtagactttattggatttcgaaatataaataaatatttcgaaaatgtttatagccagctaaaaattaaattaaattaaaaaattaaattaaagaataatttgcatttgaaaatgtaagcaacaactttcgctgccccaaaagtgaatctcacatatcgtgaaattcatttttccaaatgcatttgtatggcgaacaaaagctttgccaataaaagccaatcaagattccctttgagcttgccagatttccggcaacattaataaaggagaaattaaacaattttttgttgtgttgcctccaagtgcagtgaaccctcgacatcgcgaccagaccaactgaccaccagaacccgacgcaccatcgccgattgaaaattttccactcgaagacattgcttaattcaagaagcaaagagtacaaaaatgacaaaaaataaaaaaaaaaaagcataagggaaatgagaccgcacataaataatatctctgttgacagtttgccaatgtgtgctgccatgggttaagacggcggtcgtccagagaggggtctcgcgggtgggtggaccataccacgcacttgagactgctgggagactatctggtgctatctgtcataaattgacggcatgcccgtctgcttttccacggtaaatgtctggtctagattaatgtggaagcaattcaagggtatggtatcacccccctttccgaacccatggcctacctctatactttcgttacttgcaaaccgcctaaatttggaaaggcgactccttgaacaccctactttctatatatatttattatcgagcatactttgtcactcccgaaacagtgaatcttcaatatcttgccttgttatttttcctttcattcacattctaccatctagctagtgtacgataataacaatttatactttgttttaactacttttaactgccgataagcaacgaaattggtgtctagatttacacaagccgtcatgctagctatgtactatagttgcgcggagcaccctgttgaatatcacgtatacgtcaggggcgccatgtcctccagtagattgcgtataccacatgtgagacgacgataatctaaacgaggcctaaatgattcgcagcgaaagcaaaatcagtttggcgataagtagctcgttatttacgacacttaagattcacttggaccccttcatagatatacaaaaaatatatatgtacatatatacattaggtagctggcaacaggtattgaaaaacactccaacactttcgacaacttcatgtgtccaactgacaaagtggccaataagtcatgcagtcatccatcttgatcaatgtatcatatgtttaattttgctgtcataattcactgatagtaatgtatcgatcgagatttaaatattgtgaatgaacgtgggtttttccaatacgtgtcaatggtgacttttgtaatgaattttgtgaagaaaacgtgatgggatcgaattgcaaggcacggattgatagaaaatttattaaattaggcaaatttttttaaattcttgataagtaatgagtaattcgtatgattaatttataatttttctgaatacttcaatgttgaacaacgcccttaacaggagtcaatacattttataacaatgttaactactttccgagattgtctacaaatttcaattagacccattgaactccgacgctcgaggcagacacgtgctatagatatagatatcgatgggtctattgctctgtttggcagtcgttcgggtgtcatcgaaaggccacttatctggccgacactatatatagataaagatatagatggcatttaatttgctttgtattgggcttttatgaatccgtttaattgactttgatttagtttgtgaccatatttatggccattggactaacctgaatcgttggcattcttatcactcatatggggagaacttttccatctgtcgcactggcatggaaatcccctattcaatttattacagtgggcactatgttgtcaagccatgtggtattatatatattttaacgagtcgatctgtgaatcccccgagatatgatctccgtctatgaacttaaacatggagattgacaggcggaaacacttgagaggtttgcgttttttattggttaattaaaaactatcaaccattcgtggaaaaaggcgattatttcgatgcatacttttaattaaattgtaagcttttgtttttatttccttgcatcgtgcgaccaatgaaatacgtattataaaaccgaaaggcgccaaatcaactagagaaaaatcagacagcgacagttccgagacaggaaactgcggagggaggatcgacaggtgaaacggcagttggaggtgcagcagccaaggtcacgaaggaacaggatcacgatgcggagtatcatccgcctacaaggtatgactgcttgtggaaattcctcgatctaactgcttgcctcctgtaaccaaactaaaaacacctacacccaccaacaacctgcgaattatattaccattaactaatgcgtcaatcatgctaaccgttgaaagagctttagatcttagagtatataatatatcctaacttccacttaagtacctgtaccaacacccagcatttacctcaatccagcctgaaatcctgctttaaccaactaacctgccttgcaacaattaacctgcttgaatcgatcatgactcccagctttgaaataatggccttgtactttttactagcactcccgtatcaaaagctatcatcgacaagccccaatagtcacagcttaaaacgagttcatcagtaccaactaacaataatcccgacgatattcctctccaaggaacaacaagaaaattgaaaccatcatcaagcaacccgaatatccagttaattcctttaaaacctttaaccccataacctatatatctgcaattcaacctataacgatcctgagtcccagctttaaacaaatgtaccactgattgaaacctactaaccgtgatcccaactaaagccctcccaaatgcaaaagactaacggagttattataccaacccatcagtggataagacctaacccagcacctccataaacgaaccccaagccccaagatgatctatgttcctgtaattcaagctatctggagaccatcgtgcacctattcaagggcaacattgggcctggtctgttcgccatgggagatgccttcaagaacggaggtctcctggtggcgccacttctgactgttgtcatagcagtggtgtccatccactgccaacatgtcctagtgacctgctccaagaagatgcgcgatcttaagggcgatagcgtatgtgcggactatgcccagacagtggaacagtgcttcgagaatggtccatcaaagctgaggggctggtcccgaacgatggggcgactggtggacatattcatttgtgtgacccagttgggcttctgttgcatttactttgtattcattagcacgaatctgaagcaggtgagttttgtttgcgatgggaggagagagaagaaaactgatgatggagtcttggattgccttttccaaagatcctgcaagcctacgatatcgacatgaacgttcatctagtgatgctgctggccttcgtacccgttctcctcagttcactaatcacgaaccttaagtggctgactcctgtctctatgttcgccaatgtttgcatgatcctgggactggccataacgttgtactatgccctcaaggacggactgccggaggttgaggaacgcgccctctggacgaatggctcccagctggctctcttcttcggcaccgccatctttgccttcgaaggcattgccttagtgatgccgttgaagaacgccatgcgaaagccacaccagttcgagcgacccttgggtgtgctcaatgtgggcatgttcctcgtctccgtcatgttcatgttcgccggatcagtgggctatatgaagtggggcgagcaggtcggaggaagtttgaccctcaatctgggtgataccatgtgagtggggcagtcttggctatgacgccaatatcacatgattctatgagatccttcgtcatccacagactggcccaggcggtcaaactgatggtgtccgctggagtacttctcggttatcctctgcagttcttcgtggccatccagattatgtggccaaatgcaaaacaaatgtgcggcatcgaaggacgatcactgcttggagagctcggtttccggacattcatggtcctggtgactcgtaagtatccggaatgtgggaccaccttaaaaacaggaaaaactgacaaggttctcatgcagttgccatcgcggaaatggttccggccctgggactcttcatttcgctgataggcgcactatgctcaacggcgttggccctggtgtttccgccagtcattgagttgatctcaaggagcgagctgaacaaaggaccaggcatctggatttgcgtgaaaaacttagtcattctagtgttggctttacttggcttcttcactggctcctacgaaagcctaaagcaaattgtcaagcatttcggggaggaagaggtgcactgagaattaaccaacaattgagggcaacatggataactaaagatcccaatccagtcgtcatcaacttagaagaaacagaaaatagccgaagtcttccaagagcagaccaatacaagatcaagcaatataaaactcaaaggatcaaccaaaccaacatagttacaaaaagattttagcggaactactgatttttataaacgccaaaattcccatatcatataaacaacatactcaggactccggcttgaaatgtaagaaatattaaaataggagacgacttccaaaaaatggattttaggagaaacacaactattaacgatctccgagtttttgagatgccaaatcagttgggatgccttacacgaagaaaacaggaatggcagaggatcatatttatcgaaacgaaatgatataccaaacctcaatgatataaagctttaaagataatgagaaaaataacggcaaccatttaacagccatcattttagccatatgatcacaaaaacattttaaaacaatttaaaatgtacccactcttaatccttaattatttacatgaaaacccaatatgcttgcgaatttaccacaaacaacaaaacaaacacaaccatttatatatatttatttatacctaagtgccttcttttgtgtcttagtaagcgtgtagcgcattttacctactataattgattatttttttaatagatattaagtgagaataaacaatgcgacgttcgttttgacgtcatcgcaacatgacaagaacttgacagatgtgtttttggggcttcgactgctcaacagagcagactaacaatacgtttataattggaatggattttcaatacgagaggaatgtgcagtcgagtgaaaaaatcgcggaatattgatatcatgattaaaacgcccttctctgcgcttctcaatctatacagctaaccaattccaaagacttgcgtgccataattattatgctgaatcaaaaatcatttgccgctcttta

SEQ ID NO: 24743 - DNA, 1673 bp, DROSOPHILA
acacagtgaacatagatcgccaaaggctacaatttgctgaatcggattctaaccattcgcattcgcatccgcatcctcagaaaaccaagacgaaaattagatcggtggccaaatgcaggctacgaaaataaatcattaacaggcgaaatacgtgtgtgttttctgtattttgttgttgatttttttttttttttgcttcgtttgttttgcttacttttttgaccgacttctgggacaagaacaacatcgagagctacagcaacaacatggatgccgaggcgccaaatcaactagagaaaaatcagacagcgacagttccgagacaggaaactgcggagggaggatcgacaggtgaaacggcagttggaggtgcagcagccaaggtcacgaaggaacaggatcacgatgcggagtatcatccgcctacaagctatctggagaccatcgtgcacctattcaagggcaacattgggcctggtctgttcgccatgggagatgccttcaagaacggaggtctcctggtggcgccacttctgactgttgtcatagcagtggtgtccatccactgccaacatgtcctagtgacctgctccaagaagatgcgcgatcttaagggcgatagcgtatgtgcggactatgcccagacagtggaacagtgcttcgagaatggtccatcaaagctgaggggctggtcccgaacgatggggcgactggtggacatattcatttgtgtgacccagttgggcttctgttgcatttactttgtattcattagcacgaatctgaagcagatcctgcaagcctacgatatcgacatgaacgttcatctagtgatgctgctggccttcgtacccgttctcctcagttcactaatcacgaaccttaagtggctgactcctgtctctatgttcgccaatgtttgcatgatcctgggactggccataacgttgtactatgccctcaaggacggactgccggaggttgaggaacgcgccctctggacgaatggctcccagctggctctcttcttcggcaccgccatctttgccttcgaaggcattgccttagtgatgccgttgaagaacgccatgcgaaagccacaccagttcgagcgacccttgggtgtgctcaatgtgggcatgttcctcgtctccgtcatgttcatgttcgccggatcagtgggctatatgaagtggggcgagcaggtcggaggaagtttgaccctcaatctgggtgataccatactggcccaggcggtcaaactgatggtgtccgctggagtacttctcggttatcctctgcagttcttcgtggccatccagattatgtggccaaatgcaaaacaaatgtgcggcatcgaaggacgatcactgcttggagagctcggtttccggacattcatggtcctggtgactcttgccatcgcggaaatggttccggccctgggactcttcatttcgctgataggcgcactatgctcaacggcgttggccctggtgtttccgccagtcattgagttgatctcaaggagcgagctgaacaaaggaccaggcatctggatttgcgtgaaaaacttagtcattctagtgttggctttacttggcttcttcactggctcctacgaaagcctaaagcaaattgtcaagcatttcggggaggaagaggtgcactga

SEQ ID NO: 24744 - protein, 468 aa, DROSOPHILA
MDAEAPNQLEKNQTATVPRQETAEGGSTGETAVGGAAAKVTKEQDHDAEYHPPTSYLETIVHLFKGNIGPGLFAMGDAFKNGGLLVAPLLTVVIAVVSIHCQHVLVTCSKKMRDLKGDSVCADYAQTVEQCFENGPSKLRGWSRTMGRLVDIFICVTQLGFCCIYFVFISTNLKQILQAYDIDMNVHLVMLLAFVPVLLSSLITNLKWLTPVSMFANVCMILGLAITLYYALKDGLPEVEERALWTNGSQLALFFGTAIFAFEGIALVMPLKNAMRKPHQFERPLGVLNVGMFLVSVMFMFAGSVGYMKWGEQVGGSLTLNLGDTILAQAVKLMVSAGVLLGYPLQFFVAIQIMWPNAKQMCGIEGRSLLGELGFRTFMVLVTLAIAEMVPALGLFISLIGALCSTALALVFPPVIELISRSELNKGPGIWICVKNLVILVLALLGFFTGSYESLKQIVKHFGEEEVH

SEQ ID NO: 24745 - DNA, 3845 bp, DROSOPHILA
ccactaccgactgcatcacctcggaaagcaggtgtccacatttggatgtggaggtggggcaaacaacagtacatcagggtttcacttcgagtggcggaacttaccgcaacgacatcgccctcctccgattgcaattcccagtgcggtgagtagcagtgatctccaccctaatctccacatcttatggaaatttctttacaaacccgctagatacacgaaaaagatccaacccatttgtctattggacgccgaatttcccctacaggatttgaatttgcaaatctctggctgggatccgactaaaagcagtcaaacgttgatcaccagcacggtcaaggaaaggaatcctgctgattgcttgaataggtatcccagctttcgctccgcgtcccaagtatgcgccggtggtcaacggaaaggggacacctgtgcgggcatctccggcagtccggtaatgggcatcatgggaagcggcgtcgacgagttcgtctttttggcaggcattgcctcatatggacaacaatattgctactctgctggtattccaggtgtttacacaaaaattggccacttttcggagtggatcaaagcgaatttggctccctaattttaataaagaattcatatttgcaaaattggaatagcatctgttccattaatccactactataaagtaatagacctataaaaccccaaaagataagaaaaagcactgaagattgttttttaaaaaacgtgttgttcaaaaaacataacgtgccgagagaagattaagcataaataaatttctaataactacaccgctgggtttgcccagctcagcagaactactatgtaaatattaaggcagggaaagaccaccctattcacatagcttttgcctttgttgcaatctagatggtattgagtccggagataacctctgctaatcacgcccaatgcatcgggagagaatcggtgacagcgaaactgccggacagcttggttagtatcagcttggagcccatagcgacgagatggcttctacggaacggaattttctgctactgtcactggtggtcagcgcattatccggcttggtccatcgatcaggtgggtaagctgtcctttgggcaaacaatatccacagcaactggatgcaatggtgcttctttcaaaagtatatagttctatatatatagtatagtatagtatatagtttgaataaagctagaaaaactaagcacttgaccttgttgattgtgagaataaaaaccataacaactaataatcaaagagtttttgaaaacttcaaatatattaaatatcaacatatagtttcccggactaagaaattttatgagaaatattagacatgaagtccattagtagaatggattgcctttaatggattggttcagaaccggttagactgcatcgtaaatcgcgctcttctcttccagacgcagcggagatcagctttggcagttgtacgccccagcagagcgatgagcgcggccagtgcgttcacatcaccagctgcccctacctggccaacctgctgatggtggagccaaagactcccgcccagcgaatccttctctccaagagccagtgtggcctggacaacagggttgagggcttggtgaatcgaatcctggtctgctgtccgcagagcatgcggggcaatatcatggactcggaaccaactccttcgacgagggatgcactgcagcagggggatgtgctgcctggaaatgacgtctgcggcttccttttcgctgatcgcattttcgggggcaccaatacgaccctctgggaattcccatggatggtattgctgcagtacaaaaaacgtgagtagattacctacccaggctctattttaatctcttataggaaggttgtttcacgaggtcacctgtaatcattttttaatcactttttcaaatcaaattctccaatggggggatcatcattataagaaaacgcatattcaatatatacaaggctattattagtatctaatcaatttataatatgtacttgggaaacgctctttatcctttcagttttttctgaaacctacactttcaactgcggcggtgcattgctcaactcgcgctacgtcctgaccgctggacactgcctggccagccgagaactggacaaatccggtgccgttctacacagcgttcgcctgggggagtgggacactcgtaccgatcctgactgcaccacccagatgaacggacagcgcatctgtgcaccgaaacacatcgacattgaggtcgagaagggcatcatccacgagatgtatgctcccaattccgttgatcagcgtaatgacattgcgttggtgcgccttaagaggattgttaggtatgtggtccagagatccctcaattattccactgacttgcttttttgtttttgccacagctacaccgactacgtgcgtccaatatgccttcccacggatggtttagtccaaaacaactttgtggactacggcatggatgtggccggctggggacttaccgagaacatgcagccaagtgcgatcaagctgaagatcaccgtcaacgtttggaacctaacgagttgtcaggaaaagtactccagcttcaaggtgaaactggacgattctcagatgtgtgccggcggccagttgggcgtggatacatgcggtggcgattccggcggtccccttatggtgcctatatccacgggcggccgggatgtcttctacattgccggcgtcacctcctacgggacgaagccctgcggcctcaagggatggcccggcgtctatacccgcacgggggctttcatcgattggataaagcagaaattggagccatgatgaatacatacttaaatacatgataaccatgtgaaaagcgcgatgtagatattggggtttaatcaattcacatgagatcggcactgtcaagttttgcgagcacaaccggttgtaataatatcgaaccacttttctgtcaatctgtgatcagcaaagtctggtagtagcttgcccacgtaatttcccatattctaatggaaaagtagaggaaaatctctggaactcatttatctctgttgcaatagccatctcacttgtcaatctagacggcagatgtgccggagagcttggtcagtatcggattgggttctggggtatcgagatggcttccatggaatggaattttctactattgctaatggtcatctgcgcattttccgagtgggtccaacattcagatgggatgccataaacgacaacgatttcacctggatccgcttaaaattttgaaatatatccacacacgaggtggagaagggcattgtacatgaccaatagttgcctaattccgtagaccagcagaatgacattgctttggttttgaaaaggagtggcattgaaaaggagtggcgggtgtgtgggatgtgtgagtattccataacttcttcatcattgttattcattcaccagctacaccgactacgtgcgccccatttgcctgcccacgggcgatctgatccagatccaattgtgcgccggcggcatgtacggctatggatacctgcgatggcgattctggcggtcccttgatggtgtccatatccacaggcagccgggacgtattctacatcgctggcattacttcctacggcacgaagcagtgcggcctcggtggataacccggtgtatataccctcaggggggctttcatcgattggataaagcagaaattggaggcataataaataaaattgctagtttattcacatttctcgcattggctagcttacaatattacgtacatggtgctgattggacgtgggatggactaactaagcta

SEQ ID NO: 24746 - DNA, 1219 bp, DROSOPHILA
agcccatagcgacgagatggcttctacggaacggaattttctgctactgtcactggtggtcagcgcattatccggcttggtccatcgatcagacgcagcggagatcagctttggcagttgtacgccccagcagagcgatgagcgcggccagtgcgttcacatcaccagctgcccctacctggccaacctgctgatggtggagccaaagactcccgcccagcgaatccttctctccaagagccagtgtggcctggacaacagggttgagggcttggtgaatcgaatcctggtctgctgtccgcagagcatgcggggcaatatcatggactcggaaccaactccttcgacgagggatgcactgcagcagggggatgtgctgcctggaaatgacgtctgcggcttccttttcgctgatcgcattttcgggggcaccaatacgaccctctgggaattcccatggatggtattgctgcagtacaaaaaacttttttctgaaacctacactttcaactgcggcggtgcattgctcaactcgcgctacgtcctgaccgctggacactgcctggccagccgagaactggacaaatccggtgccgttctacacagcgttcgcctgggggagtgggacactcgtaccgatcctgactgcaccacccagatgaacggacagcgcatctgtgcaccgaaacacatcgacattgaggtcgagaagggcatcatccacgagatgtatgctcccaattccgttgatcagcgtaatgacattgcgttggtgcgccttaagaggattgttagctacaccgactacgtgcgtccaatatgccttcccacggatggtttagtccaaaacaactttgtggactacggcatggatgtggccggctggggacttaccgagaacatgcagccaagtgcgatcaagctgaagatcaccgtcaacgtttggaacctaacgagttgtcaggaaaagtactccagcttcaaggtgaaactggacgattctcagatgtgtgccggcggccagttgggcgtggatacatgcggtggcgattccggcggtccccttatggtgcctatatccacgggcggccgggatgtcttctacattgccggcgtcacctcctacgggacgaagccctgcggcctcaagggatggcccggcgtctatacccgcacgggggctttcatcgattggataaagcagaaattggagccatga

SEQ ID NO: 24747 - protein, 400 aa, DROSOPHILA
MASTERNFLLLSLVVSALSGLVHRSDAAEISFGSCTPQQSDERGQCVHITSCPYLANLLMVEPKTPAQRILLSKSQCGLDNRVEGLVNRILVCCPQSMRGNIMDSEPTPSTRDALQQGDVLPGNDVCGFLFADRIFGGTNTTLWEFPWMVLLQYKKLFSETYTFNCGGALLNSRYVLTAGHCLASRELDKSGAVLHSVRLGEWDTRTDPDCTTQMNGQRICAPKHIDIEVEKGIIHEMYAPNSVDQRNDIALVRLKRIVSYTDYVRPICLPTDGLVQNNFVDYGMDVAGWGLTENMQPSAIKLKITVNVWNLTSCQEKYSSFKVKLDDSQMCAGGQLGVDTCGGDSGGPLMVPISTGGRDVFYIAGVTSYGTKPCGLKGWPGVYTRTGAFIDWIKQKLEP

SEQ ID NO: 24748 - DNA, 2433 bp, DROSOPHILA
agtgcgtggagtaatatctctacgaagatatctgtatctatgatctgaatgtatgcgtacgaaacacaagaaacatttagttagccttacaaatcatcatttaagagcaagaaactttctgaaacgaggggaaggcacaatctaagcttgattttttaatctagcccgaagtacataatgcttcactatttaatgtacaaatagatttacaagactaacatctgcacttacatgtatgtgccagttcttagctatctgcctactttctatataaggctggcggacatgcaagataagccatagccatattcttcccgatttctgcgtatatgtacacctctataaaacgctggcgagacaaagtctggcccaccatagttcaactgaagttttgtcgaaaatgaagtatatcggctttgtcgccatcgcctttttgctgagtctgtccggcagtcgtttatgggtgcatgccaagccgggtgagtaggaatatgattgctccagaccgtgctaaactatggatgattcccgatcgtgtagagatgtgccagcagccctcttcgatggtgggcatggcgcaggatggagctgcctgcatggcttttatgccggcctggacctatgatgcctccaaaaacgcctgcaccgagttcattttcggtggctgcggtggaaactccaatcagttctctaccaagagtgaatgcgaaaaggcctgcaaggactaaagaaatacgaaatcacatcttcacatcttgggcaaaacccacagcctaaaacaaaacaatcttgtaacttaaaagccaaaacaaacagtcggcaatctggtttcgcaaaatggcaaacaaaataaaaaccatactcaacaatatcaaggtttgttgtttttgtcagtgctcaagagacctgaccctcgtcgattgataaccgatccggtttgtgcctatagtatataaaacgaccaacatctcggatcggtcaacagttcggtttgagatttcagtaaagcaagcccaagcaaaatcaatatgaaatacctagtcgtttttgcactcatctgctgtcttgtggcatcagcatttgcgactttgaaaaaccgtaagtaataacggagaaagcgatcaaatttatagctactaggctttactagcatgaggtacagaatggtctcgctgtgttgtgctaaaaatggtgcttcaatttgaacttgcagcaatctgtggcgaggagtttggcgtcaagggtacttgccgttccctgcaacccatgtggacctatcgcccagatacgaacgagtgcttcaccttcaattactccggctgccacggaaacaataatctattccacaaaaagttggagtgcgaagaaaaatgcaaaatataagtgcccatttggttgtgaataaagttggaagttcggttttgttatcctaatgtgatcatctttattgttttctttatgaactcgtttaatatttattaatattggtttggcggttactatacttagttttcgattcagtgtcataggctaggctatatgtgttcgattcgtcgttagctatatctatatgctgtagtttataggtatgtatatatattgcattagattttgtatatatgttcatatgcatttgcgtgttaattaatattgttaatcattggagttgtcctcggctgttgctgattatgttgggttcaatcgggggttatcttttcgcaatctaactgccacaaacaaacaacagctaattatcattctaacgtacctaagattttattcgagtgcatctgtttaattgtttttttttcataaatttttttttccttttgtgtttacttggttcaattaaagttaggctagagcttattctactattaaactttaaaatgttttcattgtttattgttacaaacgcgctggtttgggtatttcattttaaagattttctcggactttgtttggagaccaaagaaaatggcgtggaaataagatggcctgaagtttgtacaaatttataaatctgaaaaataaaatacccagccttttcattgcacactctgttcgttttttcctcggccaactattgtttattccattttggtcagcaccacgtttccattcaatgaacccgatcctgcaatcgctcctgatcctggagagccctccgttgctgccacgcccccggatgattgctgcgtgggcgtggttggtggcgacaatgtggcatgttgctgctgctgatatgcaactgccgattcggccagatccaaaagagcggccgatgatgtgccgcctcctgccgaacctgatcccgaaccagatcctgagccggggcccagaccattcatggtcatgtcctgagcctcgtgcttcattctcatcgtgttgttattgttgtgattgaccacatgctgccccaaggccggatgg

SEQ ID NO: 24749 - DNA, 318 bp, DROSOPHILA
cagtaaagcaagcccaagcaaaatcaatatgaaatacctagtcgtttttgcactcatctgctgtcttgtggcatcagcatttgcgactttgaaaaacccaatctgtggcgaggagtttggcgtcaagggtacttgccgttccctgcaacccatgtggacctatcgcccagatacgaacgagtgcttcaccttcaattactccggctgccacggaaacaataatctattccacaaaaagttggagtgcgaagaaaaatgcaaaatataagtgcccatttggttgtgaataaagttggaagttcggttttgttatcctaa

SEQ ID NO: 24750 - protein, 79 aa, DROSOPHILA
MKYLVVFALICCLVASAFATLKNPICGEEFGVKGTCRSLQPMWTYRPDTNECFTFNYSGCHGNNNLFHKKLECEEKCKI

SEQ ID NO: 24751 - DNA, 4492 bp, DROSOPHILA
aaggagaagcacctaaaattaagaaaccagaagtaaatactaagcaccagccgaaggaaaaccttaagagaaagtcgcccaaggagaaaacacctaatattaagacacccaagaagttaaagaaactaaccgcagaatagagtgtagttaatgtttgataatttaaataaaattccccccttttgattgaccattaattaggtgtaaaaaaccaatatgcgaaacgtgtttcaatcgtaaattctggtttacagtggttgctagtacagtaagaatgcagttaaatttttaaaatatttattatcgtacacgatatacagacatagatatatatatataaatatatatattattagtaagccggctgagtgatttactggatatacattgattggttactttagcttatatacttattagattttcatgtgcaacagagttttcgttcatttgcgtaaacttgacgggcttatgtgatcgatttgtagcttcaaatgtgtattaatccaacagcaagcgcggtatggttaggtaaacgtaattcatatgtatagtttccattctagtacaaaatattcaacatttgcgtgtatgcattaacatggggctttcatcgaatctcgaatcaaaatctacttcagcagtatacaaacatgtgtacatttgtttatatcgcatataaacgcatatcaaccgtgcacggcaatccgtaaatcctgttgctgtgcatcgttagtagctatattgattttttgcaatactacggaccccgggaatggcggggtgagcagaatcgatagaacaagtgggcaaagaccggagaaaaaatgcacattaaatgagaaaattgaaacgcgtttcccattgtgtttagctcggttttaggtagtacatatgtattcttagttcctagaatgaatcgattttagttattcaaaaattgtgtaaatataataaaaatttatatttccttttcgtagctccctatgaattacagaaacaaagccgtcgccagccgctttccactttctgatctcttcactttctcgctatcaagcagtctcacatatttgctgttatttgttcttactcctctcgtctcgtttcgtttcgatctcataactcatttctcggttcatggtcgccctgggaagaccctgtgacaggctccccggactcctcttatataaggcgttgaacatccgctcaagttgctgataaactgatgtttgcaaaaaaccgtacccttacatattgaatgcaatgcattaaaggaaaaatatttactttgtttttacattttctgtatgactgagataagggaagtaattcaagaatgtagagcctgctcctactatctgggcccgtattaaatccgctcagggggttatcgtttcaatttaagaactgactttacttgactgccgtttgtatctctgtgtgtgtgtgtgtgttttgttggggaatcggggtataggggcatctctttggatattaattatattgggtaatatggtgtggctccccgcttttaaattacgtgtgcagcaaccgatctcgggccgacggcgagcagttttgtggagctgcagccgcaccaccaccactgccacccatgtgggtgggtggtggtggtggcggctgcgttgcggcgaccttagcggtatcgaaggctggacaaaccgcacgcgctccgcatccgtggatgcggcactgctgctggccgccgcagctccggctgccgcattgaaggccgacgtaaaggcggtggcggctcaaagggtgtggtagttgcgctcgttgcgggccttgtagaacttgtaggccactaagccgatagcgagcaggcccagagtcagcacaatgccgccaatgaacgaggatccatcgaaatgaccgcacggcacgggcttcggcgccggagtggttgatgtgtgtggcggcggcgtagttgtggtcgagttcggagacggagtggtcgtagatgtagttccaggcgtggtggtggtcgttgccggagtggtgctgctggtggtgctggccggagtggtgctgctggtggtgctggctggagtagtggaagttgtggtcttctcagtcgatgtggtaattggtggcgtcgtcgtggtcttttcagttgtggtgctcgtggttgaggtcgacggtggcgtcacagtagtggtggtgtccggcggagtggtggtgttcttggattcctgggtggtggtgtccgctggagccggtgtggtcactgctaaggcaaataaaaagagtttataaatattagcttatgataagttcgtaaaactatttcacatcagatagactcaagtgtagtaaatattatagtaatgaacccaatgtgtggttttttttaatcaaccctttttgatacgttcatatttcttatttcagaatgaatacatcgtaaaaaaataattttaagtaagaacagcgcctatcatagcttcaaaaaaacagggcttgtgtgcagtaatcagcaacgaatattatagataaaaacttatgcgtcactccaaagttaaaagcaaataaattggtaagcatgataagttcacaacgactcttattgatcgatttccaatatttcaaaaagcacaacgaatacacatgttttgtaagaattgaaaataaaaatagttccattgcacatgtaaatgatgtcaaaattgtcaaacaaaatagaaaaacgtaacaaaacaaattgatttggttcggaaaataaagattactatattcaaaataggcagcatttaggtgatatttatttgtatgcaataatggaatttaaggaatggaaatttaagaaagctgaaaaagtaaacattaaattgtttgtcaacaaaatatggtcaaaatctctttaaatcctaaaatatgtacaaatattttcgtatggtaattaggacgtgacgatttaaataaatgcttgcgaacaaaatatggttacagctcggtaaatacatatttaccaaatgtccacaaatattaacgtatggtaatgtgacaatttacggactttcgtaaattccaagtttcttttggaaagctgtagatttgcagttcttatgcggagaacattcccccaaagtcggagtaagagaaaatggccggagaattgatattcaatataggaattggcatttaaaaaacccccacatccacacacacgcacattcatgcacacacacacccacatgcccgcacggcgcacacacgcgaggggtttgcgcacacgtacgcatgcacatgcaagcgtgtgtgtgtgtgtgtccgagtgcataattgagaaatgagtgttcggcgtgtcttcaattcgattttaattcggtgtaatttgatcaaagactcaccttcttcgcacaaattcgcggagaagaggcccacaaagaggcacaagattaggaatttcgcctgccgattcattgtggtcgttaaacgctgagtactcgaacgacaaagtcagcaaatctgcaaggcaaagaaaatacgtttgcgaagtggttggggattaacagataccgctggagtcagtattgcacaactggcgatgtcgccgagctccgatttcgctcacccacaaattaaagcaaggcgcaattaaggaatgaataacacgacacgaagaccagattcttttatgccaactcgatacttcgatgcatcccgatacatcgacagctgagccgtgctctgcagccctggcactcggcgcttatcagtagggggagaccgtaatgtagttgaaacgcctcgcatttggtgcaatataaaattatgatcataaatttgtccttatattttacttgatttattactataaaattgtatacccacctagcaatttatttgaaatatttgtaggttaaatctatataaacataagtaatttttcacagctaaatctttcttgataacgcaataactcattaatttaatttgatcgacttaaatgtaccatttatattattttattttagtgagtatatagtagtagtacagtataaatatgaagtttttataattatttatcaaattagagagtgcctctgttccaagtgtagaattcaggtgtgttgggggaatacccctaataaaattgctgtatcatcattatatcttgttgctgcagagcgaagaagacgtcagtgtcagtttaattccgtaatccaagaaacggtaacacttcacacttggtgattcagaattagtagatatttcttgtctgtttatggcccctgtgaagacaggactcgaattagcgtaaaggaacgaccaggagagcaccaagatgacctcgtacgtgcgtgccatgtacgactttaccggggagccgggctcctcggagctctccatcgcgactggcgacgtgctctcggtgacccggagcgatgtgggtgaaggctggtgggagggcaagaatgcccgtggccagattggcctcttcccggctgcgtacgtggaggtgatg

SEQ ID NO: 24752 - DNA, 1372 bp, DROSOPHILA
atttgctgactttgtcgttcgagtactcagcgtttaacgaccacaatgaatcggcaggcgaaattcctaatcttgtgcctctttgtgggcctcttctccgcgaatttgtgcgaagaagcagtgaccacaccggctccagcggacaccaccacccaggaatccaagaacaccaccactccgccggacaccaccactactgtgacgccaccgtcgacctcaaccacgagcaccacaactgaaaagaccacgacgacgccaccaattaccacatcgactgagaagaccacaacttccactactccagccagcaccaccagcagcaccactccggccagcaccaccagcagcaccactccggcaacgaccaccaccacgcctggaactacatctacgaccactccgtctccgaactcgaccacaactacgccgccgccacacacatcaaccactccggcgccgaagcccgtgccgtgcggtcatttcgatggatcctcgttcattggcggcattgtgctgactctgggcctgctcgctatcggcttagtggcctacaagttctacaaggcccgcaacgagcgcaactaccacaccctttgagccgccaccgcctttacgtcggccttcaatgcggcagccggagctgcggcggccagcagcagtgccgcatccacggatgcggagcgcgtgcggtttgtccagccttcgataccgctaaggtcgccgcaacgcagccgccaccaccaccacccacccacatgggtggcagtggtggtggtgcggctgcagctccacaaaactgctcgccgtcggcccgagatcggttgctgcacacgtaatttaaaagcggggagccacaccatattacccaatataattaatatccaaagagatgcccctataccccgattccccaacaaaacacacacacacacacagagatacaaacggcagtcaagtaaagtcagttcttaaattgaaacgataaccccctgagcggatttaatacgggcccagatagtaggagcaggctctacattcttgaattacttcccttatctcagtcatacagaaaatgtaaaaacaaagtaaatatttttcctttaatgcattgcattcaatatgtaagggtacggttttttgcaaacatcagtttatcagcaacttgagcggatgttcaacgccttatataagaggagtccggggagcctgtcacagggtcttcccagggcgaccatgaaccgagaaatgagttatgagatcgaaacgaaacgagacgagaggagtaagaacaaataacagcaaatatgtgagactgcttgatagcgagaaagtgaagagatcagaaagtggaaagcggctggcgacggctttg

SEQ ID NO: 24753 - protein, 183 aa, DROSOPHILA
MNRQAKFLILCLFVGLFSANLCEEAVTTPAPADTTTQESKNTTTPPDTTTTVTPPSTSTTSTTTEKTTTTPPITTSTEKTTTSTTPASTTSSTTPASTTSSTTPATTTTTPGTTSTTTPSPNSTTTTPPPHTSTTPAPKPVPCGHFDGSSFIGGIVLTLGLLAIGLVAYKFYKARNERNYHTL

SEQ ID NO: 24754 - DNA, 3891 bp, DROSOPHILA
atcagaaataagtatacatctagctattgtgcaatgtggatctgggtgcgccgatttatattactgaccgcagattgctgacaacaaaaaaacaaagaaggggtgaagttatgtgaagtatatgtgtctcctttagtaaaggtagtccgccgatctactaaggatagctcttggtgtatatgtaataagctgcttgctttatatatttatgcacgtattatatacctatgtatgtgggttcatgcgcgttcttgcctagtcctagtaattattaataagtttcaattagctgtcatttaacaacaaatatataaaacgatgcatgcttttctcgaaagttaagaattacagaaatgcgtcacaatcatgatgaagacaacttgatgtgcaactttgtatatgttttggtatatatatatagactgttttttgagcctccacaacttagataaatggtcgtctttttcttttctacatctcacttgagatcgctcctccctaaggtatgttttagaaacattcaacaattgcatgtagaacggccctaaaaaccactggctcgtcttttcctcggggctaagtgaacttgctggaaactaggtaacattggccatcattgcatcgcattgttacttgtctcggagtggtgttgttagtaatcctgaagccttaataatagtatacatacatttgctgtctgtgtgttctatgaactgttcaaatagagggaaattaacaaaaatttcatgtataagtaccaactacatattcgagcacgggtataataattacaatagatgttcggggcgttgctattgggcacacttcaatagagtagaatgagatatcatgaactaatcacaccacgacactatcgctacgtgctgccacagacgactttcttgaaagtgcaatttaatgaagaaacaacccgagtcggatatctatgagtttgtgttctttgatcgtttgtttgccaagcaaattgattactggatatcgacacataaatgcagtttatagagcgttgattggtttcttgttaatatttattgttacggttttattgagtggtgtgtttgttacccttatatattcacttctgttccatcttgcaagctgcgcgatgacatatattgctggcccattaactaggttcctaataaataacgtatgtaaatatgtgcgtatctatgcgggtgctaatgcatgtcagtgtggatagatagaggagtttgtctgcttgattgtaatgtgtagtaatatatcaatacgttcgatctacggagagatgctaacattaattatttcttgagattccagcagggtattcgccgcattgccttcatattcactcattcaatagatacaaactgctcatgccacgccctcgttccattccattagagggttgtggtgcgcagcatggctaccttgccctccggcttgctggttggtctctccttatccgtgtccgccacctcctgctgctccttatccttcttcctaatcgcacccttcttgtccgcatcattgtgccttccggcagttagtttgcgcacaatcaggctcccggtgtgcttgatgttcctcttcaatcgattgcccccaccaccgccaccgccatcgcctttgaccttttgcccactgccaccactaatgactttggcttcactggttttgccgccttcaacgccctcagcatcctcttccataatcggatttattgggctaaagtcagcgaagagtggcacatccacggagtgacctggctgtgtgtcaatcacgtgtagatcttcaacctcctcgctggactgcatattctccttggaactgaagggagagtacatttggaacgccgacagcaacgagttcgattttttctgatcctcgctaccacctgtggacagcctgctcttcttacgccgctgggagccctgctggctggttagtgagcggcatagaagagagagctccgacagccgggaggtgctgtcgttgctaggcctccgacaattggtggtggtcatggtgtcagttggatcagtgggccgcgaggcggtggcggccgcattcccctcgttgttcgtttggttaagtcacagcttgaggtcaaaagcaatgcgcgacgcaatgttcttgaagccaatgctggtgcctgaagatcaataaaaaagttgagttatttaatctttacttagtgttataaacaaatcataccggaaattcgcttgaagcgcactccattcagagagagtcgtggcagcttgcacacttctatttcccattgcaccagtgagtccgtattgggatctccatgcacgcaccacaggacgaatctatgaagtagggtaaaggattcataaataccaatttatttcactgatatccatttattaactcacctttcccgctgttcgtagtcgcaattattctggtccagcacctccctgatcttttgcattatctgatcgggcatcaggggcgatgtggttttcattgaccatgtgaatcgtagaactcgtggcttagccgcctcgtctgcgattgtgggactgaaaatatataacttatttataatcgaaagtctcgcggtccacagccgtttaagtgacatttgtacgttattctctcttgtaaatttttgttatgatttattaatgtaataagctgcatacgtattcattgcacttgattgcttttaaaaattaaataaatttcaactttcaacactttcagaacgttatttgtactctcatttcaatttggctcatttatttataatattagacaagtttaaatcaaatatttagagaatcctataaaattggttattatttgttaacaaactcccagcttttttttaaccacacccagagtcttgtggacagcaaatgcaagtgttaatggataatgaaataaaattgaaatgcatgtggggatattcttttgctcgcaaatgtttcacatcgtttattatggatttattaaattatcaattgttttaattatgcgttatttctttgaaacttaatatgtatagataactactgatcgagccactgaaggcgcccgatgataacacgatctatagataatcagctgtacaaataaaatggtcacatgcactagtggtaatacattgttattccttgaatttaagttaaattggttttcatgtatcgctttgtattgttttttagtgactacgtggtatgcttaattactagatacgctgcacatctggcttctgggtgattatgaattgcaagatcgttagtttgttggctggctgcttggttggttggttggttggttgatattgattgattgtatgatccacggatacaatttaattcaagctcatatcgaaatacaaatacagatccatacatacatacacatacatataaatacaaagatcgctaaataaaattcaagatcatcgttacaaaattagcaacttcttttggtgttttattgtggctactataaaataatgatttgggcgaaaacaccacgcactttagttcagtttagatcgttttagttgagttaggcttaagttaattttactttttgcagttatatctcacgttcacttcatcagtgatatttgtttgtttgtataactataattgcgatacgcatttaacataaatatatatgtagtttaggtagtactcgtaggtgtaatatttagtagttaatataatccataatcgtgacagtgacagcaatggtagtcaggattctttctgatcattgcatttatcatatctttgtttcttagtggatttctgtttgtatcggtttcgtttcggttttaatttgtataattcattatttattttgtattgccttttgctggtcgcggtcgctcctcgcatc

SEQ ID NO: 24755 - DNA, 1667 bp, DROSOPHILA
ctgtccacaagactctgggtgtggttaaaaaaaagctgggagtttgttaacaaataataaccaattttataggattctctaaatatttgatttaaacttgtctaatattataaataaatgagccaaattgaaatgagagtacaaataacgttctgaaagtgttgaaagttgaaatttatttaatttttaaaagcaatcaagtgcaatgaatacgtatgcagcttattacattaataaatcataacaaaaatttacaagagagaataacgtacaaatgtcacttaaacggctgtggaccgcgagactttcgattataaataagttatatattttcagtcccacaatcgcagacgaggcggctaagccacgagttctacgattcacatggtcaatgaaaaccacatcgcccctgatgcccgatcagataatgcaaaagatcagggaggtgctggaccagaataattgcgactacgaacagcgggaaagattcgtcctgtggtgcgtgcatggagatcccaatacggactcactggtgcaatgggaaatagaagtgtgcaagctgccacgactctctctgaatggagtgcgcttcaagcgaatttccggcaccagcattggcttcaagaacattgcgtcgcgcattgcttttgacctcaagctgcctagcaacgacagcacctcccggctgtcggagctctctcttctatgccgctcactaaccagccagcagggctcccagcggcgtaagaagagcaggctgtccacaggtggtagcgaggatcagaaaaaatcgaactcgttgctgtcggcgttccaaatgtactctcccttcagttccaaggagaatatgcagtccagcgaggaggttgaagatctacacgtgattgacacacagccaggtcactccgtggatgtgccactcttcgctgactttagcccaataaatccgattatggaagaggatgctgagggcgttgaaggcggcaaaaccagtgaagccaaagtcattagtggtggcagtgggcaaaaggtcaaaggcgatggcggtggcggtggtgggggcaatcgattgaagaggaacatcaagcacaccgggagcctgattgtgcgcaaactaactgccggaaggcacaatgatgcggacaagaagggtgcgattaggaagaaggataaggagcagcaggaggtggcggacacggataaggagagaccaaccagcaagccggagggcaaggtagccatgctgcgcaccacaaccctctaatggaatggaacgagggcgtggcatgagcagtttgtatctattgaatgagtgaatatgaaggcaatgcggcgaataccctgctggaatctcaagaaataattaatgttagcatctctccgtagatcgaacgtattgatatattactacacattacaatcaagcagacaaactcctctatctatccacactgacatgcattagcacccgcatagatacgcacatatttacatacgttatttattaggaacctagttaatgggccagcaatatatgtcatcgcgcagcttgcaagatggaacagaagtgaatatataagggtaacaaacacaccactcaataaaaccgtaacaataaatattaacaagaaaccaatcaacgctctataaactgcatttatgtgtcg

SEQ ID NO: 24756 - protein, 329 aa, DROSOPHILA
MSLKRLWTARLSIINKLYIFSPTIADEAAKPRVLRFTWSMKTTSPLMPDQIMQKIREVLDQNNCDYEQRERFVLWCVHGDPNTDSLVQWEIEVCKLPRLSLNGVRFKRISGTSIGFKNIASRIAFDLKLPSNDSTSRLSELSLLCRSLTSQQGSQRRKKSRLSTGGSEDQKKSNSLLSAFQMYSPFSSKENMQSSEEVEDLHVIDTQPGHSVDVPLFADFSPINPIMEEDAEGVEGGKTSEAKVISGGSGQKVKGDGGGGGGGNRLKRNIKHTGSLIVRKLTAGRHNDADKKGAIRKKDKEQQEVADTDKERPTSKPEGKVAMLRTTTL

SEQ ID NO: 24757 - DNA, 2396 bp, DROSOPHILA
gatgccagtgagctcactgttccggaggactgtcatcagcccaaggaaaccggtcgctgtttcgctctgttctatcgctacgcctacaacgtggatacacaatcctgcgaggagttcgtttacggtggatgtgccggcaacaagaacaacttcgaatccaaggagcagtgcgaacaggcatgtttggtaaagtctgcggtttcctccacggactcaacaaccgaacaaaacagcgaagtggccacagaaactagcacctcgtcttaaaaaattgtagttcttagtttgtaatttatttgtcatccaacttcatcagccttttaaaagcatttctttactgagttgattatttgaataatttgattataaattttaataaatataccattgtgatttatatatctatttcgttttattcgcacatctggtactagcagtacagtatgtagatacatttgtaagtgtcagaagtggttagcagtacatctcggaaagtcattaatttcgaaacccgacggactcacaaaaacttgagtcatgaatagacgattttaattaatcttgggaactaaacagtgtaaacagtaattttgataaaatatgactacttttataatgcacttatatcgcaaagattctgaaaacgaaatgtataaatatattatacaagcaaaagaggaaataaatgaaatttgggaaaaaatcggacaaacccacttccgaatgacaaatcgctgcctaatcgtgtttactttattcagaacgtagttcctagatttatttgctattccggcattattttcagtacaaacactagcactagcacatagtactcgaagtctcgtctgtttatataccaaattcacgagcactcgttaatgaaccgaaagttcatgagcatatagataagatccccagccaatatgtagttcccatctgccgatcggcatggcgtatataacctagtgctacacctccgatttccattagtcgttccacggaagctgggagatatacatagttttcaaaatcgcaatcagtatgaaattcattgctgccgtctgtttgatgttcgccctggtggctgtggccctcggcctcaaggatcgtaagttgggagctgctcaggaaatcgaaaccattctaattcacattctcaatctattagctatctgtggactgcccgctggtattgatggcaatggtctcatcaagtgtgccgcttttatacccagcttcagttatcatcccgaaaccaattcgtgtgaaaagttcatctacggcggatgcggcggcaatgagaaccgatttggaacccaggagctctgcgaacaaaagtgcaaggaataaatttgacctctatgctctacaaaatattcaataaatgattttcgataaataactttttggacgattctttataacttacctcattttacatcacataaagaaaaaaacaaggttcgttttgatcgcactatcgggcaaagtttaagttgctgaattaattaagagactagaaaaaagtacacccagaaaaattgagaattaaccttcgatttcgagacgaaaacgatctgaatgttgatattttcagacggaagggaaaggttgaaaaactgagagaggaaggcaaatgagagcaaagtcatttgcaatctgagtatggtgagcattattcaatcttagctagattttggggtcgaaattgtcaaatcgagatggttgaaaacggatttttctctgagtgtcttttttttattatattatagtaaaaagaggggttccaacgaacaactgaaacatttaagtggaatttttaaacacttacgaaatggacctatcaaatgaaatgaaatattttacggagctttcgccatggccgttgtaagtatgacacttcccgttgttcctatcgataagagaacatatccataattacaacacttgttgagctcattgtatatttcatatgatacaacaattataatgtgatgggctttccctttcaggcggccagtaaacaaagtcgtttctgggaagccgacgaatgtaaacacaatgcggcaaaaatatttacatagatcggtgcgaatttttgtggagatttcccagtcatatgtgagcttaatttgtttgtcgtacaatcacagtgtttaatgggatcgctgattagcggagagtcaatgcaatgtcgtggctataaattaagctactttagccgttcagcagttcagtttgctctcatcgcaatcagctaaaggttttgaatatctctgaactatgaaactgttgattttggttttcgtgtttgtcgcttttgtggccaacgccttggccctgaaaaatggttggttcctaactgttcataactcaaattggtttgtaatctgaaa

SEQ ID NO: 24758 - DNA, 336 bp, DROSOPHILA
gaagctgggagatatacatagttttcaaaatcgcaatcagtatgaaattcattgctgccgtctgtttgatgttcgccctggtggctgtggccctcggcctcaaggatcctatctgtggactgcccgctggtattgatggcaatggtctcatcaagtgtgccgcttttatacccagcttcagttatcatcccgaaaccaattcgtgtgaaaagttcatctacggcggatgcggcggcaatgagaaccgatttggaacccaggagctctgcgaacaaaagtgcaaggaataaatttgacctctatgctctacaaaatattcaataaatgattttcgat

SEQ ID NO: 24759 - protein, 82 aa, DROSOPHILA
MKFIAAVCLMFALVAVALGLKDPICGLPAGIDGNGLIKCAAFIPSFSYHPETNSCEKFIYGGCGGNENRFGTQELCEQKCKE

SEQ ID NO: 24760 - DNA, 3115 bp, DROSOPHILA
agctggccaagtggactgtgcaggccgtcctggccgggtccgatcagctaaagctcggctatgtgtcgcgtatcaatccgagagatcactcgcgtcacgtcatcctcggcacgcagcagttcaagccgcatgaatttgccactcagatcaacctgagcatggacaacgcctggggaatcctgagatgcatcatcgatctggtgatgaagcagaaggatggcaaatacctgatcatgaaggaccccaacaagccgatcatccgtctgtacgacatcccagacaatactttcgactccgatgactcggacgatggcgagggcgatgacgaaggtttccagcaggtctacaactacgcgcacaacaagatttagacgccacgcccccctactcctgcatcccttccagtcttgggctcttttgccacaacccgctaagaataaccacaactgatgtcctctaaaggaaaaggtcatgttataggccctagcttaagcatttgtattcgatttaaattcagatatttcctagtaaatcacagagggcgaaacaatacatgaatttttattggtccaggtctaatgccgggtacttgtgataaaaactttcgactgaaacaccgaggtcttgtacgtaaatgactgactcatttcccggactcatatatagtaagctgattgtgcgtgtcgggcatctagttaagatttagacattgtttaaactctgacggttaaagatggtcttcctacaaagagtgtacatatccttcctggtcctgcatactcaattgctgatgtacctggctgagtctggtaatatatgttgcaagtactccacattgtatacgttataacattcaagaaaatgattcatttggatatgggtatttccttgaattttaaaatataaatagctttgtttcgtccaatcattatctaaacatccaattaaaatgactcacataatataatatttattaatatccaattctttactgtatcagaatatccgccttgtaatctggatgagaaatgcattagtctagcccgctgcacatcactcttgccctttctgaagccccacaacatgacgccagccgagaaggcggtattcgaggacagatattgcggctatggccccaaggggcaggaattattggacagagttctcatctgctgcccaaatatgggacacattttgccaaatacccagatatgtggaccaatcatgccggcttatcgaattttcggaggagaggagacgcaacccaacgagttgccttggatggccctgattctatatgcgcatcgcagccgttcggtgtggaatgaaagactcgtgtccaggtgcgctggatccctgatcacaaaccgctatgtgctgaccgcagcccattgtctgaggataacgggattggatctcaggagggtgcgccttggcgagcataacattttaagcaatcccgactgcgtcacccatattaatggtagggaacactgcgctccagagcatctggaaattgacgtcgatctgagtatcaagcataggcactacatggtcttcgaggaaaggccctacaacgacatcgccctgctgcgattgaagtttccagtacggttagttgcacttgacctgtcatatcttttactacatatatatatatatatatacatttcatatgtctttagctataccgctcaaatcaaacccatctgtgttcaacttgactatatcttctcgaatccgtccttcagcaaccataagttgcaaatagctggctggggactctctcataagcagggctatagcaatgtgctgctacaggcctatgtcaatggcaggaacgcggacgagtgctcattgagtgaaccatccttgggattggacaaggagacccacatatgcgccggcaacctgggaggcaatgacacatgcaagggcgattccggcggtccgctgatggccatcatggaacgtggtgacgaggaattcgtatatctagccggaatcacatcctacgggtacagtcagtgcggatacggaccagcagcttacacaaagacatccaaattcgttgaatggattctatggaacatgtacactaatatattccaatgaaataatcaaaatagtagaatttggttaagaaaagaaatatttattgtccggcactgagcccaaattatcgcaaaaataaattaggaaatttcattgagtcattgggatttatgagtttgttgatccattttattctgtatatttagtgtcagatcgagtttggatgtctagcatgtcggacagacgtaaagtttatattttggtccttctccaggccattttcttcaaccaattggctgagtgtggtaagcaaaagcaatgatttttaagttttcgtaaaaaaccgaagatgttatatcttgctcaataatatccttgcagaggatgtgtgctgtgaataggtcacgttcgaccccatgaattataaaaattatcatatccatcgatccgttttattataaatcatattcaaaaataataataataataatatttccacatagactcgtactgctatactttatcggggctttcacttatctatttttgtaatttatagttcggttatcaagctgccaaaaggatgagaaatgcaccagactggttagctgctcgccgcttatgaacatccttaggccccggggcatgacccaggcggagaaagatgtgtttgcacacaggcagtgtggcctggaccccaatggacacgagttgttgcacatggtttatgtctgctgcccagagttgggtgacgtcttgcccaacaaacagacctgtggacaaacgacgcccgtgttccgagatcggggtgccgagaatgcagagcttaatgagtacccttggatggtattgctgttatatgagaatcggctatccttgatgtggaatcaacgaactggttgtgcgggctcactgatcaacagtcgctgttcacacatgaacacgaatatatttaaagacttacaattttgggctccgttcatatcttatgtaaatgaatcgagagcgataaattatatttaggattttgttatctaaggcgacatgggtgcattgctca

SEQ ID NO: 24761 - DNA, 977 bp, DROSOPHILA
aatatccgccttgtaatctggatgagaaatgcattagtctagcccgctgcacatcactcttgccctttctgaagccccacaacatgacgccagccgagaaggcggtattcgaggacagatattgcggctatggccccaaggggcaggaattattggacagagttctcatctgctgcccaaatatgggacacattttgccaaatacccagatatgtggaccaatcatgccggcttatcgaattttcggaggagaggagacgcaacccaacgagttgccttggatggccctgattctatatgcgcatcgcagccgttcggtgtggaatgaaagactcgtgtccaggtgcgctggatccctgatcacaaaccgctatgtgctgaccgcagcccattgtctgaggataacgggattggatctcaggagggtgcgccttggcgagcataacattttaagcaatcccgactgcgtcacccatattaatggtagggaacactgcgctccagagcatctggaaattgacgtcgatctgagtatcaagcataggcactacatggtcttcgaggaaaggccctacaacgacatcgccctgctgcgattgaagtttccagtacgcaaccataagttgcaaatagctggctggggactctctcataagcagggctatagcaatgtgctgctacaggcctatgtcaatggcaggaacgcggacgagtgctcattgagtgaaccatccttgggattggacaaggagacccacatatgcgccggcaacctgggaggcaatgacacatgcaagggcgattccggcggtccgctgatggccatcatggaacgtggtgacgaggaattcgtatatctagccggaatcacatcctacgggtacagtcagtgcggatacggaccagcagcttacacaaagacatccaaattcgttgaatggattctatggaacatgtacactaatatattccaatga

SEQ ID NO: 24762 - protein, 297 aa, DROSOPHILA
MTPAEKAVFEDRYCGYGPKGQELLDRVLICCPNMGHILPNTQICGPIMPAYRIFGGEETQPNELPWMALILYAHRSRSVWNERLVSRCAGSLITNRYVLTAAHCLRITGLDLRRVRLGEHNILSNPDCVTHINGREHCAPEHLEIDVDLSIKHRHYMVFEERPYNDIALLRLKFPVRNHKLQIAGWGLSHKQGYSNVLLQAYVNGRNADECSLSEPSLGLDKETHICAGNLGGNDTCKGDSGGPLMAIMERGDEEFVYLAGITSYGYSQCGYGPAAYTKTSKFVEWILWNMYTNIFQ

SEQ ID NO: 24763 - DNA, 6643 bp, DROSOPHILA
atttgctattctgttgcctttatcagcgaaattctctaaaagggttctctttatttttccattttcatgttcatgcttttgctttgccattttcgcgttaataagttttgtgattcttgtgtttgtttggtttttttgttttttttttttgtatctagaacataagtgttagattgcacatgttagggatgatgatttcataaataatcagcgtaataactagtaaaaacaaaaagaaacacatttcggaatggatacaaaatcggttgtttgccttttagcgctgcgctttgttttcgtttgatttttggcgaggtcataggtgaaggtgaagggtccaaggattgtcctggcatttttggaggatagtcggatgtgggtttccagggatgggaatcgggttgtggggggatcactaagtgtaatacatctagataaaaacgctatatacagacacacgagttaataataataataataatataacgcagcttgagataataataataataatagattttggttaacaataatacaataattaggtttttttttgcttttgccttccgctttcgcgctctacattattttttgtttacttgtcgtgttttttttttgttttttcctctttgttttcttttcatattttttgtgtttttcttttttgttaacaaactaccaataacaaatttttactaattcaatttaagtttttttttatgtttactgctctctgcttgtgtttaccaccttgtttgttgtttataaattattgttgtttgcgttccggttaccttgttgttgctgttcctgtgtattaaactaaaggaaaatcatggtttatcctttaccaattcctggcggtaaaacggcctatacgatgcctctaaatatatagttattattacacgcaagtgttacatatgcctatatgtttatgtttatgcgctaaagtgtcttgcgcttcggttagctgaaccgtgaacccaccggacgactcctagccgtagtcaccgccgaagcgtccgtgcttattgctaccgttactgctctggaccgctgcagccgccgccgccgcttgggcagccttctccgccagcagcgccgccttctgttgcatgtagggattgaagtgttgcatgtacatggaggcagcggctgccgccgcatagttgttggcataattgttgctcctttggttgctgctgccgttgttggcgctccattgatgctgctgctgctgctgctggagctgcttctgttgctgttgctgctgttggtgttgctgttgttggtgttgctgctgctgctgatgttgctgctgttgatgttgctgctgctgttgttgttgatgctgctgctgctgctgctgttggtggtgatgttgctggtgctgttgccagtagctctgctccgccatataattgccggcatcgctatccttttgataaagatatgaattcagcagggattcgcgtgcggcggcagcggccgccatctgattgttctggaacatattctccatggccgctgccgttggataacaaaatttattgctactattgttgctgtggttttgattgttggctgctggaagttgtggttgctgttgctgctgttgcttggccgaggcgtgatagttgctgtagtcctgctgctgatgctgctcctcatagctggccgtccttgttcccgatccaggtgctggctccttttgagcccggcttgactgtcattcacctgatgccgtcaccgtggtccactgccatggactattgtagccttgtttgggattgctgaaagggaacggatgtggattaatttgaacagatgggaaagatgattaggttaggaacatcactcaccttccgaagagaggatgccacagtgccgagttggcatccatgccggctgctgccgccgcatctgcaagattttgctggtgctgttgctgctgcacgtcctgggcgagcatattgccccgcttgcgctgctgctgtgcggcggcggctgggtgcatttgctgcttggcctgctcgaggggattataggtgacgcaggctttactggagcgtagtgtgcgtcccgtacctgcgtcacccttggcctgatctggaacggccttgtgcatggagggacgccctcgcattccgtcaaagggcacattgagaagtggaaccacgttagcctccggttccagcagattcgagagggatttaatggtcagtctgggtttgtgctccgcaggagctggtgccggaggcgcagcggtggccaccggcacaggcgcagcggcggctggtggtggagcagctgttgtagttggagcaccggatgaaggcttggatttggtgaaattgctaatggactccgtttctgtatcccttctgggtcgcttgtgctcctgatgatgatgatgatttgaggtggcagctgccgatgatgtggatgatgcctccttggccgcctcccagttgaggaactgtggcaattgcggctgcagcagcttttgcatgagagccagctctacgggattggtgaagccattaaaggaatttggtccgctggctgtactttgaggaagaggtggaggcggagctgctgcaggaggcggcacgggagtggtaaccttgggctgtggctgctcttccgtcgacttttgtttcatacaatgcttgtacagctcgtccagatgctgcaatccaaattggttgttgtacagcggcaggagattgctcataaactttctttgtagtcccagcggatctttgatcgttttgaagaactcctgcgacaactggccaaaatatggtagccacagcatctgttggagtagcgccagtgtggttgcattcagatccgtggagagactggaatctgccggagatggtggtgttggtgccactggggcaactgcaggcggtttgggttgaacaggcacaggtttgggttgtatctgcttgggactgggacttctcgctttgcttggcaccacgatcactggatccgggtcttttgtcaccttggccgcatgctccgattccgttttgaggatggcctccaactgctccatggtcactaccagaatgttcggattctggatgatctccggataggcaaaggcctcgggaagacgcaactccggcctggttgtcagcagcaatggaatctctcgggccggtgaggctaaaactgctccgaggcgatcctttggcacgagtatggggtctgggaccttccactgcggattgctgatcagcattttcagttgggtaagtggatccggatccttgtccatcttaatgctggccttgggtcgcttcttcagcggctggctggaatcctcctcctcctcgtcgtcgataacgaccgtttcgagtttgccatcgcggccagctttgcccagatccatgggctctgcctgttggggattgttgttaagcttgaggaactgctccaggatgagatttttaatggtttccgacgtcgtctccacctcagcaggtatggagttggccggcagctggagttcccgctccggtgacttgagtatatccgaacttgaggtcaccgcacattgactacgcgattctgatggtgggcagacctcctcgcgtttcttgtagctcaaatccttgggcgtctcctcgactacgacggatttttccatttccttttcaggcgttggtgtcggcgtaggcgtttgggtcatttccacagtggctggagtgggcggttgtggttccggctcggtggccacagcttcatgctgcttctcgaacgcctcgatgcccaggaagagctctccgttcaggccctcgatctcacccgcctcattgaaggacagacacttgggcgcatcgtcgttgtccatgttgagtatgcggggcaggtccttgtcgagatcgggtacacaaaacgagctcagtccgtcgccggaggctgaggagttcggcggattggttccgttgccagggcgcgtctcctggacgagattgtcctcgcaacttcgcttgaccagcgagtcgagcaaatccgctccactgctgccgttttcactgctacaattctgtagcagatcatcggcatcgtccagcagatccttcagattcttagtattcgcatcgaaacactccacggcatcgtttccacccagtggcttgtcctccgcctcctcgggcaggacatcctcctcaggcagctgaaccagggcaagatctcctttcggcagaaacagacccgtcttgggacacagctgcatttgcagcggcgagggtgtggagctctgatatgtgggcgtattggtcttggtggccttggtggaggcattcgtctcctcgctgtcaagcagcccatcgaagcagggcgtgggcgccatctccggctctttggcaggtggcatcaccacaacatcttcgagtacagtggctaagtggccgttctgctgctgcgcagcatcactttcctgtccctcttcctcctcctcctgctcttcgatctcgtccggcaattgcgtggcactatcatcccaatcctgcaacaaagtttgcccgatggagggcatctgctgctccgactgctcctgctctcgctcatgatcctccgcctgttgcaactcctgctcctggtgctgttgctcctcctcctccaaacgctgcagatgctgctcgcgcttgaccttcatcagtggggcggcggagccatggaagaatttgactatcctagttgaggaagcatctgtgcgcggcatagatcgccagccattggtcgtcttggtcagacgaatcctattccgcttgtcgtagtcctcgcagcgcacctccacgatgcgggtatcgtcctgtttgacccacaggaagatcggattgacgctgggcgtcgtgggcgaagtggcgggtgcggcagcgggcttgggtattggtagagaagcaggagtgaccgctgacaccacctccttttccttctcctgaacagatggagccttgggcttgggactaattcgcttgggtgccgccacattggatgcagtggctgtggatgtgacgtgcgttttggtttccaattttacggccgccgttcgcggcaaggatttggctaacgtcggctcctccggcaacggaggattgagcgcggctatttgcggaggaattgggggattcagtgcgggaatgggtgtgatagctggggcagcagccggcacaacggcttccgagctgcactttggttccgttttaatgtcgcgcagcacattcttattgatgcgcggcgtattggccaccttcaggtgtccgaacttttgctttgcccttgtggccttgccccgtgctcccttccctcgtcgccgggtggtctgctcctcgaagaccaggaatatatcacgggccactctccggcgctccgattttcggtggcaaaccggcggagcggcctccagttcctgcttgatgatgccctcgttattgttgttgttgttgctgtgattattgttgttattcgcactcgcctccggctcatcctggctagcagcagcgcattcacttggcctgcaagtgttccggggcattttacggccgtatccgctagtggtccgtgatccgtactctcagatccctggtcattttcccatcatcgctggctagtccacactcgtcgctcgtttttttttcttttttggccttttgctactgccccccgtatccggatttttcgctctcgcctcccccgccccctgcccagttctgattgggagcagcgttctgattggacagcggcccaggtaaaagccttcgctttggggcttctatcttcagtccgttcgcattgccgccgcacttgtgccgctccagcgtttctaattcagttgaccgtgctatttaaccgcattcagaattaactgccctgctacactgtgtgttttacgttgacaaaatcaatgaatttttgtatgtatatgttttggtttgctttcgatatttcgatatagttttctaaacaatcgccagcgcttaatgacggtaatcgtatgagcgtaatcgaaaattggggctgcagtcggaaatttccccaaataccgatagtaataacggtcatatttttaaaatttttcgaaatacgcagttttgtaaattttaatttaaatttaaagaatgctgaatatgttaatatgacttaaatttaaaattactaaaatgtagtttaaacgaatatatagaagaacaattaaaaaaaaacttaaaaaagaaatatgtgttttttaattacaaaaacaaatatcttattactttcccgcccgacttgccaatctgggctgtacaacactgatatttgtttaacggtaaattgttaagcttgtagtcgtagaagaaaattcaaacaacaaaaaataaccaagtttgttaattttttaaaaagtaaaaaaaaatttaagttacaagaccttaaattgattttataatatatatagtttgttgttttattctttattatatcccaaattccacttataatgttgcatttctttaaaatgaaatatgtctcgaataagtaatatttaggaaaaataatcaatttattaaatgtgcaggtaatcttaaattcctggacagcttgaaaaatcaattggggtcaccagttgcattgtttt

SEQ ID NO: 24764 - DNA, 4454 bp, DROSOPHILA
tggactagccagcgatgatgggaaaatgaccagggatctgagagtacggatcacggaccactagcggatacggccgtaaaatgccccggaacacttgcaggccaagtgaatgcgctgctgctagccaggatgagccggaggcgagtgcgaataacaacaataatcacagcaacaacaacaacaataacgagggcatcatcaagcaggaactggaggccgctccgccggtttgccaccgaaaatcggagcgccggagagtggcccgtgatatattcctggtcttcgaggagcagaccacccggcgacgagggaagggagcacggggcaaggccacaagggcaaagcaaaagttcggacacctgaaggtggccaatacgccgcgcatcaataagaatgtgctgcgcgacattaaaacggaaccaaagtgcagctcggaagccgttgtgccggctgctgccccagctatcacacccattcccgcactgaatcccccaattcctccgcaaatagccgcgctcaatcctccgttgccggaggagccgacgttagccaaatccttgccgcgaacggcggccgtaaaattggaaaccaaaacgcacgtcacatccacagccactgcatccaatgtggcggcacccaagcgaattagtcccaagcccaaggctccatctgttcaggagaaggaaaaggaggtggtgtcagcggtcactcctgcttctctaccaatacccaagcccgctgccgcacccgccacttcgcccacgacgcccagcgtcaatccgatcttcctgtgggtcaaacaggacgatacccgcatcgtggaggtgcgctgcgaggactacgacaagcggaataggattcgtctgaccaagacgaccaatggctggcgatctatgccgcgcacagatgcttcctcaactaggatagtcaaattcttccatggctccgccgccccactgatgaaggtcaagcgcgagcagcatctgcagcgtttggaggaggaggagcaacagcaccaggagcaggagttgcaacaggcggaggatcatgagcgagagcaggagcagtcggagcagcagatgccctccatcgggcaaactttgttgcaggattgggatgatagtgccacgcaattgccggacgagatcgaagagcaggaggaggaggaagagggacaggaaagtgatgctgcgcagcagcagaacggccacttagccactgtactcgaagatgttgtggtgatgccacctgccaaagagccggagatggcgcccacgccctgcttcgatgggctgcttgacagcgaggagacgaatgcctccaccaaggccaccaagaccaatacgcccacatatcagagctccacaccctcgccgctgcaaatgcagctgtgtcccaagacgggtctgtttctgccgaaaggagatcttgccctggttcagctgcctgaggaggatgtcctgcccgaggaggcggaggacaagccactgggtggaaacgatgccgtggagtgtttcgatgcgaatactaagaatctgaaggatctgctggacgatgccgatgatctgctacagaattgtagcagtgaaaacggcagcagtggagcggatttgctcgactcgctggtcaagcgaagttgcgaggacaatctcgtccaggagacgcgccctggcaacggaaccaatccgccgaactcctcagcctccggcgacggactgagctcgttttgtgtacccgatctcgacaaggacctgccccgcatactcaacatggacaacgacgatgcgcccaagtgtctgtccttcaatgaggcgggtgagatcgagggcctgaacggagagctcttcctgggcatcgaggcgttcgagaagcagcatgaagctgtggccaccgagccggaaccacaaccgcccactccagccactgtggaaatgacccaaacgcctacgccgacaccaacgcctgaaaaggaaatggaaaaatccgtcgtagtcgaggagacgcccaaggatttgagctacaagaaacgcgaggaggtctgcccaccatcagaatcgcgtagtcaatgtgcggtgacctcaagttcggatatactcaagtcaccggagcgggaactccagctgccggccaactccatacctgctgaggtggagacgacgtcggaaaccattaaaaatctcatcctggagcagttcctcaagcttaacaacaatccccaacaggcagagcccatggatctgggcaaagctggccgcgatggcaaactcgaaacggtcgttatcgacgacgaggaggaggaggattccagccagccgctgaagaagcgacccaaggccagcattaagatggacaaggatccggatccacttacccaactgaaaatgctgatcagcaatccgcagtggaaggtcccagaccccatactcgtgccaaaggatcgcctcggagcagttttagcctcaccggcccgagagattccattgctgctgacaaccaggccggagttgcgtcttcccgaggcctttgcctatccggagatcatccagaatccgaacattctggtagtgaccatggagcagttggaggccatcctcaaaacggaatcggagcatgcggccaaggtgacaaaagacccggatccagtgatcgtggtgccaagcaaagcgagaagtcccagtcccaagcagatacaacccaaacctgtgcctgttcaacccaaaccgcctgcagttgccccagtggcaccaacaccaccatctccggcagattccagtctctccacggatctgaatgcaaccacactggcgctactccaacagatgctgtggctaccatattttggccagttgtcgcaggagttcttcaaaacgatcaaagatccgctgggactacaaagaaagtttatgagcaatctcctgccgctgtacaacaaccaatttggattgcagcatctggacgagctgtacaagcattgtatgaaacaaaagtcgacggaagagcagccacagcccaaggttaccactcccgtgccgcctcctgcagcagctccgcctccacctcttcctcaaagtacagccagcggaccaaattcctttaatggcttcaccaatcccgtagagctggctctcatgcaaaagctgctgcagccgcaattgccacagttcctcaactgggaggcggccaaggaggcatcatccacatcatcggcagctgccacctcaaatcatcatcatcatcaggagcacaagcgacccagaagggatacagaaacggagtccattagcaatttcaccaaatccaagccttcatccggtgctccaactacaacagctgctccaccaccagccgccgctgcgcctgtgccggtggccaccgctgcgcctccggcaccagctcctgcggagcacaaacccagactgaccattaaatccctctcgaatctgctggaaccggaggctaacgtggttccacttctcaatgtgccctttgacggaatgcgagggcgtccctccatgcacaaggccgttccagatcaggccaagggtgacgcaggtacgggacgcacactacgctccagtaaagcctgcgtcacctataatcccctcgagcaggccaagcagcaaatgcacccagccgccgccgcacagcagcagcgcaagcggggcaatatgctcgcccaggacgtgcagcagcaacagcaccagcaaaatcttgcagatgcggcggcagcagccggcatggatgccaactcggcactgtggcatcctctcttcggaagctatgaggagcagcatcagcagcaggactacagcaactatcacgcctcggccaagcaacagcagcaacagcaaccacaacttccagcagccaacaatcaaaaccacagcaacaatagtagcaataaattttgttatccaacggcagcggccatggagaatatgttccagaacaatcagatggcggccgctgccgccgcacgcgaatccctgctgaattcatatctttatcaaaaggatagcgatgccggcaattatatggcggagcagagctactggcaacagcaccagcaacatcaccaccaacagcagcagcagcagcagcatcaacaacaacagcagcagcaacatcaacagcagcaacatcagcagcagcagcaacaccaacaacagcaacaccaacagcagcaacagcaacagaagcagctccagcagcagcagcagcagcatcaatggagcgccaacaacggcagcagcaaccaaaggagcaacaattatgccaacaactatgcggcggcagccgctgcctccatgtacatgcaacacttcaatccctacatgcaacagaaggcggcgctgctggcggagaaggctgcccaagcggcggcggcggctgcagcggtccagagcagtaacggtagcaataagcacggacgcttcggcggtgactacggctag

SEQ ID NO: 24765 - protein, 1457 aa, DROSOPHILA
MPRNTCRPSECAAASQDEPEASANNNNNHSNNNNNNEGIIKQELEAAPPVCHRKSERRRVARDIFLVFEEQTTRRRGKGARGKATRAKQKFGHLKVANTPRINKNVLRDIKTEPKCSSEAVVPAAAPAITPIPALNPPIPPQIAALNPPLPEEPTLAKSLPRTAAVKLETKTHVTSTATASNVAAPKRISPKPKAPSVQEKEKEVVSAVTPASLPIPKPAAAPATSPTTPSVNPIFLWVKQDDTRIVEVRCEDYDKRNRIRLTKTTNGWRSMPRTDASSTRIVKFFHGSAAPLMKVKREQHLQRLEEEEQQHQEQELQQAEDHEREQEQSEQQMPSIGQTLLQDWDDSATQLPDEIEEQEEEEEGQESDAAQQQNGHLATVLEDVVVMPPAKEPEMAPTPCFDGLLDSEETNASTKATKTNTPTYQSSTPSPLQMQLCPKTGLFLPKGDLALVQLPEEDVLPEEAEDKPLGGNDAVECFDANTKNLKDLLDDADDLLQNCSSENGSSGADLLDSLVKRSCEDNLVQETRPGNGTNPPNSSASGDGLSSFCVPDLDKDLPRILNMDNDDAPKCLSFNEAGEIEGLNGELFLGIEAFEKQHEAVATEPEPQPPTPATVEMTQTPTPTPTPEKEMEKSVVVEETPKDLSYKKREEVCPPSESRSQCAVTSSSDILKSPERELQLPANSIPAEVETTSETIKNLILEQFLKLNNNPQQAEPMDLGKAGRDGKLETVVIDDEEEEDSSQPLKKRPKASIKMDKDPDPLTQLKMLISNPQWKVPDPILVPKDRLGAVLASPAREIPLLLTTRPELRLPEAFAYPEIIQNPNILVVTMEQLEAILKTESEHAAKVTKDPDPVIVVPSKARSPSPKQIQPKPVPVQPKPPAVAPVAPTPPSPADSSLSTDLNATTLALLQQMLWLPYFGQLSQEFFKTIKDPLGLQRKFMSNLLPLYNNQFGLQHLDELYKHCMKQKSTEEQPQPKVTTPVPPPAAAPPPPLPQSTASGPNSFNGFTNPVELALMQKLLQPQLPQFLNWEAAKEASSTSSAAATSNHHHHQEHKRPRRDTETESISNFTKSKPSSGAPTTTAAPPPAAAAPVPVATAAPPAPAPAEHKPRLTIKSLSNLLEPEANVVPLLNVPFDGMRGRPSMHKAVPDQAKGDAGTGRTLRSSKACVTYNPLEQAKQQMHPAAAAQQQRKRGNMLAQDVQQQQHQQNLADAAAAAGMDANSALWHPLFGSYEEQHQQQDYSNYHASAKQQQQQQPQLPAANNQNHSNNSSNKFCYPTAAAMENMFQNNQMAAAAAARESLLNSYLYQKDSDAGNYMAEQSYWQQHQQHHHQQQQQQQHQQQQQQQHQQQQHQQQQQHQQQQHQQQQQQQKQLQQQQQQHQWSANNGSSNQRSNNYANNYAAAAAASMYMQHFNPYMQQKAALLAEKAAQAAAAAAAVQSSNGSNKHGRFGGDYG

SEQ ID NO: 24766 - DNA, 2353 bp, DROSOPHILA
atcccgaaaccaattcgtgtgaaaagttcatctacggcggatgcggcggcaatgagaaccgatttggaacccaggagctctgcgaacaaaagtgcaaggaataaatttgacctctatgctctacaaaatattcaataaatgattttcgataaataactttttggacgattctttataacttacctcattttacatcacataaagaaaaaaacaaggttcgttttgatcgcactatcgggcaaagtttaagttgctgaattaattaagagactagaaaaaagtacacccagaaaaattgagaattaaccttcgatttcgagacgaaaacgatctgaatgttgatattttcagacggaagggaaaggttgaaaaactgagagaggaaggcaaatgagagcaaagtcatttgcaatctgagtatggtgagcattattcaatcttagctagattttggggtcgaaattgtcaaatcgagatggttgaaaacggatttttctctgagtgtcttttttttattatattatagtaaaaagaggggttccaacgaacaactgaaacatttaagtggaatttttaaacacttacgaaatggacctatcaaatgaaatgaaatattttacggagctttcgccatggccgttgtaagtatgacacttcccgttgttcctatcgataagagaacatatccataattacaacacttgttgagctcattgtatatttcatatgatacaacaattataatgtgatgggctttccctttcaggcggccagtaaacaaagtcgtttctgggaagccgacgaatgtaaacacaatgcggcaaaaatatttacatagatcggtgcgaatttttgtggagatttcccagtcatatgtgagcttaatttgtttgtcgtacaatcacagtgtttaatgggatcgctgattagcggagagtcaatgcaatgtcgtggctataaattaagctactttagccgttcagcagttcagtttgctctcatcgcaatcagctaaaggttttgaatatctctgaactatgaaactgttgattttggttttcgtgtttgtcgcttttgtggccaacgccttggccctgaaaaatggttggttcctaactgttcataactcaaattggtttgtaatctgaaatttttccagcaatctgtggtctaccccattccctaaacggagatggcagaatatcctgtgaggcctatatacccagttggtcctacgacgccgatcgaaacgagtgcgtcaaatttatctacggaggctgcggaggcaataacaatagatttaattcgagggaaatctgtgaagacaagtgtttgcaataaaattacgtgaatcaaaaattgaaagcttttgtatttcagtttggcatggtcatgtacttgatttggcgcagctacttttttgattagctagcacaatctgatctgagactcacagacttggtacatacattgtataagattcaaaattttgaaagtccgcacaaacatttccattttgcattcccgagaggcattacttgatctacggactcgtaaagacgttgttttcgaaactcaagttcaaatgaggctagtggttcttggctgtttgctgctggcactggaaacagttggcttgtgtctcaaagatcgtgagtttaggtaataaaatgtaatacaatttttgtgtaatatgatcattttcattagctatctgtggacaaccgcctgcagtaaatggcaatgatttcattaagtgcgctggaagttttgaaaagttcagttactatccacacataaatgtttgccagaaatttgaatacggcggctgttttggaaatgataatagtttcaataccctagagaaatgccataaaaagtgcaaactcgattggaatacattatatttcttaaattgtgcttacatataagtaaagatgtaagccaggcaggaataattattaaaaaaccttgaatacataaatctttacttgcttgtttcaaaatattcaatgttcttaggcccttgcaaacaattcctgggctctaaaaaagtggtaagctcatattttttcatatgacagcttaactccccatctaaacaatttgatgtttgcagaaatttgtggattaccaaaagtcgatagtggcaagtgcttggcatatttcaagctctggacctatgattccaaaaagaacaaatgcgttatctttatctacggaggatgtcaaggcaatgaaaattcatttaaatccaaagaagagtgtataactaagtccgtggagtaatatcttttctaaaatatctttagaataaagattgtatgattccaatctgtattgggtgttttct

SEQ ID NO: 24767 - DNA, 298 bp, DROSOPHILA
atcgcaatcagctaaaggttttgaatatctctgaactatgaaactgttgattttggttttcgtgtttgtcgcttttgtggccaacgccttggccctgaaaaatgcaatctgtggtctaccccattccctaaacggagatggcagaatatcctgtgaggcctatatacccagttggtcctacgacgccgatcgaaacgagtgcgtcaaatttatctacggaggctgcggaggcaataacaatagatttaattcgagggaaatctgtgaagacaagtgtttgcaataaaattacgtgaat

SEQ ID NO: 24768 - protein, 82 aa, DROSOPHILA
MKLLILVFVFVAFVANALALKNAICGLPHSLNGDGRISCEAYIPSWSYDADRNECVKFIYGGCGGNNNRFNSREICEDKCLQ

SEQ ID NO: 24769 - DNA, 10809 bp, DROSOPHILA
tgtggcgccgaatgtgcttggcccaaatgcatgcttgttgcgccacttggaaccacccctctctctcacccctttctcaatccatctttcaccccaccctcaggaaaagggcgaaaagggggtcgttctagccgaccagggatggctgatggcggcacagcacgctactatgtgcgactagggcttatcgaactatattcagaaatatattatgctaacatatagggaagccagttaaaataagtaataccaaagctaagtaaagttacacctaatatatcaaaataaattctttaattatttatattaaatcaatcaaaaattcaatgattaattgtactaaattacatatcctaatatgtcagaaaaatgtacgaaacatttaatcaaatcaaccgcatacgggaaaatgaaaacataccaaatatttatgtctcgaagattacacaaatgatttaaaacttcatttagaatcaatttattcaccccaatatttgactatttgtttattgatatattcaacattgaatagagattccagtatatcaacatcaatatacatacatacggtttaatgtatgcaataaatacatgtatatatgtcacgctatctaaaataaatgttcatgtacgcgtcatttgagagcctgagttttttaacacgaatgagagattacttttaacatttcgtaatatgcaattaattataaaagtatatgagttgtgctcgtttacagattggcactcacttgggctgcataaatataagtttgagccacttaataaatcattttcaattaacagatcataaaattggattacctaaataacaattactgggctcttacaataaaataaagcatgagtaaagcttgtaaccaagtatcaaacaaatttctaagggttactaaataataataaaagtgtcatagctaaggcctaattaagtgactgaaaggaacattcgtaacacaaataatcactttgaatgatttttaacttagtcactgagttttttgtgcacttcgtctaagcaatcggcaccggaaattcctgtgattggattttcgccgtgtataatagcatccatttcgatctgtgtgagattttcagtaaggagcttttcaatgttaatgaacttggcattaggctcttgaatggaggcagcatccatgtcctggtcaactggcgtctggagcaccgaactgctgcgcttggcacgctctgaaacgtaaggtaattcaagtttatacaaattaagaagttaagatttaatcacataccaaaacgagccctgtgggcctcttgatcgatgataatttcattggtcacataaacttcgcgtcggatttggtcacgcagttcaacgctcatgtccggaatgcaccaacgcaccaaaatcatcaccagggcaacaaagttctgaaaacaaaatgcaagccatcaactaatttatgcaaaatatttcatcatcacacgcccctgaattacaatatttagtctgcgacgttgctggcgaatttggggtcaaatgaagcctaccaaatgacaactttccaggcaagtaaatggaattggctaaatgcagcttagacaggtgctagcctcaaccctaatataatgtgtattgggggcgatatcgtcgagttctattcgaaaaagaaaccccttagaaaccaaaaccggcacagcagcacaccgctcaacaaacatgcaacacatgcaacatacttgactcgatggactttggattcttgcagcataagaaagacagaaagccgggaaagaatgaaaggtaaatataaagaaccaaaatggagaacctaaatggataattggccctagttctacttagagccaaaaactttagttagtagctgtgagtacctcgagccaagcggacgcgtttaagcaaaattaaatacaatactaaaattataaaaaaggatatagaaataccaattgtataaaagaaataaataaattacaaaagaatattataaaatctaattaaaaacaggaataccaagcaatctgaagaataaaaaaacggtcgaaatattgtacaaagttaattaggccgtgttcaagatgaaatactttgaattcctaagcctttcgtcggtgggcctctgcatagcctgtggggacttgctattagcagtgagcatactgggtccttcgagcttttacctatacctcgatttcatggatattgaaaaatgggaacaggatgccgaagtggaagctttgactcccattggaaccttcttttcaacattgggtaacttaacggaaagtaccgaatataattgttttctaaatacaaagtcttacagtgaactatctgtgggtgcgagagttctcgcaggttttctatatgacagcaacgtttataatttgggtgaaggcaatgataaacctaatggtggcctgtattcttatcgacggcataaagcaggtaacatattttaaatatcccaaaagcacattacttatttaatataaaatataacaaactattttaagaaacgtctcgtatgtattgctccctggttgataaactcatgcctatcaatggttgttgaaacgggcatttttgtgagcctggagctgcgaattgatgaagttgatgccgcagtggatcgtcgaatagcgagaagcctaatctttggcgtatttataggtgagctactcctttcatacttaagttaaataattgtttatatctcaatatatatttcagtgctgaacgcgttattttcgtatggtatctttgctctttatcgcaagctaaagtctgaccccagtgagaatgttgaagtcattccccaaagcccgccacacacatttaatgcctgaacatacttagaatttacgttttggaaccgacaaatataaatgtttgaaaaataatacaaataaatctatccctaagttttactcacttcaaagacgactacaaaacccaatcggcaggccagaattatgtagaacatgctgctcaatgtgtatttttctggagacgatggtggaagtcgaaagtccgtatatctgaaaacaagctagctaataagtaattcctgaaattattccatatatttcactcacctgcacgttgttatgttggagagatcgccagctaagctatacaacgtgggcgaatcaatgactttgaactctgatagtgtaaagttgaggtaaccatccagagtgccttgcttgtttacgtaatgccggtacaccaaccgcggtatcatgtcagaggtaaaggcaatgatgaatccctaaatacgtggtaattagtttaagatattttgataattctacctctgcgaattctacctacatttgtgatcacgctgagcttgcctatgcagtccaggatacgataccacactcctatatctcgaactcgctgtgatactggacgcttgtggtgggtcaatagtttctttgcatccagtcgcatttccaggatattatttagcagggcaaagaatggcgccagcggaaaagcggccacaaagatggttacgaagccgtactgcaagaccatctccaaatactcgggaaacagacctcgggcaccccaatccagtagcttgaaatcccgcatccagcgttcgtctttcgccttgtctggattcggggtgttgttgaaaagtcgcgacagtcccacctgaatggccaaaacctttcgccagaacatgggaagatacacttcaagaatagtgttgaatgcctgcttgccaaccattataatggctaactggatgcacagctccgtcaaacagccgcccgatgagcactgcaaaataaagagtttattaatttaactatatgtatatacgaaatgaaaagactcacctcctcctgccgatagtcaaaaagcttattatactctcccggatgaccaacgaatttacccttgaagaaagctatgtaaaaaatggaggcgtagtagtttacaaactgcagcagataaattttaagggtaagcgagtcatcgaactgagtttgagtgcgccacatttccagctctgtcaggtactcagccaaatgattgtacatctaaaaagaaatgtggtatttgtaaatcgatctaactaaacgaaaccatttgcttacataattaagtatatagagcaggcacagatttacaaaggcagctgatgcagtggctaggacaatagcgctagaggtggtcatgggactagcacccactttaagggcggccagcatggacattcggtatacaaccactgccagcagtgccacaaaggccagtgcaattaggagcagtaccactgaaaagctgaacacggtggcgggaagtttcatacgccaaaagggaaccgttggctcttttatattggtcacataatccactctcgtcggtggtatgtgctccaaacgcgccagatattgtggcctcggatgctcttcatgcacatcgaatcccgtcagatcccaacgatgcgttatttcggcggagtaccgcttccacagctccagaaatagggtggcccaaaaggacataaaaacggcgaagaacacggtgctgggattgtcaatgaggtacgtgactttggcatagttgcaggtctctttcaggtcccaaaagttgcaccaatcacaaagaggacacatggttatgtttgtattaccgctctggcaaatatctttcctagagataatatttaattagatttcattttatatggaggattatttaaatataaacttacacaggcacatagtttttaagggagaaccatgaatataggaaacaaatgacacccactattgaggccagcagcaacatgtaggtgtagtagcccagccaggcgaagtacaagcctaaaattgatatttatacgttagaaaatattatttaattttctattatatgatctcaccaattttgacaccgaagtattccttgatgtcatccaagggctgatagcgataccatttgggcacagaggcccaatgtttgtacagcagagctctcatggttcccgtctcggttatttcaccctgtgataaatacatagtttagttgaacaatttagcatagagtcaatcaattacatcatggagtggataggcagcagagtagacaccctcggcaatcagtcgctcaataccgaaggccatgtcatgttgattcttggcaggaaatcgctggcgatctaggatgaactcaacgatgcgggaacggacggcggtggtaaagaaacaatcctgtcggatgtcaaagctaccggccgataagaaaattaataagtaaataggcacgataatttttatatagaaattattttgaactcacagatactccttatcgcgactgtaaatggcagtgaatcgatgagctcgctttggaaaaatttcctcgtccacataaatgttgcgcagaaagaattggaaaacatgtttaagactagaaaacacgcttttggtcgatcgattgaccacggacattcctggaatctaaaggcattgaaagttcaagtgtaaatggtatttagaaactaattttaataattttgtgttaacattcaagctggcttgttctaagttacattttctttatacaaaatctatcaaggttaggctgggtattttagttcgatttcaaacaactcacagcggaagctaaacgaaatatgataatctaagattatttttaggggattaataataaaatatttaactggtttaacttcaacgctttggccaaccttattggtcaagtaatgggccgcatttcgtaggcgattcgatctttcagatatgcgtaaattgcataacgactaaaacatacaaaatataaaatgatttaaattaaaattaaatcataaatgaataaattacattttcgggaacttttaatttttgaataaggcctaaaagaatgctataattttggctttagcttagcatttaaaagtatgtttacttacctccttcatgggcatgcgcagcttaagaatttccgcataccgtcgcaggacctccaaaggagcgtggatctaaaatcaatatatatgaaaacactatacaagttgattaagcactgcaaacttaccttaacgaaccagatctggtccttctgactggactcgacctccagcccctgactaatgagattcgcctcgaaaacacgacgcttttccgtgttctccagctccgtgggctcgtgcgcattgatcctgtaggccaggacaaagtcaatggaccggacgcagtcctcaaagaacagtgatgtgttaatctcgccccgctggtagaactccctggggcagctgcactcgcgatcatcgtagacgccgcctacattgcccttcacaaaatccggatcagtcattggcagaaggggagcggctggattcgatgggttggtcctgttcccagtgggtcttttgccattggccctgggctcggcagattctggcagttggagcgtgggggcgttgctatacgatagacagtggcagataaggttaattatcgtatttagctaggtagataaactttcggctgaaacacatcgcagacatacttaagcgatatttaggtatagtaaagatactttttagtataatgtaaagtaaataaacctattctatgaaccttcttaacatgtgtcaagttgtaatggtatcaaattattgttttcacaaggtacccccattccttaaactagaaatatgaaataatcgcaagtcacgactaactcgaaatgctttcaggcggaaaacttaatgtgatacaatttgaagcgagtaaacgggagcaaaacacgtttaattcccgactggcgacgcctgtcgtgcggaaaggtcctaatgggacgcacatcccattaaaacaccaataacatatataggtcacctcctgggagagccaaagccacgggaatttaacgataaataatacctctttgcgacgggaaggaaacgcacaagatgacctcagttaacgtttgctccgttaatccaagtaattaagtgtaggaacgaagaaatctcagcatatgctcggtttatctttagttcaatttagccttaagttgaaaatcatctagaaactttaacaaacacttctctcattacatacaaacatttggtatttgtttgctaaaaagcagcttcatgtgatgtgatctagatgagaaatatctaatgattcacagcctttaatcgatgtagaatacttaaagcttcaaagtgcaatagggccgagcaatctcctctgtcgggtttcattaaaagtgcacagagcaaatgagtaaaagtaatgaaagaataatttattcaactgataagcaatcaagcatacagtctggatttgaacttatgaagttaattttgttatcagcagcattacaatcgtattttcctctttaaatatgcttgccaattctatggataatgctaaaatattgtaagcaagctatctatgttagtatatagtaatattgaaactcaacttatagataggggaaacgttaacttaacccccccccccccttatgattaacttctaatcataaatcttgttattcccctcttttgttgctacgtttttttttgtattattgttcgtttggttcattaagcatttttacacttctttggccttcgcacaactcgaaattatcttcagcttctttcatcaaaaacataattaaaatttacatataatggctgtttgctttgtaggcccacacgttttaaattttcggcatttggtttaatcaaggccaagagagtgagagagacattaatttatgaaacatgtgttgcgtttgttttctgatatatttttgcattggctgctaaaatcacttatataatttagatgttcctgctaaaatgccaccgatcaaataggcattatatgtatatgtacatcgaaggcttattcatcccacaagatcgcaatacttgaggtgctcaaaaaacgatgcgagatacgcgacacacataaagaaaatattgtcttttgctttttcgaaacgatgattaatgctacaatacacacggaataatggcagaaaaacccgtttccttgaaaggtgatcggctcgtttcggtttacaaagtttacagaacctaatcgcaattatcgcggaaaaacttatgatggaaattttcacctcttgtccgagcagataattaataaacactgaattaaagtctacaaatgttagccatggcaaccgacgaatttgtttggagcgaactgagagacgacaaccaacgcgcagcagcgaagacaacaaactgagaaatgagaggcaaaccagctgggtttttttgccggtggcccccgtccccccgcagctaccaacagcaccgttatatacatccccccagtcagctgttttactctcgagagagttttgagcacatgtttttccaattgatcattcggatgtcaagtgcattacacctacacacacatatgcgagtttaagcgtaaataaaagataatcggtatctttttgtctaattaaacgagagcagagcgtttatttccaatttcccgctgggaaagtctcttttcgctgtgtatgataagaaattggaacgatgccaagtacagactgagaaatcatattagctcgattgcaacaataatagttgcaattgaatattaaatggtctgttgggactcacctcctaacaatcgtgagtcactaaacaactgaaatgattgctcagcagatttaagacagatgtgaacaatcaaaccaaatatttggagtatatgtacaaagaatcgcacttcatgtgttgtttaggcaaatgtactttttcagctattgctctaccttaatgaaagataagatatacagggtgcttaaacattgggtactttttttctgtttctatgattttaagcttatgatcttaaaatgtctatgaattaattatttaaatatatagctggatttattggtaactatcagttaaattgctagacaccctgtattccgcacaagtaaaaactcaattacagaaaactgacaacaaaagcagtcggctgcaattaactttaatggttacttcctcggcccaaaatggtctgaatttggaataaagtgaataaagaataaaagtgggcttactaacctttctgcaaaccgggctctcttgtcggcggcaccgagtgattcacgcgatgctgataattgctcctggtccagaaatctctgcgaagtgtcgcgcccgcgccagaagctctcctttcccgttaagcgctcgtggagattgtggcgcttcatcagctccatgtcgaagggagctaggggggtggtgaaggggggctccagcgggacagtggtggtgggtgatatggcgggattgtgggggctccgctccaacagctggaagctctcgtccttggagaaggggggtggtgaggtggcctcctccagagcgccaactttggcactgcctaaatttagcatcttgtttctgagaaattcctaaatttagtcagtttcgctaaatcgcattctctcttctttttcgctcttcctcttctgcggtgctttcacaaggcatctgcatctgtgtgcgttggtggccagaaatttagcaatcaactttcatctttgccgttcattaaactagtactactaatatcacaccctcctattgcactttacactcatttattattttataattatgaatgaattaattttcgctgatttagcgagcgacaacagagcgaaaaaccgtttctaccaatgttctgtaacaaactaacaaagtgctcagatggtgggcaagtgccagtcggttctcgataatatatcgataactgagcgcgcagcttaaaagtggtaagcttgataacaactcaaagttggacagattcaatgagttcgtaattatctgcggaactggaatataatgttatcaaattatatttttgtcgtattgtgttggttagagtacaacggtaatcaatttccaagcatatgtcaatcgtactacttagggaaaccatttggttgttagacgattgcctgagacaacaatccattaaaagagaaaacataaaattgctttacattgtacattttattttatgccgagtctatacactatataattaagcggattaatcttaaaattgaattttttaagcacccagaggcgtgactatcgccatcgccagtgttgagcaccgatgaaatgaactcgccgcaaaaatcttatcacgcagcagctgactgcagtgcagatatgaaaaatgcgagcaggaagaaagtgaggaaaacaattgaaacacatgacttttcggataaaacaacaacgtgtattgggcagaacacaaaacaatgataatacaatcccgcgcgagtgggaggcaaactaatatgctcgcttttttctacatggaacaacaacgaattttcactttaatgtatggaataataatacagcagtgtttccagttagattaaccactattattacgggtctaaattatggattagagttgaacgtggacattgaatttacagcgcacagtttggggggccacctctttacttgtggttgtagtttttgtgcacctcgggcgagatgttgtacacgtactgcaggatctccaggatgaacgggtccttgcgggtctggatggcccggtccatgtcggccagcttaacgcggatatccgcatcgatcttggccgccacgccctcgcgactgcccatgtgctgtaatcggggttcacacggtattacatgtacataagtttccctatgtggcgtcttac

SEQ ID NO: 24770 - DNA, 3550 bp, DROSOPHILA
caccatctgagcactttgttagtttgttacagaacattggtagaaacggtttttcgctctgttgtcgctcgctaaatcagcgaaaattaattcattcataattataaaataataaatgagtgtaaagtgcaataggagggtgtgatattagtagtactagtttaatgaacggcaaagatgaaagttgattgctaaatttctggccaccaacgcacacagatgcagatgccttgtgaaagcaccgcagaagaggaagagcgaaaaagaagagagaatgcgatttagcgaaactgactaaatttaggaatttctcagaaacaagatgctaaatttaggcagtgccaaagttggcgctctggaggaggccacctcaccaccccccttctccaaggacgagagcttccagctgttggagcggagcccccacaatcccgccatatcacccaccaccactgtcccgctggagccccccttcaccacccccctagctcccttcgacatggagctgatgaagcgccacaatctccacgagcgcttaacgggaaaggagagcttctggcgcgggcgcgacacttcgcagagatttctggaccaggagcaattatcagcatcgcgtgaatcactcggtgccgccgacaagagagcccggtttgcagaaagcaacgcccccacgctccaactgccagaatctgccgagcccagggccaatggcaaaagacccactgggaacaggaccaacccatcgaatccagccgctccccttctgccaatgactgatccggattttgtgaagggcaatgtaggcggcgtctacgatgatcgcgagtgcagctgccccagggagttctaccagcggggcgagattaacacatcactgttctttgaggactgcgtccggtccattgactttgtcctggcctacaggatcaatgcgcacgagcccacggagctggagaacacggaaaagcgtcgtgttttcgaggcgaatctcattagtcaggggctggaggtcgagtccagtcagaaggaccagatctggttcgttaagatccacgctcctttggaggtcctgcgacggtatgcggaaattcttaagctgcgcatgcccatgaaggagattccaggaatgtccgtggtcaatcgatcgaccaaaagcgtgttttctagtcttaaacatgttttccaattctttctgcgcaacatttatgtggacgaggaaatttttccaaagcgagctcatcgattcactgccatttacagtcgcgataaggagtatctctttgacatccgacaggattgtttctttaccaccgccgtccgttcccgcatcgttgagttcatcctagatcgccagcgatttcctgccaagaatcaacatgacatggccttcggtattgagcgactgattgccgagggtgtctactctgctgcctatccactccatgatggtgaaataaccgagacgggaaccatgagagctctgctgtacaaacattgggcctctgtgcccaaatggtatcgctatcagcccttggatgacatcaaggaatacttcggtgtcaaaattggcttgtacttcgcctggctgggctactacacctacatgttgctgctggcctcaatagtgggtgtcatttgtttcctatattcatggttctcccttaaaaactatgtgcctgtgaaagatatttgccagagcggtaatacaaacataaccatgtgtcctctttgtgattggtgcaacttttgggacctgaaagagacctgcaactatgccaaagtcacgtacctcattgacaatcccagcaccgtgttcttcgccgtttttatgtccttttgggccaccctatttctggagctgtggaagcggtactccgccgaaataacgcatcgttgggatctgacgggattcgatgtgcatgaagagcatccgaggccacaatatctggcgcgtttggagcacataccaccgacgagagtggattatgtgaccaatataaaagagccaacggttcccttttggcgtatgaaacttcccgccaccgtgttcagcttttcagtggtactgctcctaattgcactggcctttgtggcactgctggcagtggttgtataccgaatgtccatgctggccgcccttaaagtgggtgctagtcccatgaccacctctagcgctattgtcctagccactgcatcagctgcctttgtaaatctgtgcctgctctatatacttaattatatgtacaatcatttggctgagtacctgacagagctggaaatgtggcgcactcaaactcagttcgatgactcgcttacccttaaaatttatctgctgcagtttgtaaactactacgcctccattttttacatagctttcttcaagggtaaattcgttggtcatccgggagagtataataagctttttgactatcggcaggaggagtgctcatcgggcggctgtttgacggagctgtgcatccagttagccattataatggttggcaagcaggcattcaacactattcttgaagtgtatcttcccatgttctggcgaaaggttttggccattcaggtgggactgtcgcgacttttcaacaacaccccgaatccagacaaggcgaaagacgaacgctggatgcgggatttcaagctactggattggggtgcccgaggtctgtttcccgagtatttggagatggtcttgcagtacggcttcgtaaccatctttgtggccgcttttccgctggcgccattctttgccctgctaaataatatcctggaaatgcgactggatgcaaagaaactattgacccaccacaagcgtccagtatcacagcgagttcgagatataggagtgtggtatcgtatcctggactgcataggcaagctcagcgtgatcacaaatggattcatcattgcctttacctctgacatgataccgcggttggtgtaccggcattacgtaaacaagcaaggcactctggatggttacctcaactttacactatcagagttcaaagtcattgattcgcccacgttgtatagcttagctggcgatctctccaacataacaacgtgcagatatacggactttcgacttccaccatcgtctccagaaaaatacacattgagcagcatgttctacataattctggcctgccgattgggttttgtagtcgtctttgaaaactttgttgccctggtgatgattttggtgcgttggtgcattccggacatgagcgttgaactgcgtgaccaaatccgacgcgaagtttatgtgaccaatgaaattatcatcgatcaagaggcccacagggctcgttttgagcgtgccaagcgcagcagttcggtgctccagacgccagttgaccaggacatggatgctgcctccattcaagagcctaatgccaagttcattaacattgaaaagctccttactgaaaatctcacacagatcgaaatggatgctattatacacggcgaaaatccaatcacaggaatttccggtgccgattgcttagacgaagtgcacaaaaaactcagtgactaa

SEQ ID NO: 24771 - protein, 1075 aa, DROSOPHILA
MLNLGSAKVGALEEATSPPPFSKDESFQLLERSPHNPAISPTTTVPLEPPFTTPLAPFDMELMKRHNLHERLTGKESFWRGRDTSQRFLDQEQLSASRESLGAADKRARFAESNAPTLQLPESAEPRANGKRPTGNRTNPSNPAAPLLPMTDPDFVKGNVGGVYDDRECSCPREFYQRGEINTSLFFEDCVRSIDFVLAYRINAHEPTELENTEKRRVFEANLISQGLEVESSQKDQIWFVKIHAPLEVLRRYAEILKLRMPMKEIPGMSVVNRSTKSVFSSLKHVFQFFLRNIYVDEEIFPKRAHRFTAIYSRDKEYLFDIRQDCFFTTAVRSRIVEFILDRQRFPAKNQHDMAFGIERLIAEGVYSAAYPLHDGEITETGTMRALLYKHWASVPKWYRYQPLDDIKEYFGVKIGLYFAWLGYYTYMLLLASIVGVICFLYSWFSLKNYVPVKDICQSGNTNITMCPLCDWCNFWDLKETCNYAKVTYLIDNPSTVFFAVFMSFWATLFLELWKRYSAEITHRWDLTGFDVHEEHPRPQYLARLEHIPPTRVDYVTNIKEPTVPFWRMKLPATVFSFSVVLLLIALAFVALLAVVVYRMSMLAALKVGASPMTTSSAIVLATASAAFVNLCLLYILNYMYNHLAEYLTELEMWRTQTQFDDSLTLKIYLLQFVNYYASIFYIAFFKGKFVGHPGEYNKLFDYRQEECSSGGCLTELCIQLAIIMVGKQAFNTILEVYLPMFWRKVLAIQVGLSRLFNNTPNPDKAKDERWMRDFKLLDWGARGLFPEYLEMVLQYGFVTIFVAAFPLAPFFALLNNILEMRLDAKKLLTHHKRPVSQRVRDIGVWYRILDCIGKLSVITNGFIIAFTSDMIPRLVYRHYVNKQGTLDGYLNFTLSEFKVIDSPTLYSLAGDLSNITTCRYTDFRLPPSSPEKYTLSSMFYIILACRLGFVVVFENFVALVMILVRWCIPDMSVELRDQIRREVYVTNEIIIDQEAHRARFERAKRSSSVLQTPVDQDMDAASIQEPNAKFINIEKLLTENLTQIEMDAIIHGENPITGISGADCLDEVHKKLSD

SEQ ID NO: 24772 - DNA, 2903 bp, DROSOPHILA
caaacacattactaactaaaactaatattaagaacagtattatatgacgaaaaggtaatactcttttataattgggacattttatcaaactcaaaaaaaaatacaagtttaaatattctttaataaacttgattgtctgttataatacatacgaggaattcattttaaataaacaattctaagatcttaatatttttcaaggatttgtgagcagtaacagttaacagttaagtttcaaaaaattcgcaattagctgttcattttcaatgaacatttattcatgttcacttcccacaccttttcatttcacatcttcttacacatcttttctgattttaaatttcacttcccgctttcagcaattcttaaactaattagtttttcttcttctcaccattttattagtttttttttgctggactaaaattgggtgtatacaaattaaaatctaatgcgggaccttttttttataatttttttggtcgccacgcgaaaagtgcagcctcaggttagttggttcgctgattggggagtcactggaaaagcgccgttacagagcgccaaagaggaatgtcaaattgggagacagggctgctaaccaataatcattccaaggtttttccaacccatttctggcggcttatcgatactaatttgaaatagtatgtatgtatctcaggatttgctttacctttacttaaattattattaaaaactatataatatcatattgaaaatcttcaaaagtttaggtgtcttcaaaacttgtttatttttacaaattcatatattgacaaatgcactctacttgaataaatattttatggcatcttaagtgtgaatttctttttttaatttcgtgcgaattgaattctatctctctagacacctacaattgtgcttcaaaatctttacagacgaaataccttaacataaacataaagtgggacgaaaataaattcattgaacctgtgacacaataaataatcatctaggcatgctaatccttgcgaaatccggggggcagcgtcacatcgaaaacgatgggggcattgttgggtaggtagttgatgtcacacgttgaggcattcacaaagatgatcctgccatcgctggtgatgccgtagccttcgtgtacatgtccgaagacatggtatttcgggcgcactcgttgctgcactgtgctgagtagctccacacaaccggctcgtacgccggaacagcagagatcgccgtgacccacgggcggcgtgtgggtgaccaggatatcgatgccttccgggatttgattccacttatccaaacaggcagttccacgtggaacattaaaggcccagcgacagaattccggttgccatggcgagccatatatttgaataccccaaatctcaagtagttcatcctccaaataccgacagttggtcagaacatcgcggacattctgcgtttgcacagcgctctccaagttctccttggcgttgcccaaagtgggcagatcatcgaggatggacatgccggtgtgtttgctgctcgaagcatgacttttgctcttctggaaaggatgggtgaaggttctatcgaagctgagctcatgattgccagcaatcacgatcttgtggcgatggggcagtgctccaatccaggtgttaaactcctccacctcctccagttggccgcacttggtaaaatcgccggcatgtatgaatatatcgccatctggtatatcgaacttgatgtagggcgtcagggagtgcgtgtcggacatgcaaaccactcgtgccttgttgggcgccaccgtggtggtcggtggcttcattgtcaccttgatcacgcgctgcgttttgctaatctccctccaagcggccgtgggatcctggctaagtggatgtactggcacttccattttgatatctgcaatggtggcgtgtgaggattactatgaattttcttatggagaactggtttgtttacgtataattcagcgaggtatttaaacacagatactaaatcttttgtttaagatagtaagagctatacataagacgtggccatgaatgttatcttactaagacagttctttaattttaaagtactgggaattatgggtttttcgtgtgattcgtaaatttcatatattaaaatattcaatgcaattacatttgtgttaaaaggacaggcacttgaaaaagatttaatgagtgttgtagttaagccaatataattggcgtacgttccaatttaggaagcatttgtaactatatctaaagagtagagttaaaagtcacaactaatacaggtaacagcttcatttgtcaaattaatactgttaattccttttacttacttttagttataaactttccaagcgattcttccttttttgcttctttgcgcctcgccgacttctgattgttttaggccattgtgttaggcctttaagcacacgttgcaatcgccggcgacatggtcgcgccctgattagtgcgcgtttatttatgtttagtcaagtatttgcagataaatgcgatatactaatttgataataccaatcaaaatacaagaaattgagtgttcacgcgtgacgtcattgccggggcaaaacagctgagcgccgatagtgcaacgtaatgaaaaacgtaacgtacaatcgcctatcgattggcaagtttctaacgtagccctggtcaaaacaaaaatcagctgctttataattttctgcttcttcgctacgcgtaaattttcgtccaacatttgcagtaaaaaacgttcctaaaattggctaaatcaaattggaaatagtgtttttttcgtgtgcatttgtgtcaaagaatgatagaagtgttctttgagtgtttaaaaagtgaaacgtgattaaaagctggaattccaggctgggcaagcaa

SEQ ID NO: 24773 - DNA, 903 bp, DROSOPHILA
atggaagtgccagtacatccacttagccaggatcccacggccgcttggagggagattagcaaaacgcagcgcgtgatcaaggtgacaatgaagccaccgaccaccacggtggcgcccaacaaggcacgagtggtttgcatgtccgacacgcactccctgacgccctacatcaagttcgatataccagatggcgatatattcatacatgccggcgattttaccaagtgcggccaactggaggaggtggaggagtttaacacctggattggagcactgccccatcgccacaagatcgtgattgctggcaatcatgagctcagcttcgatagaaccttcacccatcctttccagaagagcaaaagtcatgcttcgagcagcaaacacaccggcatgtccatcctcgatgatctgcccactttgggcaacgccaaggagaacttggagagcgctgtgcaaacgcagaatgtccgcgatgttctgaccaactgtcggtatttggaggatgaactacttgagatttggggtattcaaatatatggctcgccatggcaaccggaattctgtcgctgggcctttaatgttccacgtggaactgcctgtttggataagtggaatcaaatcccggaaggcatcgatatcctggtcacccacacgccgcccgtgggtcacggcgatctctgctgttccggcgtacgagccggttgtgtggagctactcagcacagtgcagcaacgagtgcgcccgaaataccatgtcttcggacatgtacacgaaggctacggcatcaccagcgatggcaggatcatctttgtgaatgcctcaacgtgtgacatcaactacctacccaacaatgcccccatcgttttcgatgtgacgctgccccccggatttcgcaaggattag

SEQ ID NO: 24774 - protein, 300 aa, DROSOPHILA
MEVPVHPLSQDPTAAWREISKTQRVIKVTMKPPTTTVAPNKARVVCMSDTHSLTPYIKFDIPDGDIFIHAGDFTKCGQLEEVEEFNTWIGALPHRHKIVIAGNHELSFDRTFTHPFQKSKSHASSSKHTGMSILDDLPTLGNAKENLESAVQTQNVRDVLTNCRYLEDELLEIWGIQIYGSPWQPEFCRWAFNVPRGTACLDKWNQIPEGIDILVTHTPPVGHGDLCCSGVRAGCVELLSTVQQRVRPKYHVFGHVHEGYGITSDGRIIFVNASTCDINYLPNNAPIVFDVTLPPGFRKD

SEQ ID NO: 24775 - DNA, 2900 bp, DROSOPHILA
agttgatgaaaccagacgacacgatccaaacctaaacttccatatagtatataccaccgatgttttgttgcatgccgatgtttgttgctccgaatattaattataccaaaatccaaaaatccaaatcgaatgagaaaagcgaaaatgaaaaaaaataatttgaaaatggttcaattttctttgcacttgtttgcagcatcttaacaatcaatctatctgtgcatctgtatctctaaatcgaaatctatcatctgggtatatatatgtatatatcatctatatcgattggatctgaaaatcattatttcccaggttctgctgcaccgaatcacatttgtgtcctttgtgttgtcgcaactgaattctctattctgtccatgaattatgtatcttcttcatatgcaatctattggaacgttaacctctctttgttgatttctgtctctatacatatgtgttgttcggtccatgttcggttttgatttccatgatttactactactactacctcctcataaatgcctagccttaagatataaacttgactactagttgcgctaatggaaacctctcctttgcatctctttctacgctggccaatgcacagagtcgtgcgcccatctcggccaaattggtggccaacatgctgtccgttgctggagcggatcacatcatcaccatggatctgcacgcctcacagattcaggtaagtcagcccatcaacaacatttgtatatttatctttgatattagagtgatttcttatcgtgccgcgatttgtatatcagtcaattaattacgataaagaaagtgtgattttccttttgaacgacgtaacaatttttgtttattaaagtgaggccaaagaaatacttatttaagggtttaaaataaattacaaaatatacagtacaaatatatccaataacatcaggtttgaatcaaaagaggagctataatctcgccggatcctcggagaaccgacaaatccatccgttggctaaaaggtgccgaattcatagcagggttcggcggcgttgtcagaccgggattgaagctctgtgtcgtcatcggtcccgttgagggtgtgtggcatggatagaatgctcacggatagtttggccatttgatggagtagcacatcaatacgttcattcttgagggcaattgtgttctccaggtgattggccctctcggcaatggaattgatgtagcgtgacttctcggcactctccctaatagcattggcatagtgttcgtactcgaccactttcttggataccttcttcatctgtccattgaccacaacattcacgtccatggtcagcacctggggttgactatcgatcgagcaggagcgctcaatcacttgggtgagggatcggttgagagtgcgtaccacagaattcttgttagccaactttttaatcaccacgctcttttgggagctcgttggcgatacactcagacggggtcttggtctgggactagcgcacttggtcaccgcgattagttcatggaacagtgattctatggctcctggcgctgctgacgccagctgctccagctccgaacgtgtcaaattgatgcccaatttcttcagtaccttctgattgaaggtctgccagctctggagtttcagggccacgctgctcttgggcgtatagttgtgcagatccaccagacgaggatgactgcgcttgacaatctttgccaccggcaagacatcggagaatgaacgacgagctttcagatccaggataatgcgctgctcctttagccactggttcaggtcattctgctgttcgttctccatacttagcaaggggtgatttggggttttcggattttacctgctttttaatttctgttgtaaatttattttggcaagtctagcttccatatatgtttcagacaataatgcttgatagacatactctctgccaatgactggcagctgtgtcaactggcaatgactactggatggctaaattaaaactcattcgataaattctccattcgcagggcttctttgatataccagttgataatctctatgccgagccggcggtactcaagtggatcaaggagaacattcccgagtggaagaactcgatcattgtgtcgcccgatgctggcggtgccaagcggttagttgcagtctttaatccatatgcgtaatagattaataatgctattaatatttcactttaagtgtcacctcaattgccgatcgactgaacgtggagttcgctctgatacacaaggagcgcaagaaggccaacgaagtggcctctatggtactggtgggtgatgtcaaggacaagattgccattctggtcgatgacatggccgacacatgcggcaccattgtgcatgccgccgatcgcctggtggaggcgggagccaccaaggtgtatgctattctgacgcatggcattttctcgggtccggcgatctcgcggatcaataatgcctgtttcgaggcggtagtggtgaccaataccataccgcaggatggacacatgcgggactgtcccaaaatccaggtgggttatatcatatatatgcttctttagatgtgaatataatttttattttttttttctcagtgcattgatgtctcgatgatgttcgccgaggccgtcagaaggacacacaacggcgagagtgtctcgtatctcttctcaaatgttccatactaaacaacaaacaatcggcagaaaaaccagcaaacgtttgataaaacagcaaccagaacaccgttagcaagccacagcaaaatgaaaagagaaaaaaacccactttaatagcaatttgtaatgcaattttcaacacaaacacaacaattcgaaaccacatattttgccatcatcatcgttatatattttttatggatt

SEQ ID NO: 24776 - DNA, 900 bp, DROSOPHILA
gaagctagacttgccaaaataaatttacaacagaaattaaaaagcaggtaaaatccgaaaaccccaaatcaccccttgctaagtatggagaacgaacagcagaatgacctgaaccagtggctaaaggagcagcgcattatcctggatctgaaagctcgtcgttcattctccgatgtcttgccggtggcaaagattgtcaagcgcagtcatcctcgtctggtggatctgcacaactatacgcccaagagcagcgtggccctgaaactccagagctggcagaccttcaatcagaaggtactgaagaaattgggcatcaatttgacacgttcggagctggagcagctggcgtcagcagcgccaggagccatagaatcactgttccatgaactaatcgcggtgaccaagtgcgctagtcccagaccaagaccccgtctgagtgtatcgccaacgagctcccaaaagagcgtggtgattaaaaagttggctaacaagaattctgtggtacgcactctcaaccgatccctcacccaagtgattgagcgctcctgctcgatcgatagtcaaccccaggtgctgaccatggacgtgaatgttgtggtcaatggacagatgaagaaggtatccaagaaagtggtcgagtacgaacactatgccaatgctattagggagagtgccgagaagtcacgctacatcaattccattgccgagagggccaatcacctggagaacacaattgccctcaagaatgaacgtattgatgtgctactccatcaaatggccaaactatccgtgagcattctatccatgccacacaccctcaacgggaccgatgacgacacagagcttcaatcccggtctgacaacgccgccgaaccctgctatgaattcggcaccttttag

SEQ ID NO: 24777 - protein, 271 aa, DROSOPHILA
MENEQQNDLNQWLKEQRIILDLKARRSFSDVLPVAKIVKRSHPRLVDLHNYTPKSSVALKLQSWQTFNQKVLKKLGINLTRSELEQLASAAPGAIESLFHELIAVTKCASPRPRPRLSVSPTSSQKSVVIKKLANKNSVVRTLNRSLTQVIERSCSIDSQPQVLTMDVNVVVNGQMKKVSKKVVEYEHYANAIRESAEKSRYINSIAERANHLENTIALKNERIDVLLHQMAKLSVSILSMPHTLNGTDDDTELQSRSDNAAEPCYEFGTF

SEQ ID NO: 24778 - DNA, 4148 bp, DROSOPHILA
ttatagtaaatgtattaagaatataataaatgctaatgccaaagagtacagagtaataacaaaacatgtttactagtatcttaagttgtgtggatggttactaagacaataatcccatgttttattggcccctgataatacaaaaagtatctgatttcatcatatactgaccgcatctctagaactcagatatattaatcccaggctcagacatttattaagcttcgtagtgcccagttactctcccattcggttcgtttaaacttaattagcttttgtctacgacttgatttatatagatcacgccaatggttccggaacttttactagccggcgagataatggaattctggagaggcttttgtttggcgcctgcgagaagtagacctgtaatctatactatatataatctatatatctaaacgagaacccattaaagtgtccagccacaaacaacgaatccgtatatccggcaaatcccccccccattaaaaaagactccatttcaggcgtgacttacagcacgacagtggttaatccgtcataaatctaagacaaagtaaacaaacggaaagaagccaaatttttcgagaaagtccgtcacttgaccaagttaaatgcctgataaggataggaaaacgcatttcagaaaagccctatttacaaagaaaccagaaatcaaggtcatgtatcgctaagtttgactgaagagcatgttgatacagtttatgctgatccacatttaatcattataaacatcaattgtatgctaggtaaacaaataacttctgtatagggttgttcgttcacctgttccgtagactgtttactctggcctcagcatctgcatcttatcatcggcacacaccccaaaaagcgagagattgcctagcccaatctcggtgttactaattacccatcctaatcagcgacaacgcctatatctttatactatataaggcagctgccgatcctagtaggtgtcaaaatactgctcgtacaggcagaatgtagttgactcgttgctgagaagattcaacgcggtgtccacataaacaaactaaagtcagttagatactattagaacgattagtacaagtacgagttgttcgagatcaccatggatttcgaccgcgtgcttgagaagtgcggaaacttcggaagatttcagtttgtcattctaattctctacggctacacgaacattcttagttcgttgcactatttctcacagacccttattacttttacacccgagcattggtaagttattgtaataaagagcagttaaattaaaaattcacacaattctataataatagtttccgattctgaatacatttcaattggttagaatgtgtctataatcagctttcaataattaatttaaaagtattgtcaccaaaaactatattttcaaataaattgtattcggataattaatacttgaattcctttactgccaatttctaggtgttcccacgatgacctaatgggcttgggtgccgcggagctgcgatccatttactccaacgtttcgcacccctcctgcactcttctctccgaggtgatcaatggaactggagtggcctccgaagagtcctgtcaagactggatcttcgagcgggagaacggctacgagagtctaaccactgaactgaaatgggtctgcgacaaatcccatcagccggcggtgggtcaatccttcttcttcctgggctcggtggtgggcaccatttcctttggatttctttctgaccacattggaagattgccggccatgctgatggcggctctatccggtgcaactggtgactttattacctcgtttgtgcacacgctaccctggttcgccttctcgagatttgtgtcaggactgtccacggataccatgtactaccttatgtacatcttgggtaatatatgatattcttcgctattgtttgcaaactaactgatttaattttccaatagtcttcgagtacctgagtcccaagcgtcgtacctttggtctgaacatcatcctggctgtattctactgctttggactgatgacctcgccctggatcgccatgtggattggcaactggcgtcgctacctctggttggcatctcttccagccctaggagttctaatttaccccctcctgatctgcgaaagtgctcagtggctgctgaccaagaagaagtacgatgaggcggtggcatgtctgaagaaagtggccaagtttaatggccgccaagttgaggattctgtgtttgatgagttcgtaaagcattatcgcgagaaaatgaacgaggagagcaagttgaacaagcaaatggatacattcctaggaatgttcaagactcccagattgcgtcgcttcaccaccacattgctggttaaatcgtaggtctactgttttgtttttatgagacacaaatttaagacgtcctctttttagggtcatcatcacgctatcctacgacgtgatcaacaggaacatggaagggctgggctcttcgccctttaagctcttttcgctaacctccagtgtttacctaccagctggtttcaccatcttactgctgcagaacaagattgggcggaagggcatggcatgtggagcactgctggtgggagctattataaccgctgtcaccggattcctgatcgcagtactggatcccagtgagaatgctgtcctgctggccctaatggtgggtctgggtcgctttggcacaacggtttcctacgatgcagagatccagtacgcagcggaaatcattccgaccagtgtgcgcggacaggcggtgtccaacatccatgtggttggattggcctccagctcactggccttctatgtgatctacctggcacaatactacaagcccctgccctcgatcttcatcagcgttctaatgttcctaggtgctctactctgcctgacccttcccgaaacgcttcacaagtaagtgcataatgttatttaaagctggcgttaagtatcatagacatatatcttttatcaaattaagaaaactacccgaaaccctggccgatggtgagcgctttgcaatgaacgagagctgcctgtacttcccatgcttacacaaacgccgcgaaagtctgaccgagcatgaggaccgaaagtctgaaccctagagaacgatgcacctgatagctgactactgtttaacctgctagccacttaacctgatgatggggtcagcgatatgctgacccccgtaaccgaatggtctgatagttattactcatgtgaaggatgcatagtaattaaaccaaaaccgttgaatagaatacacttatctaaccctatacatatatccaaaacagaactggtataaatatatgacgcactccttttttcacaataaatatataaatatataatgaacggaattgcttggtttcttactcaaaatcattatcacaagtcagccctgacaaacattaaaatattgtatataaatatatatccagatgttatgtcgacaatctcaagggaaatcttgaaacatttcattaaagattttttgttcaattcccaaaatattgtgccttaaaagcgctaatattttagtccccattatcgattcttccattaagcgcaaaatgtcgttatataattggataaatgaagcaaacatgagtatatttccgaaattaaagacgccagaaaagagcttaaaaagtcggcattaattgattttcctttgtatattttataagtggttctctaactttaaataattattatcagtttgcttaatggctctcatttgcttaaagatcaaactccaaaatagaacattcagatactggcctaagcagtatcgcatttatgtacatgaaggtatgaaaaactcttaagataagtattcaattggttgtagttaagtgattttgtgccgcttaagtgttaactatacgattccatttttatacacaatcagcattttggaaaaacagcaattttcgatcgagttaaatgtacatctaagccctaaggtgactaccaactagagtaggtatatatatatatacgtatatataaaattataagggtacactctatacataagtatataagaaaaggcttctgcatactgagcacaaatgttgcaggcaaccaactggccgt

SEQ ID NO: 24779 - DNA, 1758 bp, DROSOPHILA
caggcagaatgtagttgactcgttgctgagaagattcaacgcggtgtccacataaacaaactaaagtcagttagatactattagaacgattagtacaagtacgagttgttcgagatcaccatggatttcgaccgcgtgcttgagaagtgcggaaacttcggaagatttcagtttgtcattctaattctctacggctacacgaacattcttagttcgttgcactatttctcacagacccttattacttttacacccgagcattggtgttcccacgatgacctaatgggcttgggtgccgcggagctgcgatccatttactccaacgtttcgcacccctcctgcactcttctctccgaggtgatcaatggaactggagtggcctccgaagagtcctgtcaagactggatcttcgagcgggagaacggctacgagagtctaaccactgaactgaaatgggtctgcgacaaatcccatcagccggcggtgggtcaatccttcttcttcctgggctcggtggtgggcaccatttcctttggatttctttctgaccacattggaagattgccggccatgctgatggcggctctatccggtgcaactggtgactttattacctcgtttgtgcacacgctaccctggttcgccttctcgagatttgtgtcaggactgtccacggataccatgtactaccttatgtacatcttggtcttcgagtacctgagtcccaagcgtcgtacctttggtctgaacatcatcctggctgtattctactgctttggactgatgacctcgccctggatcgccatgtggattggcaactggcgtcgctacctctggttggcatctcttccagccctaggagttctaatttaccccctcctgatctgcgaaagtgctcagtggctgctgaccaagaagaagtacgatgaggcggtggcatgtctgaagaaagtggccaagtttaatggccgccaagttgaggattctgtgtttgatgagttcgtaaagcattatcgcgagaaaatgaacgaggagagcaagttgaacaagcaaatggatacattcctaggaatgttcaagactcccagattgcgtcgcttcaccaccacattgctggttaaatcggtcatcatcacgctatcctacgacgtgatcaacaggaacatggaagggctgggctcttcgccctttaagctcttttcgctaacctccagtgtttacctaccagctggtttcaccatcttactgctgcagaacaagattgggcggaagggcatggcatgtggagcactgctggtgggagctattataaccgctgtcaccggattcctgatcgcagtactggatcccagtgagaatgctgtcctgctggccctaatggtgggtctgggtcgctttggcacaacggtttcctacgatgcagagatccagtacgcagcggaaatcattccgaccagtgtgcgcggacaggcggtgtccaacatccatgtggttggattggcctccagctcactggccttctatgtgatctacctggcacaatactacaagcccctgccctcgatcttcatcagcgttctaatgttcctaggtgctctactctgcctgacccttcccgaaacgcttcacaaaaaactacccgaaaccctggccgatggtgagcgctttgcaatgaacgagagctgcctgtacttcccatgcttacacaaacgccgcgaaagtctgaccgagcatgaggaccgaaagtctgaaccctag

SEQ ID NO: 24780 - protein, 545 aa, DROSOPHILA
MDFDRVLEKCGNFGRFQFVILILYGYTNILSSLHYFSQTLITFTPEHWCSHDDLMGLGAAELRSIYSNVSHPSCTLLSEVINGTGVASEESCQDWIFERENGYESLTTELKWVCDKSHQPAVGQSFFFLGSVVGTISFGFLSDHIGRLPAMLMAALSGATGDFITSFVHTLPWFAFSRFVSGLSTDTMYYLMYILVFEYLSPKRRTFGLNIILAVFYCFGLMTSPWIAMWIGNWRRYLWLASLPALGVLIYPLLICESAQWLLTKKKYDEAVACLKKVAKFNGRQVEDSVFDEFVKHYREKMNEESKLNKQMDTFLGMFKTPRLRRFTTTLLVKSVIITLSYDVINRNMEGLGSSPFKLFSLTSSVYLPAGFTILLLQNKIGRKGMACGALLVGAIITAVTGFLIAVLDPSENAVLLALMVGLGRFGTTVSYDAEIQYAAEIIPTSVRGQAVSNIHVVGLASSSLAFYVIYLAQYYKPLPSIFISVLMFLGALLCLTLPETLHKKLPETLADGERFAMNESCLYFPCLHKRRESLTEHEDRKSEP

SEQ ID NO: 24781 - DNA, 2743 bp, DROSOPHILA
actttgaaaacacgaacttcagtgtttagttcacatggtcctaatcttattgttaagttatgttcatagacacattatgtgtcttcctgattatactgccactgatttaacttagaatggttctaggtttttaaagtttggatgcatcttgcaactgctggatataactattgtcgctaggtgaagcatggaaaacgattaattccgttgaagacactatcagccgtattatatttagaattcgttcaaaaaagatttcggcgaaggatctccaagaggatatcagtcctataatcccatttttgaggtaaccaggatataacgattcgagctgctcttttaaaatacccgttacgcgttaagtatagagtatgcttgattcgaaggtatcaatggaaggaagcgttttgtaacttttaaagtatagatattcttgatcaggagcattagaagatgcgatgtgcaaatgtccgcctgtatgaacgcctccatctgaggaactataaatccagaaagttgagaaataattaccgcgcaatggggttattgtctgatatcaggtaatcgtcatattgatttactatcaggttacaaggtgttgaaaccatttgcttaatacggcgaacaaaaagatagtaagttaagtagacgaagagaaaagctttaacttcacgagagacgttggctaatttattcatttttgaaaaataattaaaatcattttgaaattatttatgtatttccgaaatatttatcgggttggtctcgtgcccattttgatcttcggggtctctgttctccatgccgcgttcattagaaatgatgtttgctttattaggagctggcgggtcttttcggccacgtagaatactatcaaatccacacaacggggcttcgattatcaggtacaaaatgtaggacataagcacggtaaagccaagatcatagcagaaacgttccatctgcaaaattaagtagcattaaaaaacaaatattacaattactgttgcaaataacaacctaccgcgatgtagttggtaaagtatgtgttagtccgcacgttcctgctattcacctcttgtacaaacatgtgccaaatatacatggagtaggaaagtctggaaagtggttgccacaagggtgtggaaaggaaactattggccaaaccaccgtagccctgcatgcaggcaaaaattatccaacaaatggccaagggccaagccaaccgggtaagggtgtagtatagggattcctccagcgtggaaagaggaggagcagtcagctgggaagccggatatagagcaaaaatcgatgtaaaaagcatcgccaagctgagaatccagcctaaccacacaataggcctgcttagctggaatttctttccgcgatttatatgcagaaagtagccaaataagaatccaataagccaaggagcagcgtgagtgtgagtggctagatacaattttttgttgggaaccccgtcatcgccgtcgttaattctgtgtggagcacgttaggttacacttcagcttataatatcaaattaaaacagtaaccctacttaataagcaacgtgtagtggttgaccatctgggtagcaaaaaggcagccagatagcaaaaccacaagtactgcgattccagaagctgccttcttgccccagttgtacagagccatcaagaggatcggggagatgataaatagctgcatgtccactgccaagtaccaagtatgatccagacactgaaatcaatagataaatacatattaggaaataaaaaaagtagtctggttccgcgctttgataacgttatttatcgaactatctctatgtagttgccgtatcttgtcgtatctaattaaagccattacgtaaatgtattattacacacaatattctgcactgcatagttctgaatgaacagcaaagtccagaaccatccatttaaacaatactccatgccatggtaaccgtttttgagcattggaccaccactgactacagtcatcattgtcatatagattagtatggcgattgcaacgacaggcaaaatgcgaagtatccggtgcagatacatcaaaactgggttcagtcttccaccggatctattgagagctaacatataaattccgtttttaaatgacactcgatatatacatacttttccatagaacgcagggaaatcatagataccaaaagacctcctaggacgaaaaaagagtcaactgcaaagtatccgtgtagcacaaaactggaaaatggttttacggtccactaaaatatatacattattacaaaacctatcaacgtctgtttgttatgtatccttacagtatataaatctaaccggttaaggtttggcgatgtcagaaaaaatatgaattcatggcagtagataacccagaaaagtgtcatgcagcggatgccgtggaaacactcgatcacatttggattacttttatttgggacgatgcggaaaagtgcgcgagagttggctctagccgaaaaagtcttaaccacagctggaatactccctagaatattggcattggtgttaagaacttcattgggaggtaatgcatttaaatacttactgggatcatcacacaggaagtaatcaaatatcgtaacagaaatcacaataacgcacatcaaggataggataactctgaaatcaaaatgtttaagacaacccttctgagggaaatgtaagttatcatacatggtgaaaatagtcagtcc

SEQ ID NO: 24782 - DNA, 681 bp, DROSOPHILA
tgtctggatcatacttggtacttggcagtggacatgcagctatttatcatctccccgatcctcttgatggctctgtacaactggggcaagaaggcagcttctggaatcgcagtacttgtggttttgctatctggctgcctttttgctacccagatggtcaaccactacacgttgcttattaaaattaacgacggcgatgacggggttcccaacaaaaaattgtatctagccactcacactcacgctgctccttggcttattggattcttatttggctactttctgcatataaatcgcggaaagaaattccagctaagcaggcctattgtgtggttaggctggattctcagcttggcgatgctttttacatcgatttttgctctatatccggcttcccagctgactgctcctcctctttccacgctggaggaatccctatactacacccttacccggttggcttggcccttggccatttgttggataatttttgcctgcatgcagggctacggtggtttggccaatagtttcctttccacacccttgtggcaaccactttccagactttcctactccatgtatatttggcacatgtttgtacaagaggtgaatagcaggaacgtgcggactaacacatactttaccaactacatcgcggtaggttgttatttgcaacagtaa

SEQ ID NO: 24783 - protein, 215 aa, DROSOPHILA
MQLFIISPILLMALYNWGKKAASGIAVLVVLLSGCLFATQMVNHYTLLIKINDGDDGVPNKKLYLATHTHAAPWLIGFLFGYFLHINRGKKFQLSRPIVWLGWILSLAMLFTSIFALYPASQLTAPPLSTLEESLYYTLTRLAWPLAICWIIFACMQGYGGLANSFLSTPLWQPLSRLSYSMYIWHMFVQEVNSRNVRTNTYFTNYIAVGCYLQQ

SEQ ID NO: 24784 - DNA, 5407 bp, DROSOPHILA
tcgtcatcgccactgaaggcgagcagaacctggttgctcttgggcagcagctgcagtcgaagacagaagcagaatccgtcggataaagatatggtttgaaagcacacataattattatcctggaaagtccacaacttgatggtggtatctgctgctgcggtcgccaaaagccaggagccatcctgttggcgaattccatccacagtatttacgccacttgtgtgtcctttgagagtgaagctcttagtcgttcccgtttcatccagttcccagagaatagcaattgcatcatctccgccggaaagaagtttgtcgcaatccaaccacctcacagtgtttactcgctttgtgtgctccaccagcgtgaacaggaccttggctgagttgccttgaaactaaaaattggttaaatatactatgtttccagtaaaggcaaaatttcctacctttggatccataatggctatggcgttacatgccccataggcaatccaaccatttggaccccaatccgcgcattccgtgcagcggttgcaggccactgaagtatgcagattctccacttgcatgctaatgttgcacttctattttttaatgacaactaaattcgaattgaatgtcggcgaaattgttttgttttggcacatgtgcttcaaataatgcagtgcttctaaaactgtctcatctgttcataaacatatgatttctaagggagtgcaagtgagacaactatatgttgtgaagaagctggaatagtgaggccagccgacaatattgaaaagtctggcagggctagttacgaaagttacacctgtttggtttttgatttttcggtattgcagaccattgcaaaattttgaccgaataaatattgcaacttctgtaatactgggtatatgatggattttaaaatttgaaaaggcacaaacacagctgctacattcgtcagccttttcacttcaaatctagcgcttttccactgctactgtttggtcacactggtgcgcaaaataactaaaacaaactcggaaaaggcgtccgcaaatgttttcttctgctgctccccgcgtttaattaaaagtaattttcctaattgatggccaggggtgagccccagttgctgatatttgacctttcaccgccagcgtttcggatttccaatcagaaagccaacagcttgcaactgactcacaacgaagtcacttgagattgtccgagttttttttcaacttcggtattctatttttcgtatctcccctgcagcttgtgagcgtcttggaatgctgaatgtgtttcgccagcagtataatcgaagcgcacaggaagttatttatagcgccgccggatttggatcattccgatccagccacacccacgatttcgaccagatccaaaatgccgagggggaaatcccgcctgcaaaccgaagtttgtggcgattgcggagctggtgatccatcctgggcgagcatcaaccggggcatccttctctgcgccgactgctgttcggtgcaccgcagtctgggcaggcacatctccattgtgaagtctctacgccagggtaactgggagccctcggttctgaactttgtgaactctctaaacgcccatggagccaatagtgtttgggagcatcatctgctggatggcagcaccaactccaccggcggaaagcacgtgccacgctggcggaaacccacgcccaaggatgcactccatcccaccaaatccgattttattaaggccaagcatgtgaatctaacgttcgtgctaaaacccagtctccaggatgacgatgatggcaatggctcagcgggctgtctggaacaggagctgagtagacagctccatgccagcgtgcggaccagcaatctagagacttcactgcgcttcttggtccagggtgcagacccaaattactaccacgaggacaagctatcaacgccacttcacatggccgccaagtttggccaggcatcacaaatcgagatgctgctcatctatggagccgatgtgaatgccttggatggcaatgggatgactcctctggaactggccagggccaacaatcataacaccatcgccgaaagactgcttgatgccatgtacgatgtcaccgacaggatcattaccttcctaggtggcaagaagccagatcatgcggtgagtttagatctttaattacctgcagagtgaaattatactttaattggacaaaccatttaaccttatccattgattaatcatatatgtattaagccaattaagctatatccttgtaactccttaagttgtcttcagtctaaagtttataactatctatttaaatttttgttagtcacagaactatatttatttaatggattcatatttccatgagcaaatgcacagttgactcgacctttcctacccatttccttattccgttctatttaaatactatttccatacgtagagtggccgccacatgattattccggatgccaatggcgcggacataagcgagcaactgaagattgcacgtggaaagttgcaactcgtgccaaataagatgtttgaggagctggtcatggacctatacgatgaggtggacagacgcgagtgcgaagccagtgagtatgactgctaaacatagactacaaacaaagctaatcttatttttcttaacgaaatagtctggtcgacaagcaccctgaatgctgatcatgcaactgtgccatttttgccggctaatccatttttgagcgccacgcgcaatcaggtttgacctcgccgtacattaatgattcgaaccttcattcattgacatggtctcgcctacagggtcgtcagaaattggcacgcttcaatcgcgccgagttcactggtctcttgaccgacgtgctcgtcgatgctatgcgacgccagaatatggccaacctgcgtccaatggatgccccagtggccgggcaccagtcgctgcaatcgctgccgtatgccaacaactcaatgctgctcggctcgttcgagcagggcggtcatgatccgaatctgtcggacgacgagcccatttatgatccggtggccagcgatgacgactatgccccagtgccaccaatggcccagcaggtaaacctaatgcggcaaaagatactcaagctgaacaatagctttggctagaagcgtaagcgaagactgacatttagacaacccgtgctgtacccattgtgttcatccgtaggccagggcactatagctccctgattttaggcaacctaatccattttcaaaggtagaagtccaaatgtagaacataagcctcaataaaactagctgatacttgtgaaaatgtagtttaaataagtagtagttggtaccgtgatttgtctgccttgccttttgtttttatgcaatatttatttttaaagattttgtaattattagttgtacttgatttatattgatttattttccttgtttttatgctttttattttacttaggccattgtgcatacgccaccgcgcagcgcgaattcgcacaacgaaatggaaacgctgcgcaaacagctgaacgattacaaatcggagatcaatcagctaaagaacgtggtgcagatgctgtccagcgagaacacgcagctcaagtccaagttctcgagcgcatcgaacaacagcgtgtacgatgagccactgtgagatttttcatttgaatttatttggctagctttatttttatgatttgttttaaattttcctttgcatagtcgcattgatctgagcttgagcagtccggatacagagcacgagcctctgtcgctacccgaaggtgggactgccaatggggaaagcggctcctccaatgattcgtcaaatcaatcgaccatcaagcgtccagccagcatgtacgagcgtcgtttggtacccaatgtggccaagggcaatacggacatacgaaatacgaccagcatgtaccaaatggctggggatggcaaaccttttggtgaggaggtcaaagtgcgctctgacttggtcacacgccgtcttaaggagctcataagagctatgcagccagtgccagaggatcaaaagcagtcgattgctccacatggagagcttatacgaagtgccgtgactgatttaattgccctttatgccaatttggtaagatgaacataggggcttcctttataaggatgtttcataatcataaacatatattttagccaccgaatgccagtgacccgtctcgcgaaacccttaaactgctaacccgccagaacattctcatccagcacgagtgcgagaatctgcagaaagccatcgaggcggatgacaagcaggccatacagaagaacaccttggaggtgcgcgactgcgccttccacattgccagtgccataaagactttggtgttgcagttctattgagacgcccaaaacacaatcatcgacatagaagtttaaactcactcactcttttttgaagtattaaccgaccactttagtgccctgctgactaacaaaagtgcttccgccaaataatttaaagaatcccctttacatatagtttatgtatttaataaatgtttacataaatcaatgtacttcgttcaatatacacaaaatgcgttcttctacgggctaatgacccattgcaaaatagtttaaaagtgttgaaggattggccctcaaattcaaagggggggagacaaaggaggtggaaagatttacgatatctgtgtatatatatatatatttatgggtcctttataattttaataatcaggtgcattttgagcctgtatattgttcactttagttaactgtacgttctaagcatggacaatcagttaagcatggagtacatatgtataagtggcttcctctacttattgtttaactttgtgtaattgagtgggtagctgctgcctttgctctggctgtttttctgacctccggctggtggtcggattgctcgcctatggacaaaaatacactcgtggtggttgtggtgtgcaagttcaaggaactatttaagattaaagcatttatccatgagtgttgcacgactgtgctcgcggtctctaaaaaataatatgctctgccatgttcgaagcgcaccaaaagtgtccataaaaatatacacatcccattttgacattcaaaatctaggtgcattgtctaaaatattgcttaacattcactttacatctgcttgccccttcagtttgctactcgtagtcctcctcgtcgcggtccagtggttttcatttgcttgcgtacaacctacagtatttgattgtgttcgtggactcgggattttttaaaaacaactacttggaatatctgaaggttttttcccaaaagctcggctcaaactcttttcgttatctagatcacaaaacataagggctgctctgtagttaca

SEQ ID NO: 24785 - DNA, 2300 bp, DROSOPHILA
ggtgcgcaaaataactaaaacaaactcggaaaaggcgtccgcaaatgttttcttctgctgctccccgcgtttaattaaaacttgtgagcgtcttggaatgctgaatgtgtttcgccagcagtataatcgaagcgcacaggaagttatttatagcgccgccggatttggatcattccgatccagccacacccacgatttcgaccagatccaaaatgccgagggggaaatcccgcctgcaaaccgaagtttgtggcgattgcggagctggtgatccatcctgggcgagcatcaaccggggcatccttctctgcgccgactgctgttcggtgcaccgcagtctgggcaggcacatctccattgtgaagtctctacgccagggtaactgggagccctcggttctgaactttgtgaactctctaaacgcccatggagccaatagtgtttgggagcatcatctgctggatggcagcaccaactccaccggcggaaagcacgtgccacgctggcggaaacccacgcccaaggatgcactccatcccaccaaatccgattttattaaggccaagcatgtgaatctaacgttcgtgctaaaacccagtctccaggatgacgatgatggcaatggctcagcgggctgtctggaacaggagctgagtagacagctccatgccagcgtgcggaccagcaatctagagacttcactgcgcttcttggtccagggtgcagacccaaattactaccacgaggacaagctatcaacgccacttcacatggccgccaagtttggccaggcatcacaaatcgagatgctgctcatctatggagccgatgtgaatgccttggatggcaatgggatgactcctctggaactggccagggccaacaatcataacaccatcgccgaaagactgcttgatgccatgtacgatgtcaccgacaggatcattaccttcctaggtggcaagaagccagatcatgcgagtggccgccacatgattattccggatgccaatggcgcggacataagcgagcaactgaagattgcacgtggaaagttgcaactcgtgccaaataagatgtttgaggagctggtcatggacctatacgatgaggtggacagacgcgagtgcgaagccatctggtcgacaagcaccctgaatgctgatcatgcaactgtgccatttttgccggctaatccatttttgagcgccacgcgcaatcagggtcgtcagaaattggcacgcttcaatcgcgccgagttcactggtctcttgaccgacgtgctcgtcgatgctatgcgacgccagaatatggccaacctgcgtccaatggatgccccagtggccgggcaccagtcgctgcaatcgctgccgtatgccaacaactcaatgctgctcggctcgttcgagcagggcggtcatgatccgaatctgtcggacgacgagcccatttatgatccggtggccagcgatgacgactatgccccagtgccaccaatggcccagcaggccattgtgcatacgccaccgcgcagcgcgaattcgcacaacgaaatggaaacgctgcgcaaacagctgaacgattacaaatcggagatcaatcagctaaagaacgtggtgcagatgctgtccagcgagaacacgcagctcaagtccaagttctcgagcgcatcgaacaacagcgtgtacgatgagccacttcgcattgatctgagcttgagcagtccggatacagagcacgagcctctgtcgctacccgaaggtgggactgccaatggggaaagcggctcctccaatgattcgtcaaatcaatcgaccatcaagcgtccagccagcatgtacgagcgtcgtttggtacccaatgtggccaagggcaatacggacatacgaaatacgaccagcatgtaccaaatggctggggatggcaaaccttttggtgaggaggtcaaagtgcgctctgacttggtcacacgccgtcttaaggagctcataagagctatgcagccagtgccagaggatcaaaagcagtcgattgctccacatggagagcttatacgaagtgccgtgactgatttaattgccctttatgccaatttgccaccgaatgccagtgacccgtctcgcgaaacccttaaactgctaacccgccagaacattctcatccagcacgagtgcgagaatctgcagaaagccatcgaggcggatgacaagcaggccatacagaagaacaccttggaggtgcgcgactgcgccttccacattgccagtgccataaagactttggtgttgcagttctattga

SEQ ID NO: 24786 - protein, 695 aa, DROSOPHILA
MPRGKSRLQTEVCGDCGAGDPSWASINRGILLCADCCSVHRSLGRHISIVKSLRQGNWEPSVLNFVNSLNAHGANSVWEHHLLDGSTNSTGGKHVPRWRKPTPKDALHPTKSDFIKAKHVNLTFVLKPSLQDDDDGNGSAGCLEQELSRQLHASVRTSNLETSLRFLVQGADPNYYHEDKLSTPLHMAAKFGQASQIEMLLIYGADVNALDGNGMTPLELARANNHNTIAERLLDAMYDVTDRIITFLGGKKPDHASGRHMIIPDANGADISEQLKIARGKLQLVPNKMFEELVMDLYDEVDRRECEAIWSTSTLNADHATVPFLPANPFLSATRNQGRQKLARFNRAEFTGLLTDVLVDAMRRQNMANLRPMDAPVAGHQSLQSLPYANNSMLLGSFEQGGHDPNLSDDEPIYDPVASDDDYAPVPPMAQQAIVHTPPRSANSHNEMETLRKQLNDYKSEINQLKNVVQMLSSENTQLKSKFSSASNNSVYDEPLRIDLSLSSPDTEHEPLSLPEGGTANGESGSSNDSSNQSTIKRPASMYERRLVPNVAKGNTDIRNTTSMYQMAGDGKPFGEEVKVRSDLVTRRLKELIRAMQPVPEDQKQSIAPHGELIRSAVTDLIALYANLPPNASDPSRETLKLLTRQNILIQHECENLQKAIEADDKQAIQKNTLEVRDCAFHIASAIKTLVLQFY

SEQ ID NO: 24787 - DNA, 2899 bp, DROSOPHILA
gagcagccgacagcgagagaaactcacatcgccgatgctggacagcatttggggcgaatttccggacgagcagccagtgcgcaacatcggtcagctgaacgaaccgccagagtttattctggacttggtcacagtagtgcggattattgatgttgcgcttaccctcaatcgggactttgatgaatcgtctgagagttccctgatgttcctgccggaggccgacgaaaccgtgctattccgcaccatatgtgtggccaattcgccgacgccaacgcagagccatctattggagccagtggatgagctattggaggcggacaccacaacgttgacgcccgtcgagcaaaactggtgtgtgcagccaggtttgctggaattcggagtgggctgttcgccactggccactttgtccgtaaccaacagcttctgctccaggcagctcatcgaggtcacatgcaatgtgcccgatttggtgcgaatcagtcccagtgagtgctacgtatccccggatggcggccacgcggagatcgatgtgcgcctgctccgctcacccaggcaggatttgctcgaaagggagccgctcattgtggtctccatggaaaacgagcgcatcagtgtcccgattagttttaaattttaaaatttgttttatttgtgcctgctaattctgctttccctatgtttgtgtagttagtttaaacaaaaattgtattgtgtacttgtgaaatgaaaccgtgtttgcagagtatttgtaaggaaaacgcataaccctaaagttaaaatactcgcttgtttcctaaaagttgaatttagcttaaataaaaactaataaagtatatgagttaattttaaattttgatatgttgctctcgaatattcaaaaagtaacgtatatgtagcgatagttcgtcgaaaagtgagttggcgggcacattgcaaggtgcaagccgagtacggtcacactgaggaaagtgcatcatttaatttccagcattttccgatgaaaatggatgccgacagcagtggaacccagcatcgaggtacccactatatagtataaccgatctgatcagattctgatccagtgccatctttttgttgttttttttctagtgtcatattgtgtgaaatgtgaaatggatgagaatgaacgctggacgaccagacagagaaagagaagctaggacaataggactctcaactgcgcattacgtggattccgtctccgacgatgcgccaaacactatgcgttagatgcattgactaaccgcacactcttttcacatagattcccgtggctcaaggtctcgatcccggcgagaaagagaataccatgggcgatcaagcgagagggacagcagaaagaaggagcacaagattccgtactttgcagacgaggttcgagaacaggatcggttgagaagattgcgccaaagagcgcaccaatccaccagacgcactcgctccagatccagatcacagtcgtccatcagagagagcaggcacagaaggcatcgccagcgctctaggagccgcaatcgcaaccgaagtcgcagcagtgaacgaaaacgccgtcaacatagccgaagtcgcagcagtgaacgaagacgccgtcaacggagcccgcatcggtataatcctccgccaaagatcatcaactactatgtgcaagtgccaccacaggatttctacgttagtagttatttgtattgaaacaaataacaaatctaacttaaatcgattttgcaggggatgtctggtatgcagcaaagttttggataccaaaggctaccacgtcctccgccgtttccaccggccccctacagataccgccagcgaccgccgttcattggagttccgcgatttggctacagaaacgcggggcgtcccccatattgaacatactccattcgacataattacaaatttatttacattcgtgtgttttgtacattaaaataataaatacatatatatttcaaactaaaaatggagaacataaaatattgcaaacggagaacgttgattaaatcatgagcaaatgcagcaaagaaggcggcaaaaaaagggtcacacgagttaggaagtggaagttacttaattctaggagggataaccatatatttacgactttatacatgcacatttacacatacactcatggtttcgaggggactaacactagcgactctcctaattacgatatttacgcattgtcaataaattataaaaatagatcatttgttgtggcattatactaaaacagtggttagagctcgacccgcggacgaaactgcagccgaagcggcggatcccggaagcgccagcgcgtcacgtagacgaacttcagcgtgtgatccttgccgagcagctcctcgttgcacagtatgtcgatctgaaagataagatacgtagttatcatataagtatgtgccatgtatacaagtaactaagccagtctgagctttcactgagagcagttactgttccgaaacttggctttcgcctctcacctctctgtacttttcgatgccgttgaggatcttcttggccaccagcttcttgagatgcgttatcgtcgcctgcgagctgcagcgaatgaatcgcctctgcaggttcttgaagttattgctaatgcactccaggcacacgttcacctgctcgtccaggcgatggaagtcggactcggcgtgggcgtccatcaccttctcgttgtcgtcctcgtggttctgcgtgatatccttgggacacggcatgttcctgctcttgtagaagtcccgctctcggcgcgattcatctggaatgtttcgggttggagtgtgagtgagttagtagaagaaacaataataataatagcacgctcaagacaaccttcttgcagtttcggcaccagtttgta

SEQ ID NO: 24788 - DNA, 594 bp, DROSOPHILA
atgaaaatggatgccgacagcagtggaacccagcatcgagattcccgtggctcaaggtctcgatcccggcgagaaagagaataccatgggcgatcaagcgagagggacagcagaaagaaggagcacaagattccgtactttgcagacgaggttcgagaacaggatcggttgagaagattgcgccaaagagcgcaccaatccaccagacgcactcgctccagatccagatcacagtcgtccatcagagagagcaggcacagaaggcatcgccagcgctctaggagccgcaatcgcaaccgaagtcgcagcagtgaacgaaaacgccgtcaacatagccgaagtcgcagcagtgaacgaagacgccgtcaacggagcccgcatcggtataatcctccgccaaagatcatcaactactatgtgcaagtgccaccacaggatttctacgggatgtctggtatgcagcaaagttttggataccaaaggctaccacgtcctccgccgtttccaccggccccctacagataccgccagcgaccgccgttcattggagttccgcgatttggctacagaaacgcggggcgtcccccatattga

SEQ ID NO: 24789 - protein, 197 aa, DROSOPHILA
MKMDADSSGTQHRDSRGSRSRSRREREYHGRSSERDSRKKEHKIPYFADEVREQDRLRRLRQRAHQSTRRTRSRSRSQSSIRESRHRRHRQRSRSRNRNRSRSSERKRRQHSRSRSSERRRRQRSPHRYNPPPKIINYYVQVPPQDFYGMSGMQQSFGYQRLPRPPPFPPAPYRYRQRPPFIGVPRFGYRNAGRPPY

SEQ ID NO: 24790 - DNA, 3149 bp, DROSOPHILA
gtccacgtgccaggcggtggattcgatgtttctttttatttttttcgtcctgtttgtgtccagaaaaaatatttgtcttggcttacgggtcggtgaaatgcccttttgttttttagtcatccttgtttacacaattttttgagcgaaagtgaaaatgttcccttaagttttgcaacgcagtttattacggattacgcaaataagctgaaatacgattataaatggaaattgtttccatattcttgaatgcaaaactggattgtaaaatacaaatagctttcaatcgatgctgagttaggaatacttctcatttagtctctttataagagcatttgtatcttcgacttttccgcagtttttatctggtttaaacgtcttgacatttttggcttttcgctattattctttttttttttggcctgttgtttgacccgttcgttagccaatttgtggggccttttctgtttcgccaatgaatgcttaatttgcctggttaacccacacagcggttggctattcgtctttcggaacccaattaattgactaattgctctagttttggccaaattagtgggcacttcgtcctgcgggccggcgcatgatcggcatatcttagcggtatttattgcgactaattgacagagtgtcaataccaagttgaggaaaagtgacgaaggattcgaaagagctccggagctgtcaagtcggagtttgcccggaaaacatctgtaaatgcctttgacagtttcttcagattatcccttgtcctctaaacttctgcttatcattttcccggaaaactttcactcacccaaatcgaatgcttaaacatattttttgttgaatatttgacaacaatgtagctggccatttggcaaggcgaaacctacaatgccactcaatttgaatagcaatacatatctagactagtggcagacaaaaaaaaatataataaaataaaaaatataataaaacaaataccaggatttccacgtgtgggttacctttggtaaagccaaatattggtgcgggaaatggtagataaatttccgttgtgccgctggttgctagtggcaacccaaatgaaaaattcagggaactgtaagaatgcgttagatgaagtctgaatttcgatgcatgacagcatgaaattgctacaacctgagaagttttcgctttgattcagaaattgcccgaatggtttaaataactttcaaataccaatacaattttgaagctatgtgtatgtttacaccatttaagtggttagtgccttgcggcaaacgcataatttattagttgcttccactttaaactattgctcagtgaaccaatttccatttgtatggtcttcattcatatcttgctgaaatcttttcaaagaatatatacgcaaattgagataaatttcaaattttatgggtgaatgggtatgaacaacgcgtacagtataaattacgcaaaacaatagactaatagcatttctgagcacactcactttgtattccgagttgagatcgcaaatggtcgtgttcaatttgggcataaacaccggcttggcaatgactatatagggcagacagtgcagacatcccacgagtgtcaaacaaaacaggacgatcttggcccggcgcacggtgcacatggtctggcgcttcagtggatagatgacggcaatgaagcgctccacggtgaaggccaccacaaaccagacggagcagaagctggccaggtagctgaagaacgtgaagaactggcaaaagtagttttgattatagatatccacattgaggaagttcagccactgtgcgaagagtccggccaggaagcaggtgtcgctcactgcgagagcggccaggtaaaagctggaggacaactttctcaacttggtcctaaagaagacaaacacggagaggatattgccaatgctgcccgtgcagcaaagcactggtatatagtattgatgcacgaagtgccctataaaaaaggctatccttagcatctcctcatcctcgccagctgattcattcgcgtccatttccgttgtattgtattccgtgacattggattcgcccaaagatgaactgaaatctgcttctgtagtggcagttatgttgccactactgctagttatatactccatatccatgcttaatgcaatgcaatagtcctttgttggttagttgcttttattttgagatatttccggaacagtttgtattccacttggacacgctcattactgcactgctctatttattttgcttttaattgaagaaggtcaaaggcaaaaactatttgcatttcctcggacatatgtttgtccattgcaattgattggccaatcaaactaattcacttggcactttcacacgaatttctgtttccgcttaacttaatcttaattaagaaatttttaactttcaaactttgtgccaaacttttctttcggcaaacttgttgaaacttccgattgctgttcgcctatgtgttataagttcattatcggccaaacattttttccacacagttcgtaatgatgtaaacaaagaagaaacgccaggtaaaatcataaaaaaaaaacttttgccacacacaaaaagttcttgttttcctcaaaaaacttctgagggttcttgttttcacaaagcacaatttatttgcagtctagttttatttttgaattgaatttttttttgcgcaagccatagacattcttcgatattttttcaattaattgataattctcggaatcgaatgcgtgtgtttatattcgggattcgctgtctttcaaacgctctgttgagtttggcggccaattgggctgttgattccttgccggttcgtccaaccagcaggacaatgagcgcgcaactaagccgagacaatggacgtggcagccttttaaactgctttcgattgactcttggaaggcgccaagtgaaagctttttagctcgaccactgcgccggcgcggattcattcataaaatcaacaggtgacaaggtcagggttggcaggaacagcagcagcagcagcagtggcaacaagtggtagttggtgccgtcgaaggattagcccagcaggattcgcaggaggagaacggcgccactaggtggtagacaatgggccgctaaacagccaattct

SEQ ID NO: 24791 - DNA, 750 bp, DROSOPHILA
atggatatggagtatataactagcagtagtggcaacataactgccactacagaagcagatttcagttcatctttgggcgaatccaatgtcacggaatacaatacaacggaaatggacgcgaatgaatcagctggcgaggatgaggagatgctaaggatagccttttttatagggcacttcgtgcatcaatactatataccagtgctttgctgcacgggcagcattggcaatatcctctccgtgtttgtcttctttaggaccaagttgagaaagttgtcctccagcttttacctggccgctctcgcagtgagcgacacctgcttcctggccggactcttcgcacagtggctgaacttcctcaatgtggatatctataatcaaaactacttttgccagttcttcacgttcttcagctacctggccagcttctgctccgtctggtttgtggtggccttcaccgtggagcgcttcattgccgtcatctatccactgaagcgccagaccatgtgcaccgtgcgccgggccaagatcgtcctgttttgtttgacactcgtgggatgtctgcactgtctgccctatatagtcattgccaagccggtgtttatgcccaaattgaacacgaccatttgcgatctcaactcggaatacaaattccctgaatttttcatttgggttgccactagcaaccagcggcacaacggaaatttatctaccatttcccgcaccaatatttggctttaccaaaggtaa

SEQ ID NO: 24792 - protein, 249 aa, DROSOPHILA
MDMEYITSSSGNITATTEADFSSSLGESNVTEYNTTEMDANESAGEDEEMLRIAFFIGHFVHQYYIPVLCCTGSIGNILSVFVFFRTKLRKLSSSFYLAALAVSDTCFLAGLFAQWLNFLNVDIYNQNYFCQFFTFFSYLASFCSVWFVVAFTVERFIAVIYPLKRQTMCTVRRAKIVLFCLTLVGCLHCLPYIVIAKPVFMPKLNTTICDLNSEYKFPEFFIWVATSNQRHNGNLSTISRTNIWLYQR

SEQ ID NO: 24793 - DNA, 4775 bp, DROSOPHILA
attttatcaagcttaacgtgtagtctataggattatctatggtatttcgtaaataaatatctcgctgttttatttccgatattccgatttataagccacgtaaagtaagccgttaagcttatcaggtgttgaaattactgcactcgcatgacaatactaacaatcgattacctcgactttcagattcccgttactcacactcgcaggcagcaaagcgaacgttttctaaagtgcacacaggctccacctagcgaagcttgacagccgacaactgatgtgtgcacgcaagcggacggagggcaatctttgccgtcgccataaaagtggctgcagtgcaaaccaatgtatggccgttacgcatctcgttgttctagtgtctttcataaaacccatataatattgtagatccactttatatttggtttatcggcttggaatacgtaattgaatttaaatgatatcgccattaaatcatttcaataacgtcataagtcagacattaataaatatcgcataaatttcctcataaagtcaaaactctcgactatctctacatttttgtaattgactcacgcgcaattgctacagttactgaatgcacttaaaagcagttgctttttaaaaacagttgctttttgaaaacagttccttgttgaaaacagttgcttttcaaagtctgagaaacaatgttcctcgtacaggaaactggttctttaatggtgatcctcatttgttgtctgatggctcatttagcttatgcttgtagatcgggtaagaacattaaagagcttggaaattgtgttataagttgactagtgagttgtgaaggaagattaaaacaatttatgaacacactatgaacactctctacttttcaatagataaactgtgtgaaccggatgaggagtgcatccgacttaaggattgccgacccatatattacaatgtgaggagaaacagattgtcggggtccgcaaaagtgaatatatcgcagacaagaatgtgtggcgtgagtgttcgagaccggaaacgttacaaaaggatttatatctgctgtcccaagccggcaaacaccttgccaagctatccggattgtgggaagccacaaacgactaaccgtgttataggcggcacggagccgaatctcaacgaatatccgtggctggccatgcttctatatcgaaatcgtagtgccttcaacccggatcgggagctagtccccagttgtggtggctccctgattaacactcgctatgtcctgaccgcagcccactgtgtaaccgatacggtcttgcaaatccaacgcgtccgcctgggcgagcacacaacgtcccataacccggactgcatcagccggggcgcacgaatcgtttgcgctcccacacatctggacatcgacgtggagtcgatcacatcgcataatgactacgatccagccaattacacctttcggaacgacatcgccctggtgcgactcaaagagccagtgcggtgagtcagcacgtcgcaaacgacctattactatctactaacatgtttgtctgtatccatcagatatacgatggcttactatccgatttgcgttctggactacccaaggtcactgatgaaattcaagatgtacgtggctggatggggaaaaacgggcatgttcgacactgggagcaaggtgctgaaacacgctgccgtcaaggtaaggaaaccagaagagtgctcggaaaagtacgcacaccggcatttcgggcccagattccagatatgcgccggcggcttggataaccggggcacctgcgacggcgactccggcagtccattgatgggcacatcgggtcgcagctacgagacaatcacgttcctggccggcatcacttcatacggaggtccttgcggcacgattggctggccgagtgttttcacacgaacggcgaagttttacaaatggatacgggcacacttaaggccctagaaactgttgaacatactaatataatgttgaccaaatatatatacaccaaaatataagatgaaaattgcattttccctatagtagatacaactgatattccaattgaaagatagtaatgcatgcagaagctatggagtttactggtccaataggataggatttcttatttaagtctagttcgctggagatttataagaagatctgagaaagtagcccagcgcacagattgagtaatgctgaatatgaataaaaatgcaattagtacgattgataaccaatatgcatctggaaagtttcagtcgaattgatttttaaatactttcgtagaatctaacatctgaacaagctgcatacatatacactctcgtatgtgtgacgtaattttcgggaattccattcggatacgttatcaaataactttggcaacattcgaaatgccataaccacaaaaagttgaggggataagttagttacaattgaaatctttacggctcaacatgttcatttcatgcattccgttcgcactcgtagtagtattcattcaattggcccattcaacgaattctggtaattagcgtgcggaataaaattgaatacgactgtgaatagtataactgtttggtgtgaatcataatcaggaatttatttattgtttttaaatatattacaataataatataaaaaaaaggttatcaaagcgttcaatctatgattaatctgcgattctagactgctatccgggtgagaagtacgtttacctgtatgagtgcccccatgtatataccgctggcaggtccaggactttgatgagggagtatgacatggatgcctggttgttgttcggccagaggatctgctgccctccgcctggcaataggctcccaagcacagagatttgcggccaaagtctatctacataccgaatggtgggtggttcggaggcgcgtccaaacggatacccctggatggccatgctcctgtacctgaatacaaccaccttggagatcttacccttttgcgcgggctccttgatcaacaaccgctatgtcctgacctcagcccactgtgtaaatggaattccacgtgacttgtcgctgaaaagcgttcgtcttggcgagcatgacatcacctatgatccagcctacaatccggactgcagggaccaggataaccaatgtgcccttccaaatctggagatcaaattggagaagatcatagtgcatgggctattcagtagcattagcaataggaacatcgaatacgatatcgccctcttacgactcaaaatgccagtgcggtgagtaatgctttcacagaaaatatccgttgatttccgttgccgaaaagttcttgcaaattcgttcagattcataatgctcatagatatttttttggtgtttcttttccagctataggacaggaatcatgccaatatgtattccaaagcacggctttttcgcgaaatccaaacttgaaatagccggatggggcaaaacaaatgagggccaatttagccaagtactgatgcacggattcatccgggaaaggtcaatcgcagtgtgcgcattaaggtttccgtatctggacctcaaccaaagcctccaaatctgtgccggcggctacgatggcgtcgatacctgccaaggggattccggtggaccgctgatggtaacgatggacaatagtagtgtttacttggctggcatcaccacctatggcagtaaaaattgcggccagattggcattcctggaatttacaccagaaccagtgcattcctgccatggataaaggcggtattgaggccctgaatgtcggcagcaatgctaagacagcttaaagtggattagttttatttttgtcaaaagaactcgtaaaatatacacaaatacacgcaggtaaatactgttacgattacaagaaaccccacaacacgcaaatgacgataaattacaatagtgactgttgacagagacattgagagaaagagataggctggcgcgggtagttccggctgcggtggccaaaaggacccaatcctccggcgccgaatcctccgcggtcagcgattagcgattagctaagtttagtggttggcatagaagccatgtcccgagttacccataaactccgtccagcgctgcgactccaccggatccagctccgagcaaacctcgcccggccgcagggagcgacaggtgcaggtgatcccgatgcgggtcaccaccagctgcgactcgaacttgggtagggtgggctccgcgtccaccagacgctcgctgaggcactgcttcaggaactgtttgcgcagcacgcgtaagttgtctatggtgtagcctggggatcgcagatatcagtggattagattaggtcatagaatctaaactaactttaagaccgcgtagacttggagtacttactcttgtacgcactgactttctcctcgacgcagctgagatcctgcggagagaagagtggcggataggcctccgattctcggatgttgaggacgaaggcaaagtccagcgaggagctgacattgcccagagctttcagcaaaacgccggtggatgagatggaagccaagtaccagtcagctcctacggaggactcctcaacaccagcggaatcctcggacgctgttgtcgtgattccggaagcactctcgcgtcttttgcgacgtttcttctgttttttgttttcctcctgggcgtccgcagctcgctcccgcgcctcgttgtccagctccagatcccacaggctcagcggggactgagctgacatgggttgtccggtggagctgggggtggc

SEQ ID NO: 24794 - DNA, 1812 bp, DROSOPHILA
atgtgtggcgtgagtgttcgagaccggaaacgttacaaaaggatttatatctgctgtcccaagccggcaaacaccttgccaagctatccggattgtgggaagccacaaacgactaaccgtgttataggcggcacggagccgaatctcaacgaatatccgtggctggccatgcttctatatcgaaatcgtagtgccttcaacccggatcgggagctagtccccagttgtggtggctccctgattaacactcgctatgtcctgaccgcagcccactgtgtaaccgatacggtcttgcaaatccaacgcgtccgcctgggcgagcacacaacgtcccataacccggactgcatcagccggggcgcacgaatcgtttgcgctcccacacatctggacatcgacgtggagtcgatcacatcgcataatgactacgatccagccaattacacctttcggaacgacatcgccctggtgcgactcaaagagccagtgcgatatacgatggcttactatccgatttgcgttctggactacccaaggtcactgatgaaattcaagatgtacgtggctggatggggaaaaacgggcatgttcgacactgggagcaaggtgctgaaacacgctgccgtcaaggtaaggaaaccagaagagtgctcggaaaagtacgcacaccggcatttcgggcccagattccagatatgcgccggcggcttggataaccggggcacctgcgacggcgactccggcagtccattgatgggcacatcgggtcgcagctacgagacaatcacgttcctggccggcatcacttcatacggaggtccttgcggcacgattggctggccgaactgctatccgggtgagaagtacgtttacctgtatgagtgcccccatgtatataccgctggcaggtccaggactttgatgagggagtatgacatggatgcctggttgttgttcggccagaggatctgctgccctccgcctggcaataggctcccaagcacagagatttgcggccaaagtctatctacataccgaatggtgggtggttcggaggcgcgtccaaacggatacccctggatggccatgctcctgtacctgaatacaaccaccttggagatcttacccttttgcgcgggctccttgatcaacaaccgctatgtcctgacctcagcccactgtgtaaatggaattccacgtgacttgtcgctgaaaagcgttcgtcttggcgagcatgacatcacctatgatccagcctacaatccggactgcagggaccaggataaccaatgtgcccttccaaatctggagatcaaattggagaagatcatagtgcatgggctattcagtagcattagcaataggaacatcgaatacgatatcgccctcttacgactcaaaatgccagtgcgctataggacaggaatcatgccaatatgtattccaaagcacggctttttcgcgaaatccaaacttgaaatagccggatggggcaaaacaaatgagggccaatttagccaagtactgatgcacggattcatccgggaaaggtcaatcgcagtgtgcgcattaaggtttccgtatctggacctcaaccaaagcctccaaatctgtgccggcggctacgatggcgtcgatacctgccaaggggattccggtggaccgctgatggtaacgatggacaatagtagtgtttacttggctggcatcaccacctatggcagtaaaaattgcggccagattggcattcctggaatttacaccagaaccagtgcattcctgccatggataaaggcggtattgaggccctga

SEQ ID NO: 24795 - protein, 603 aa, DROSOPHILA
MCGVSVRDRKRYKRIYICCPKPANTLPSYPDCGKPQTTNRVIGGTEPNLNEYPWLAMLLYRNRSAFNPDRELVPSCGGSLINTRYVLTAAHCVTDTVLQIQRVRLGEHTTSHNPDCISRGARIVCAPTHLDIDVESITSHNDYDPANYTFRNDIALVRLKEPVRYTMAYYPICVLDYPRSLMKFKMYVAGWGKTGMFDTGSKVLKHAAVKVRKPEECSEKYAHRHFGPRFQICAGGLDNRGTCDGDSGSPLMGTSGRSYETITFLAGITSYGGPCGTIGWPNCYPGEKYVYLYECPHVYTAGRSRTLMREYDMDAWLLFGQRICCPPPGNRLPSTEICGQSLSTYRMVGGSEARPNGYPWMAMLLYLNTTTLEILPFCAGSLINNRYVLTSAHCVNGIPRDLSLKSVRLGEHDITYDPAYNPDCRDQDNQCALPNLEIKLEKIIVHGLFSSISNRNIEYDIALLRLKMPVRYRTGIMPICIPKHGFFAKSKLEIAGWGKTNEGQFSQVLMHGFIRERSIAVCALRFPYLDLNQSLQICAGGYDGVDTCQGDSGGPLMVTMDNSSVYLAGITTYGSKNCGQIGIPGIYTRTSAFLPWIKAVLRP

SEQ ID NO: 24796 - DNA, 14103 bp, DROSOPHILA
ttcccaattccttcgaggtgatggcaccttcgttatccttatccaataagctatagatattcttgagcaggtcctgctcttcaacagacaattcatccattatgctttatattatgggaaggagaatattattattatgctagtagatatactttttcgataggattgatactcagttgaggtctgataagctttgaaggagttctacgattgaaaattgttattcaaaacattcaatataaatatttttgaaaaaagccaactaagagttagccttcggtctttaacagatattaaacaatctgcgtgctccatgaagttcataaacttttactgaagataaaggcattaaaagagcattctcacgcacagtttggcaaacaaatcacgtgctttcctggacccaaatgatatcatctggcggagaaactctttggctttacgcgtattattttatagttgaaccagaaattgatgtcatcggtggcggtaaaaaatgggcgcccaatccgcccaatgaggaaattccaggaagccgggcaactccaactgtcggtgatgacaatttgcgtggcattttaattgaactttctacgtgttcgagtggtgtactttgatttgatccccatccaccgatttttcgtcgatttgagtcaatgttaaaggcgttgccacaaaccgcaaactgtcgtgtctaggaggttggggaggggcttggtggctggggcctcgaaacgtgcctgaagtattattaccgccgtctgtgattgatggcctcatgcgagtgagtcagtggatttttataactctacgcagatcccttcctttcaatcaagcggcaaaaaatctggacatcgatctcgccgatattagctaacttcatttcaacttaactgcccggagtgctttgaataaagtggatttgaggcgatgccttgggattcttggccagattaagtcgattttttttttttacttcaatgaaaaaaatggcacgcaattgtttttcattattaatgcatactttatttgaaatcaactaactcgctatggtttgaataaaatcatttaaaattgaaggaagaccatggaattctatgggttgcttatattaactactgcaaaactcttaaaatttaagcctaattacataaggttctactggaatgttgcttgtagttggatttttgtttatgctctgctttacactaacttttactttcaaccatttttttccctacagcaaaatcgattaacgattttgtttactcattaagattagcttaccggataaggaaacataaataaaaaattggaattcactcagcaaacagcaacacttagtgttgggccacacattaaaaactaatcgatagactctcgtactaaaggcttaaacatttaaatcggtagatttaagctaaaatcctaacgcataagagctctataaaatgcaacaacggagtttgtttcgcttacaattatcgcttaactgattttattacttagtttaggtctattgccttgcctagacattgtactaaaaagtattaaattgtagatctaaatttattttaatgtacttgtgggtctaaaacgataaatcctcgtttaaccattgggaacaataactgtttgtcattatgatattcaactgttcataagaccttctaaatgaaataccagaaaaaacaaccgagatatatatttattaggaatactactactttttgatatttcaaattcgtaagagctttgataaatagttttccaaattgtgttgtttttctattccgattttacctccattaatggattgttttctagttctttctcggtttacttctaacgcctcattatgtcctcaatgctgaaccctgttcttctcggtggtgcaggcggtggtgctatgggcggtgctgccactggtggtcccttttcggtggtggctccacttgtttccgtactcggtggttttcccagaagctgtctggggggatgtcgcgacatattcaaagcatatatgctgggactatccacaaaggtcctttgacccaatccaggatggtggtgcggatccatcaagtccaaggtcggtgccggaagaatcctctttcgcatgggtatcgatcccaggaagctgggcatagcttcatgcggtgaatgcaaaggttgattgggtggtttacccgactccggctgggttattatagtgggtggtgtatgtggtggcggtggaacaccagccttcgaaaggttcaagctcttgtggtgcaagtcgcgtcgaacgtgcagaatgggcaaatagggatccccgttgggtgggagtaagtgtggatgtcctgggtgctggtgggttggcggaggagctccaggtggtgcaggcggcggtccagctgccccaggtggtacagaatatcgcacaaaggaaggtggaacgggtaggctggcaatgccagagttcccgggttcctcctgatgtttctcgccatgtggccgcattgtgtaggtttcaccaccctcatgatgacagtgggtgactccctggcgttccggcttggtgcccactgacgacgatgattgcgatgtggcggcagccttactcgcctggaaacgcgccactagtgccacttctgcctgctcctcgtcctcgggatcaaagtcgtcgtcctcttccctgggcaaatcgtgtactcttggcagatcctgcagttcctcttcctcgtcgaagtcatcgaactcctcttcgctttcctcatgatcgatggctgccttgcgcttgagtctcattctttcggactcagatttctcacccgatcctccagactcgcccaaattgtgaactggcgactggcgaggcgagtccacttccagcaacgaatcctcctcgtcgccacttaaatttctggcctcatcctcttcgcccacatccacatagtccccggagttgacctcacccactgcatgggtcaaggcatggcgtcgtagatcgcagttacggcggaaaactttgccgcatgaagagcactcgtagggcttgtgatccgtgtgggtgagcagatgggtcttcaggttggagcgctgattgaatgatcgactgcagacggggcacttgtggggtgattcctccatgtgcaggatcttgtggacagccaaggttctcgattggcagaatcccttgccgcattccgtgcatttgaagggtttctccttggagtgaatatacctgggcgaatacaagtggagaaacaattagactttattgttatagcgtgggcgttttcctggtagctgcaattggtagcccaggttgacagttatctctgctcaaatgcagccttaacttgaaccgataaagctcactgatatacagctttacaatactctaactaaggatataactggctagagcagacaatagaataaataatataatactatagcatataatacctatctttctctttcaaaatgaaacctaacctggatttgttttaaccttaaacccaattctttaaagtttttcattaaagaaatcctatgattttgtatcctcttaactgatagggtatttaactttcgtgtatgcgatctggctgcattaattttttatgtttatggcggccatcttggcaatggcgtccacttgctgttggatagcagcagccacagttaaaagttaaagtccccatcttcgacggagccacagattcagcatcgcatcggaggcagcagctgctggtggaaaaaaaaaaataaatgtataaaaacccaaaacaggttctgcctccgaagcaccgagattcttctcccatgctccgtgcgtttctggtaaaaaaaaaatacaaaaaacttaagaagaattagccccgcggcaaagcaaacaaacgacaaatggaccgataccgaacgatcaaaagacagaacgctcggacaggccgacacattgaagccgggatgctggacctgctgcctggcatcggcatgggcatcggcaccgggatacacagacccgatatatagcccccaaccccttggccatccctcaattttaatgctggtggaggagccccaaaggaaaaccaacagagttaattaactttgtgttgtactctgcggccgagttgaagttttactggccgtcagaggagctctgattttgggtccgctttatggggacttacttatttgagttgaggtaggaaaattcgtcgtaaagtttaaacatttcctggaaaattccttatggtaaaaggggtcttttgaagcgattgtctgatatatctaaaatcaataaaactccatctacgagtagtggtcgcctttcccttttggccgagattactgtcacacctgttcagaatgtgtgtataaactgcctagtaagcaataaattacattgatctaattatcctttgcctttacagggtattccattattcgccattcgttcacactttgagcacaaagaataactccaggcctgatggcaattacccgagcagacactgcccccttttgtgattacttgtaccccaacctcgactcacctgtgatccctcaggtgatcctgtcgccggaacgccttgccgcagatatcacaggaatagggccgctcgtccgtgtgtgtcctctcgtggatgagcagattgtacgacttggtgaattgtcgattgcagaacttgcagatgaactgttttttaggccgcgatgcccgaccaggagcacgtagcaggcgcctatcgagtccggcatgcattccaggacccaggccaggtggaaatagagctgcggcggcggctcctggtggaaatggaaaacttccggctcccgtgggcgatggacccggtccggtgagatatggcggaggtggcacgccagctggtccgtacaacactccaggcggtggcacaccaggaccgccgggtcctccaggacctcgtcctaacattgccgccgccgcagccgcctcccttagggccaactcctttcgcttgtccgccatcatggcaatgatttcgtaattggaattactacccgggcgcacctttccggtgggcagaaccggcacaaaggcagagatctcgcgatgatgcgatggtggtggcggtggcggcggaccatgcagtccggccaaatgctgctgataggccagctgtgtttcatacgctgagatccggctggccgatgagttgcgcgaatcgccgttgccattctgggagccaccatccgatcctccggatccgccgttcctatccgccgcaccaggaagaccgccaccacccaccgccgccgctgccgccgccatcgagttcatgaactgatccatccgggaaggtcgcagcatgggtatcgcaccgcctcctccgccggagatctcgctggatgagctttccgtgggcattatattggaggggctcttcacattccgttggaactgccggagatagggatagaacagaaaaagccgaaaataaaataagggtagtggtaaataacaattagtacacgattgtgctgggttaattgggctctcgtttttttttcgaggcttatcttaattgcgaaccgagtgcaataaacagatatttccacgttgtattctttattgctcctagggtagtactgggtatgataaaaactgacgcaaactggtttaaaatagatatattactattaacttagtttcttcttggtgggaagtttccttgtaattgaaatattcatgatcttggtttggcaaggcacaggaatatatacaatatatactatagaatatttactctttttatctcaaccggttgtaactcactttttagatgtgaaattcttcaaatttgctttttgcacttcttatcacaaaattaaacagctttatgggcaattaacttgcaaatagccaaggattatcacattagctgatctttcagaatttatccacgtgaacgtgatttagtagtcacaaaaaaaaaaataatgaagaaaatatttttctcgaaaataacccatacgattctgagaacgttttggtatcacagtacgtatattttcacagggtaactaagcagtttatcacattatggccctcgtctatgggtttgttgctgtgttttttccataggaattttattattattgttggtttattattatcagcggcggactgccgacgacggcgagtgaaactaaactgaaaacgagtcgcagtttggcaccgcgatcggttgcttccagtgcgcaggttagataagattgtgcgtctaaaaaaacctgcctccgaacctctgagactgagtaagcagcacagtagtaacgatataaacacacacacacacacacagttatattatatatgtgcctgtgatatatggcatatcggcagataccccggcacactcagatacagatacaaagatacagatacagaggcaggcagccaagttgccgtcggttttggtaaatgactcgaaccgaactcgaccgactgcttactggatttacgcaacaggagcctcgacttctgagtgcctcgaaagaagaaggggcagaggcaggggcaggggcaggggatcgggtcccggaacgtgatcatcacgataataacaaaataatgcacataataatgatcacaatgatggccggaccataaagtttgtggccccatattgcaaacgcttctggctgccatcttcccaacgccttgcacagcaaaaaaaatggcaccaattttgtacccaattctatggaattctattttaagatctatcttttacgataagattatatttgttataatattaaagaatttatagtaatatgctttaaaatttgtggctcgcaaagagtgcgccccagagagcaaagtttcctcagtaagtcaaccttttttttcggtgtactatcctcatttaaatgtacaaccagttgaaaaaaaaaatgctttaaaaataacccagctgtcggtgcaatgacagttttgcttatcattttgctagaatcgttctcgctgtctcggttgattttaatgcaaaatgctgcaacgtcattaagaccaacattaacattcggctaacaacaagtgaagtgatcgtcatagttggttaaaaatgagcttagccaagttttttggagaggcgcccattgttgaagttaccgttctttccgtacggatgactagtcattgtggtggtctcttatctatggaaattattttggcattgtctggctggagagtgcgctgtcagattagctctataaagtagctgaaatcatgacttgatcatgagtgtatcattgttatgggggaatgactctacggaccacgtatagttcaagtggatgagatataagcaggtcccaattattaattcaaatagctgttagatgtgggtaggtcttatcgtgctatcatatcagcgagtctttagtagacaacggagcacgcagttaagatattaggcaaatagatgatctaattgtaatatttacactagaaatgcttacgaaagccatatcgaagcgtttttgtttccctaatacgactagcacatgccaaactaatctccacgtttattagatagtaattggataattctttcagttcaataccttttaactctcacccatgcgagttctcgtgccctcactgataatctgtcgcagtctatctatattcgattcaataaagaacttatctgatctaataagtcccccaacttagggaacctttgctgtagatgagcgatggccccgccatgcctcattcgattacgatcccgataatcccattccaatttgggctcacgtatttctggtagcctcgaaaaaaaaaaaaaactgaagtgtaacccgttttgggtatttatatatatttttttcgatttcagtactttttctagggattgtttccacacttttgcatttacgaccgctttggacccacgtttcaccccataccctgtgcacatacaatgtacaattcagcgttcattatcttttttgaaacatcggcacttttgaaaacgtcaagccaaataagaaaaacaaataaaattcatgtaaataatggacatcatcagcaaaagcgacggcacgtagactgccgtagaaatattgagagagagttgtgcgcacagatacagatacagatgcggagatacaaagatactcgtactcaaagatccacagatacgtttgcgcaaacggttgcccagtaaatgaagccaaaggcttaaagtttccaatatgtgtgcgtctgaaggtgcactggaaaaattattgtgcactcttgtgaattatttaatattaaaaaaaagagtatatcaaataattctgaatatatagggaaatgaacaaaaaataattagtacgtacttttttatgtaatattgaaatgtgcatatttaattagagaggtaatattaatatcttttctttctctgtatcgtacatataataaaaagagccagaagaccaactactgctgggaggaaaataaaagatatcgaggagcaatttggctgccacttttttccctcctcttctttttgagccgtcttgcttcttttccttggatttctgggtccgggatcggttcgtttgctgggtttttgtgtgtaaacaactgaggccagcagaaacccagggcccagcagagtgaaaaggttttagttgataaaaaaaaaaaacagaaaaatatacaaacacacacagacacacactgagcaaacggatttagtatttgtatagaaaacgcagagagctgaggaggcgagtttgtccctctgatgatggcctacgatggctggaaatgtccatgcgtcttactgcccagtgattatgtattgaaaggggtatatcaggatttcccgaccaagccattatataacctttaatatcttagaaggatctgtgtatttacagaaaacagaatgttgctcaatgacaagaaaaaaataattttgaattaaattatcatttaacgttatatgaatcagtaagatcaatcccatgttacctactaaccggagctcaactattttaaaggttcttagcaatggtttttgaaatagggaccgttagctagaaatacctaccacaattttaaggccgaggtacacccgcggtctatcagtaaaccttttatttcggaccttatcttctgggccgagtgcttaccgggcccccatatgcacttcagtttgcttacaaaacaccggccaacaacaacaaacaagccagaagatgacgacgaagaaaagtggagtggtgggaggagttccccggaggaggagaatgggtatgggtatgggtatgggtattacgggtgaaggaatggaaaaagggtcgccgagatccgctgtgcagtgcggaatgctcttggccaggctgtgtgttttaatcccttcgggatactttttcttccaccgagtgtgcatatgtttgtgtgaaggtagctaataatcaagacagcgatggagaggaggaaaaaccgacgcagacttataattatagtcgaagaggagaaccaaagagacctgcacttcacatgcgttaatctgaaaaccctttcgggcccaagcagcatctgagattatagtcaaagctattaaaaatctagcataatcattgccctcggtggaaagcaagttgcgttgttgtttttctcttttttttttttttttgctcccgaggtaggcaggcgatcttcctgcgcagccttgtctataattttcttgattaatatccatgagatttacacatttggagtgctggccagaaccctgcacctcaaccctccgccaccccccgcgttcctgtgtgtgctggccattaatttaaaaagctttgctaatttcgcggggaaatctggaaacgaacaactgctaatgaagttttatgggttcgggaatgcagctgcagcaggattgataatgtcgttagcataaattgaaaatgctttcaagttacgaccaaagatttgttatgattaaagtatggagcacgcggagtgagcaagaatatccaccaatggatttttattaaatgataaatggcgagctgcagataaccagattcctctggttgctgaaataaatatttttttttgaattgaaaccttcttaggattaactgaagttcagacagttagttcctaaaattgaattatttcggcttaactttgactctttctaatccctcttgaagtaatccactttgaatgctaagccgatcttcgtataaattctattgtcatattgtgctgctcctttcattcgaactaaatccattcaaaaatttcacccttgaatagaactcttaagatcttttgttggtcggattgctactttttcaggcaatctattgtgttataatttcaatgggtcaattcttatttattggaagagtttatgctaataagtgtagaagcactaagactatgatttattaattcaaatgcaattggattatgctaattgcacacaaatcttggtacaaattatttatatatttttttcttcgacaacttttggaacccagcccaaaactaaacatgtaaactgataatcacctttccgctgtctgatttcattgatagcattaaaaattcatattccctagacaacatctaatttccccatcaaaattgatgagttcccgttccagaacaacaataaatgaactggtctatcaggtgaattatacacacgtgccaaaacgaggcgtgtccatatagccatttcaatttaaaacccgaatatggcgatccctaacgagccattgttctgcggttttatggtaaatctaaattcatcaagtattttgtcacgattttaattaatttcgatttcaattttcctgccacaaggcaattaccagcaacattttcccctgctgctggtgcaaccgaaaaatgatagttggtggcccaagatggagaggaaaacccacccaaagaggtaaagcgtaataaacttttatggtactccctttcttatgctaaaactctttttggacacaaaaccaaatggcccataaagcaagacaatgaatatccaaaatagatctccactgaggcgaaacaaaagccaataactttatagaaccgcaaccaaaaaatacaaaaaaaaaataataataactcagactgtgagagcgcgggaggcgttctacaaaaaaaaagcttaaaaatgaaggaaaaagtaaagcatttaaaagaaatcaagagatgtagatgacgatgatgatgatggtctgaggttgaggctgaatccgaatccgaatcggtatctgaacccaacagaagcttgcggcaattgcgtttcctctttggccacacgttctggacaattaaagccccagccgagctccgaatctgaatcgagccaagttaagacagcgaccacgaccgaaaaccgaaaacagaaaaccaaaaaaaccggattccaagccgagaaggagcgaaaaagacggcgagagcgaccactggccactggcactggctacaagtgaactggtttacaaagaaaagaaacagaaatgaaagaaacatgtgaaaaatcacgatctataaagccgatgcacttaataccctaggcaaaataagtaaataatactatagatcaaactagagtagacttgttgaaaaaaaaacactggaataaataagaagcttataaactatcagcttattaaactaagtttgcctaaatttcgtaaaatatatttttaaaacctaacgcgatgctttgaaattctgtaaaattaaagtttttcagaaatgtaacgttattaacaccgattaatatttttaaataatattttacaaattgtgtacaccattttcaaacgaagtacccttaccaagagcacccataagagacccccagaattccaagcgaaggtttttcgagtccggctcgaaccgaccaactcgaactgagcgccacagcaacaacaatggggcaagcgggtggttcaggatggtggggaagtttgcggggggatgggggacgtactccaccgtggactgtgcggcaccacactgagttcagtggcaatgacagtggcacatgcagttgtagtggaagccgcttgtcggtcgacagtccgccaaccgccaacgttgttgcgctctctttcctgttttttcgccccgtctcattctatttgtggagcaggttttgagatatatcttgggtctttctctctctctccttctctgtctgcgtactcgttatatttttgtactcgctgcctttttggccaacgcaaaaaataccaaaataaaaaaataataaacgtaattagctagccctacgccacaaacagaaaacaaaaaaaaaaacaacaaaaaataaaacaagtaaaaataagtggtgtggaatttttgtgttcatctgggaaggcagggcctgttctcggcggaatcttacctgtgggttaaacagaagaaagccccaggctctttgggctttatctttgcgtcctaaagtatccaagtagttgtttcaatatgattttgctggttttttgtcagtttgtaagctttgaaatgcttggcattgtttttggtttttaaagtagtaatttatatcatttaagtggcacttgaattgtatgttgttttttcttgttgtatttgtttgaagacttctgttaatacgattctgtgaatttaaaagtaaataattttattaaaattttcaaaatatttgtcggaaattttttgttatattttcaggtttgattttaattttaacaagtatttcaccgaatcattctcaagtaaatgtatttaaaaaaacacgcacactaagggacaattttgagattcaaatcacggcacgatcgccccagggggtggggctgagggggcggcaggggggcggttacgggagcagcagcagcatcaacggcagtcagctaccacaaaccacgtagtttttttccttccaaaatccacgtacaactcgcgcacaaacacacgatgtatttgtatctcacagatatgaaaaccgaacgaagaaaaacccgaaccgaaacctcaacctcaacgaactgaaaaccgaacgagaacgagagatacacggcagctgaaatgtgtttttctacattttgtttgaaataggagctgaagccagtgcagctaccaattcgctcctcaagtagtcccaaactcttcccacacacagagtcagttgcagttgaaaagcgcttttctcgaggcaactggcgatgcaacaagttcactcacacacacacacacactagcgctctgggcccgctcaataagatacatcggcggcgaaagatacagatagatatagagcgagaggcactcacaatgcagttcacttttccaacagctattaccagcgatccgcgcgcaggtgcgttggccacgatcaactctcgaagactgagccacgaacccaagaaacagggcccgaatggaaaaagagagaatcgagagaatcgcgggctgagaaatgcgtagaaagagacaagcgacgagtagcgagcagtggcactaaaaccagcttagtgcactgtggaaaaagttttaacaattcttaaatatctgaagagtaaggctctaattttctgtaaataacaacagtataaatctatctgcttaaatatactagataaataatggatgcatttacatatttttctgaattaactagtaacttatattcagtttgaatatagtacgacatttctttcagtggaggagaggaattaaaccgaactcaacccaaacccaaccggccgccagtcgcacgctgctaaatggacggatgggcccgtggacggacttatatggagactggcactggcggagcgtggaacgtgcattcgtacgacgagttattgtcagttagagcgctacctgtttaccgaccgactaccgactaccaccgactgcttttttttttttggcccagtcgagagggtagggtacaattggcccgggtgttgccagattgccgttgctgctgctgcccatggatcgttatggtggcttcacccgaaaaggaggaggagggtgtaactctggtagttccctgtttattgttatgcctttttagtgggggt

SEQ ID NO: 24797 - DNA, 3638 bp, DROSOPHILA
acatttcagctgccgtgtatctctcgttctcgttcggttttcagttcgttgaggttgaggtttcggttcgggtttttcttcgttcggttttcatatctgtgagatacaaatacatcgtgtgtttgtgcgcgagttgtacgtggattttggaaggaaaaaaactacgtggtttgtggtagctgactgccgttgatgctgctgctgctcccgtaaccgcccccctgccgccccctcagccccaccccctggggcgatcgtgccgtgatttgaatctcaaaattgtcccttagtaatcgtattaacagaagtcttcaaacaaatacaacaagaaaaaacaacatacaattcaagtgccacttaaatgatataaattactactttaaaaaccaaaaacaatgccaagcatttcaaagcttacaaactgacaaaaaaccagcaaaatcatattgaaacaactacttggatactttaggacgcaaagataaagcccaaagagcctggggctttcttctgtttaacccacagttccaacggaatgtgaagagcccctccaatataatgcccacggaaagctcatccagcgagatctccggcggaggaggcggtgcgatacccatgctgcgaccttcccggatggatcagttcatgaactcgatggcggcggcagcggcggcggtgggtggtggcggtcttcctggtgcggcggataggaacggcggatccggaggatcggatggtggctcccagaatggcaacggcgattcgcgcaactcatcggccagccggatctcagcgtatgaaacacagctggcctatcagcagcatttggccggactgcatggtccgccgccaccgccaccaccatcgcatcatcgcgagatctctgcctttgtgccggttctgcccaccggaaaggtgcgcccgggtagtaattccaattacgaaatcattgccatgatggcggacaagcgaaaggagttggccctaagggaggcggctgcggcggcggcaatgttaggacgaggtcctggaggacccggcggtcctggtgtgccaccgcctggagtgttgtacggaccagctggcgtgccacctccgccatatctcaccggaccgggtccatcgcccacgggagccggaagttttccatttccaccaggagccgccgccgcagctctatttccacctggcctgggtcctggaatgcatgccggactcgataggcgcctgctacgtgctcctggtcgggcatcgcggcctaaaaaacagttcatctgcaagttctgcaatcgacaattcaccaagtcgtacaatctgctcatccacgagaggacacacacggacgagcggccctattcctgtgatatctgcggcaaggcgttccggcgacaggatcacctgagggatcacaggtatattcactccaaggagaaacccttcaaatgcacggaatgcggcaagggattctgccaatcgagaaccttggctgtccacaagatcctgcacatggaggaatcaccccacaagtgccccgtctgcagtcgatcattcaatcagcgctccaacctgaagacccatctgctcacccacacggatcacaagccctacgagtgctcttcatgcggcaaagttttccgccgtaactgcgatctacgacgccatgccttgacccatgcagtgggtgaggtcaactccggggactatgtggatgtgggcgaagaggatgaggccagaaatttaagtggcgacgaggaggattcgttgctggaagtggactcgcctcgccagtcgccagttcacaatttgggcgagtctggaggatcgggtgagaaatctgagtccgaaagaatgagactcaagcgcaaggcagccatcgatcatgaggaaagcgaagaggagttcgatgacttcgacgaggaagaggaactgcaggatctgccaagagtacacgatttgcccagggaagaggacgacgactttgatcccgaggacgaggagcaggcagaagtggcactagtggcgcgtttccaggcgagtaaggctgccgccacatcgcaatcatcgtcgtcagtgggcaccaagccggaacgccagggagtcacccactgtcatcatgagggtggtgaaacctacacaatgcggccacatggcgagaaacatcaggaggaacccgggaactctggcattgccagcctacccgttccaccttcctttgtgcgatattctgtaccacctggggcagctggaccgccgcctgcaccacctggagctcctccgccaacccaccagcacccaggacatccacacttactcccacccaacggggatccctatttgcccattctgcacgttcgacgcgacttgcaccacaagagcttgaacctttcgaaggctggtgttccaccgccaccacatacaccacccactataataacccagccggagtcgggtaaaccacccaatcaacctttgcattcaccgcatgaagctatgcccagcttcctgggatcgatacccatgcgaaagaggattcttccggcaccgaccttggacttgatggatccgcaccaccatcctggattgggtcaaaggacctttgtggatagtcccagcatatatgctttgaatatgtcgcgacatccccccagacagcttctgggaaaaccaccgagtacggaaacaagtggagccaccaccgaaaagggaccaccagtggcagcaccgcccatagcaccaccgcctgcaccaccgagaagaacagggttcagcattgaggacataatgaggcgttagaagtaaaccgagaaagaactagaaaacaatccattaatggaggtaaaatcggaatagaaaaacaacacaatttggaaaactatttatcaaagctcttacgaatttgaaatatcaaaaagtagtagtattcctaataaatatatatctcggttgttttttctggtatttcatttagaaggtcttatgaacagttgaatatcataatgacaaacagttattgttcccaatggttaaacgaggatttatcgttttagacccacaagtacattaaaataaatttagatctacaatttaatactttttagtacaatgtctaggcaaggcaatagacctaaactaagtaataaaatcagttaagcgataattgtaagcgaaacaaactccgttgttgcattttatagagctcttatgcgttaggattttagcttaaatctaccgatttaaatgtttaagcctttagtacgagagtctatcgattagtttttaatgtgtggcccaacactaagtgttgctgtttgctgagtgaattccaattttttatttatgtttccttatccggtaagctaatcttaatgagtaaacaaaatcgttaatcgattttgctgtagggaaaaaaatggttgaaagtaaaagttagtgtaaagcagagcataaacaaaaatccaactacaagcaacattccagtagaaccttatgtaattaggcttaaattttaagagttttgcagtagttaatataagcaacccatagaattccatggtcttccttcaattttaaatgattttattcaaaccatagcgagttagttgatttcaaataaagtatgcattaataatgaaaaacaa

SEQ ID NO: 24798 - protein, 744 aa, DROSOPHILA; identical to SEQ ID NO: 5139

SEQ ID NO: 24799 - DNA, 2552 bp, DROSOPHILA; identical to SEQ ID NO: 20698

SEQ ID NO: 24800 - DNA, 4916 bp, DROSOPHILA
tgtccccaccgaaaataaagaagaatcgccaggcggcaaaaaaaagaaaaggaaagaaaaaaagccagtgtaacgtgtttcacattcgccctgtccctttctcactgctctcgccgtcgcgcactggatcgccgtgtgttctttaccatcaagcgttctcactcgcacagcctgtccaatgatgaaattactgcacgacttcattttggacgctcgcaccgccgaggatgttgcactcacacaggaaatgattaccacatccactgccaagaaattgtgggagaaatccgatggcaagggcgtatcctcgagcactcccggtggaccgttgcatcccctgcagatccccggcatcggggatccctcctccgtgtggaaggatcacacctggtccacacagggcgagaatatattggtgccgcccccctcgcgagcctacgcccatggaggcgcctccgatacttcaaacagcggcaatgcgggcatactgagtccccgcgattcgacttgcgccaaagtggttgaatatgttttcagtggctcgcccaccaacaaagatagctcgctttccggattggaaccgcatttgcggaatctaaagtttgacgacaacgataagtcacgcgacgataaggagaaagcaaactctccgtttgacacaaacggtttgaagaaagacgatcaggtcacaaactcaaatggtgttgtcaacggcattgacgatgacaagggcttcaatcgcactcctggttcacgtcaaccatcacctgcagaggagtcccagccacgtccccccaatctactctttcctccactgcccttcaatcacatgctcatggatcatggccaaggcatgggaggcggcttgggcggagttgttggatctggcaacggagtcggcggtggcagcggcggaggcggggcaggcggcgcttatgcggcccaccagcagatggccgcccagatgagtcaattgcaaccgccgatgatgaacggcgttggcggcggaatgccaatggcagcacagtcaccaatgttgaatcaccaggcagctggacccaatcacatggaatctcccggaaatctcttgcagcagcaaaattttgatgttcagcaactgtttcgctcgcagaatccgggcctagcagcagttgccacaaatgcagcggccgcagcagcagccgcagcagctgccacatcggcagcgagtgctgcggcagcggtgggcgcaccacccgttcccaacggatcgctgcagcagtcgcagcagcaacagcagcagcagcaacaacagcagcagcaacaacagatgcacatggcggccgcgtcgcaacaatttttggccgcccagcagcaggcgcaaaatgcggcctatgccgcccaacaggccacgtcctacgtcatcaatccgggccaggaggctgccccgtatatgggcatgattgccgccgcccagatgccgtactatggcgtagcaccatggggcatgtatccgggcaatctgattccgcaacagggaacgcagccgcgccgccccctcaccccctcgcagcagggtgccgagaatcagccgtatcaggtcatcccggcattcctcgatcacacgggctccttgctgatgggaggacctcgcaccgggacgccgatgcgtctggttagccccgcccccgttctggtgcccccgggcgctacccgtgccggccccccgcccccgcaggggccacagctgtatcagccgcagccgcagacggcccaacagaatctctactcgcagcagaatggatccagtgtcggaggcctcgccttgaacacgagctcgttgacgggtcgccgcgactccttcgaccgcagcacctccgccttcagtccctcgaccatggactacaccagcagcggtgtggcagcggccgccaatgcggtgaacagcacagtggcccaggcagcagcagctgccgcagcagccgccgcagcgcgtggcaagtggccgggagcgatgtcgggagcggccagtggagcctacggagccctgggagcgggcaatgcttcggccagtcccctgggcgcaccaatcacgccgccgccatcggcgcaatcctgtctcctgggcagtcgggcacctggagccgagtcccgccagcggcagcagcaacaacagcagctggccgccgttggtctgccggcgactgcagcagctgctcaggcagcggtggccgcggctgccaacaatatgttcggatccaacagctcgatcttctcgaatcccctggccattccgggtaccgcagctgtggcagctgcagcggcagcagcagcggccgccaactcgcgtcaggtggctgccacggcagcggcagcagcggcggtggcagcagcagccggcggagtgggaggtgccccacagccaggaagatctcgccttctcgaagatttccgcaaccagcggtatccaaatcttcagctacgcgatctcgctaaccacattgtggagttctcacaggatcagcacggctcgcggtttatccaacagaagttggagcgggccaccgccgccgagaagcaaatggtgttcagcgagatcctggcggcagcctatagcctgatgaccgatgtctttggcaactatgtcatccagaagttctttgagttcggcactcccgagcagaagaacacgctgggcatgcaggtcaagggtcatgtgctgcagctggcgctgcaaatgtatggctgccgagtgattcagaaggctctggagagcatctcgccggagcagcagcaggaaatcgtccacgaactggacggacatgtgctgaaatgcgtcaaggatcagaatggcaatcatgtggtgcaaaagtgcattgagtgcgtggaccccgtggcgctgcagttcatcatcaatgctttcaagggtcaggtttactcgctaagcacccatccgtatggatgccgggtgatccagagaatccttgagcattgcactgccgaacagaccacgcccattttggacgaactgcatgagcacaccgaacagttgattcaggaccaatatggcaactatgttattcagcatgtgcttgaacacggcaagcaggaggataagtcgattcttatcaacagcgtgcgcggcaaagttctggtgctatcacagcacaagttcgcctcaaacgttgtggagaaatgtgttacccatgccactcgcggagaacgcactggtctcatagacgaggtctgcaccttcaacgacaacgcgttgcacgtgatgatgaaggatcagtatgccaactatgtggtccaaaaaatgatcgatgtatcggagccgacgcagctcaagaagctgatgaccaagatccggccccacatggccgccttgcgcaagtacacctacggcaagcacatcaatgccaagttggagaagtactacatgaagataaccaatcccattacggtgggcacaggagctggaggagtgccggcagcctcgtcggcggcggcagtcagcagtggtgccacctcggcatcggtaaccgcctgcaccagtggcagcagcaccaccacgaccagcactaccaacagcctggcctcacccaccatttgttcggtgcaggagaacggcagcgccatggttgtggagccctcctccccggacgcctccgagtcctcgtcctcggtggtgtcaggcgctgtcaacagcagcttgggtcccattggacccccgaccaacggcaacgttgtgctgtaaaggaaataacaaattaagccaggcagtcaaaggaaacttccttctcgaatcgcagtatagtttttagaagctgtagagcttaacataaacaacaagtacatataaatgtaatcttatttattggaaaagcagcgataaatggagctgcactcgaagatttgcaaagaggatagtaaaacacacatgcgccaatctagagaaacaaatagcaaacaaagaagcacactggcaagcaaaaaagcaaaagagcttaacagctaaaactaaaagaaatttgtatttttacgaacaaaactaataacgttctcatgaaaaaagatttcaaaatatttgtaaaatgcgctcgcataattaatttgtaaaaaaaaggcatgaaccgcaaagatgaaagaaaacaaaaatgcgtagtaaatcgcgatcaagaaaaaataatgaatgtaatgtaaaatgtcaatgaaacagatttgtctgcgtacattttcgttgtaactttgtataaattaattattatatagcaagtctatctgtaaatgattaatgtttcgactgtaaattaataagaagacaactgaagagccggcgagctgaaaaaaaagaaagtaaaaagagcgggctgcatgaattagcctacgatttataagttcagacagaggaaccatttctaatatacaaacatatatacgagggataacagcagaagccgcacttagtgtagaatgtagagtaataatgtttttggagccagcagctacaaagacacaatgaaaacagagacacacgagacacgcccacgccccctcacgcacactcggttgcatacacccacacaatgaacgactcttcagcccattcacgttgcttttgcactatgtaaaaattttgtataaaaaaaaaccccaaacaacaaaccatgtaaaccatgtaattttcaaatgtttcactgtaaaatgtatacatactttattttgtaaattttttttaagtcgcaagtaactcatacatattctattctaaacctcacgcatgtatttataattttatacacattagctggtgaccaccgatcgacgatctgcatggatattggtcagctggtggccagctaaaagaacctgttagccaagtaagccaaaaatgataataattggattttaaaacaataaccatcaaaataaaccaa

SEQ ID NO: 24801 - protein, 1184 aa, DROSOPHILA
MKLLHDFILDARTAEDVALTQEMITTSTAKKLWEKSDGKGVSSSTPGGPLHPLQIPGIGDPSSVWKDHTWSTQGENILVPPPSRAYAHGGASDTSNSGNAGILSPRDSTCAKVVEYVFSGSPTNKDSSLSGLEPHLRNLKFDDNDKSRDDKEKANSPFDTNGLKKDDQVTNSNGVVNGIDDDKGFNRTPGSRQPSPAEESQPRPPNLLFPPLPFNHMLMDHGQGMGGGLGGVVGSGNGVGGGSGGGGAGGAYAAHQQMAAQMSQLQPPMMNGVGGGMPMAAQSPMLNHQAAGPNHMESPGNLLQQQNFDVQQLFRSQNPGLAAVATNAAAAAAAAAAATSAASAAAAVGAPPVPNGSLQQSQQQQQQQQQQQQQQQMHMAAASQQFLAAQQQAQNAAYAAQQATSYVINPGQEAAPYMGMIAAAQMPYYGVAPWGMYPGNLIPQQGTQPRRPLTPSQQGAENQPYQVIPAFLDHTGSLLMGGPRTGTPMRLVSPAPVLVPPGATRAGPPPPQGPQLYQPQPQTAQQNLYSQQNGSSVGGLALNTSSLTGRRDSFDRSTSAFSPSTMDYTSSGVAAAANAVNSTVAQAAAAAAAAAAARGKWPGAMSGAASGAYGALGAGNASASPLGAPITPPPSAQSCLLGSRAPGAESRQRQQQQQQLAAVGLPATAAAAQAAVAAAANNMFGSNSSIFSNPLAIPGTAAVAAAAAAAAAANSRQVAATAAAAAAVAAAAGGVGGAPQPGRSRLLEDFRNQRYPNLQLRDLANHIVEFSQDQHGSRFIQQKLERATAAEKQMVFSEILAAAYSLMTDVFGNYVIQKFFEFGTPEQKNTLGMQVKGHVLQLALQMYGCRVIQKALESISPEQQQEIVHELDGHVLKCVKDQNGNHVVQKCIECVDPVALQFIINAFKGQVYSLSTHPYGCRVIQRILEHCTAEQTTPILDELHEHTEQLIQDQYGNYVIQHVLEHGKQEDKSILINSVRGKVLVLSQHKFASNVVEKCVTHATRGERTGLIDEVCTFNDNALHVMMKDQYANYVVQKMIDVSEPTQLKKLMTKIRPHMAALRKYTYGKHINAKLEKYYMKITNPITVGTGAGGVPAASSAAAVSSGATSASVTACTSGSSTTTTSTTNSLASPTICSVQENGSAMVVEPSSPDASESSSSVVSGAVNSSLGPIGPPTNGNVVL

SEQ ID NO: 24802 - DNA, 3188 bp, DROSOPHILA
aattgcttcgggaatagcctagcgatgagatcggatcattgatgcttggtgcgaagtttccagcgacttcttcggtactccagttgacattaccaccggaaaaacccatcagtgtggcattatagtgctctacgacgccataaagcgcttccagggcagacggttctagcataactaggtcaaagcgttcatttctgttttgcaacatcttttgaacccctttgtcgctcagtatatccgaagacatattgtagagcattgacacaaccatcaggcttgctatccatttgcttccaaagaagtccaagatttggtcaccctcgatcatttctgcgttgaaacccaaattgaatataagttaatatactaaaaattacgaaatgactcaccctggacgcgctgatttagcttgggaacgcgtatatgtcgaactccttcgatgtcggtcggcattccaactggtgtgatcaacgtgacattgtgtccccgtttaactagagcctttgccaatggacgcacaactagattgtgagagctgaagtggtaggaaaatatgcctaggatgttggcagcctgcaccgagtcctggtacagatccttttgcaggaacaggcagaacaagacagccagccaataaaactcgaggtgcatttccacagttcagtccgctcatgtcggagctctgtccacaaatgaacacaatctaatctaaggtgtcggcagaaagcttaactgatatcgtaatagttttgaatccaggtggtgtaagtatttgtgaattattatcggttattagttgcttgtctgatagataacgccatagccatagcgtagaacggtcggaaatttaatcgcaatgtcattaaaatgaacataaggaatgctgaagaggatgtggtattggtgactaagaattgctcctatcttaagtgaatttaaagacataacacaattaattgtcataaataaacattttcgagtctccggatatagtgtattatcatggatgcaatcgtcttagtctgatacgatatttcagaaacagggtgtagaccaaaaagatcagcgatgcagcgactaatccaaatcgtagactgaatgctaaaatactgtcaattctatagtactcaatcagtggaatctcctccaagttaaggcgcatccgagtaatattccggtttcgtaaggcgtactcagtccaccaaaccgccgtatccaatggactcatgggacgatccttgaaaaattgcgatatttccttcgctttcagataatagctgttatttgcaagcatatgctttatggtttcggttagagtatctttgttcagagagttgatatccataacctcagccattccagataattgcacccaacgcatattaccaaattggtcgaaaaacatcggtagtccaagcattggaactccactgtctacggcctcaatcacactcagtaatcccccgtttgtgatgaaaagtcggacatttggatggttcaatatatgtcgctgaggggcttgttcaacaacatatacattatccgatttgtcaggcatatataatagttcgctcttccaaataatactttcatttagcgtagcaaaagtctgcagcagtagctcctgaatgttttcaggaagaaacttaatcagaatgtcgttgcccatcgagaagtaaataactccgtgatcggccttgtccagaaatttctgcagctcctcatcacttggttcagggggctcgctgagatgaagacctcccacctcgattatgtttggtgcattggctcgaactttacccatgctgtagtggctattgattagcatcaacgagaatctggatcttaactcattcattttctgagcggaatagccaaaaaatttctgaaataagtgtagttgagcaggtcgtaagatcaaatagttcaccaatttttcttccattatatgaatccagttatatacgcgactgaacaatgatgtttccaaggaaaagccgaccggagaaatgggttcgtatattgatggagctggatttcctgccaattcgtatgtgtgccagttaatccgtatactggacaatcccatcagcgtggcgttgtagaactcaaccaggccataaagggcgtccagactagatggttccatgatgatcaagtcaaaactttcgcttttgtcatgcagcatcctttgaacgccaggatcacttagaatgtcattggaggcattaaagagcgcctttgccgtaagagcgctctccgtccatttgttaatcataaagtccagaacttggtcagactcaagcatttctaaaaagataaaaaaaaaatcaacaaacagacactttaataaggtgactaaccttttatacgttcgttaagctgggcaacacgtatatgtcgaactccctcgatatcgtttggcattccgatcggtgtaattagagtcacattgtgccctctcgttgccaaagtccgcaccaaaggctgcatcacaaaaaagggtgaaatgtggcggtagggaaatatacccaggatgttggcagcctgggcacgatcgtgttgcagaagcaggcaaagggagagagtcagccagcaatatcgtaggcgcattttcgcggattcggttcgttcatgttgaagctctgaccacaactgagcaaatcttatcggtattccgcgatacccatgaaagctcctcattatttacaaccaataacaataaaatggtttgataattatgaattggaacactttagaattaaatgaaagctcattgaaaataattttttggaactatgccattggaaaaatgttaatgcacctattaaaacatatgctccttactaaatttaacctgagtaatcgatatgtaataatttttttttttaattttaacattaacatttttttaaaataatcgagatctggaaatcgcgtacctggacaatcaaaatcgaagaaatctaggatactacttcataattgctcaagcccaattgtatctgcgcaataactctttccctttcttggagtcttgtgtgcctattgcgattcttctggtacaatctccagcccaaaaagatcagcgatccacagacgcaaccaaggcgaactccaaaggttagtatgctgtcgagtctgtagtatcgcataagaggaatctcctccacattgagacgcatatg

SEQ ID NO: 24803 - DNA, 1188 bp, DROSOPHILA
atgctgcatgacaaaagcgaaagttttgacttgatcatcatggaaccatctagtctggacgccctttatggcctggttgagttctacaacgccacgctgatgggattgtccagtatacggattaactggcacacatacgaattggcaggaaatccagctccatcaatatacgaacccatttctccggtcggcttttccttggaaacatcattgttcagtcgcgtatataactggattcatataatggaagaaaaattggtgaactatttgatcttacgacctgctcaactacacttatttcagaaattttttggctattccgctcagaaaatgaatgagttaagatccagattctcgttgatgctaatcaatagccactacagcatgggtaaagttcgagccaatgcaccaaacataatcgaggtgggaggtcttcatctcagcgagccccctgaaccaagtgatgaggagctgcagaaatttctggacaaggccgatcacggagttatttacttctcgatgggcaacgacattctgattaagtttcttcctgaaaacattcaggagctactgctgcagacttttgctacgctaaatgaaagtattatttggaagagcgaactattatatatgcctgacaaatcggataatgtatatgttgttgaacaagcccctcagcgacatatattgaaccatccaaatgtccgacttttcatcacaaacgggggattactgagtgtgattgaggccgtagacagtggagttccaatgcttggactaccgatgtttttcgaccaatttggtaatatgcgttgggtgcaattatctggaatggctgaggttatggatatcaactctctgaacaaagatactctaaccgaaaccataaagcatatgcttgcaaataacagctattatctgaaagcgaaggaaatatcgcaatttttcaaggatcgtcccatgagtccattggatacggcggtttggtggactgagtacgccttacgaaaccggaatattactcggatgcgccttaacttggaggagattccactgattgagtactatagaattgacagtattttagcattcagtctacgatttggattagtcgctgcatcgctgatctttttggtctacaccctgtttctgaaatatcgtatcagactaagacgattgcatccatga

SEQ ID NO: 24804 - protein, 395 aa, DROSOPHILA
MLHDKSESFDLIIMEPSSLDALYGLVEFYNATLMGLSSIRINWHTYELAGNPAPSIYEPISPVGFSLETSLFSRVYNWIHIMEEKLVNYLILRPAQLHLFQKFFGYSAQKMNELRSRFSLMLINSHYSMGKVRANAPNIIEVGGLHLSEPPEPSDEELQKFLDKADHGVIYFSMGNDILIKFLPENIQELLLQTFATLNESIIWKSELLYMPDKSDNVYVVEQAPQRHILNHPNVRLFITNGGLLSVIEAVDSGVPMLGLPMFFDQFGNMRWVQLSGMAEVMDINSLNKDTLTETIKHMLANNSYYLKAKEISQFFKDRPMSPLDTAVWWTEYALRNRNITRMRLNLEEIPLIEYYRIDSILAFSLRFGLVAASLIFLVYTLFLKYRIRLRRLHP

SEQ ID NO: 24805 - DNA, 2057 bp, DROSOPHILA
agctaatttgttagatgtgggcttctgttttgttctgtttcttgaatccttgaatggcatcctgatcgcaccgcgctcagtagttgttgttcacgggtccatcgaacggacccatgctctccccgaagtcctgcatctcctcctccatgggatcgtccagctcgtcgcccagttcgccctttgactccgggcactttctacagcggctctcgtttacgccgtagttgatgcacgtggatcccacacattcgcagcagccgtcgtggaaccatctatcaagtagagtatatctgttattacacatcatctgtattatatatggaagatcatgttgccaacctcgtactgctggcgcctgtcgtctggcagctggtgcggcacttgttccacgacacgcactgatccagatatataaccgtgcagtttacggtcacaatgttgtcacgctcctgaatcgcttcgtccaggttcttatcattggttcctgaacgacatggcaaatggttagagggttgatgaactcaatctctcggataacactcactcaagaagtaatgaccgtccttctccagcttgggtcccttcaagtacttgtcgaaatccacttgaaacgtgaacacgttccagttgtatccgaagctgtcgccctcatccggagtggccacggcgttgaagagctccggcactccatcgaaatcctccacgtgggacttcttggacagcgagttgcgggtgtcgttgggcttcggacagagttctggaaaaatgaggtaatgatgctattaggaaacctgggtaaaaagttctcaagtgctagttatttttgaataacatattaaaacgtaaagtatttgccaacggaaatggcagcctgtcttcacgatgcacattccttcctaatatttacgattttttttaaacgcatttattttgcatctgataattaaaatgatctatttgtattcctcgaaaaaagacatgcttttcctattccgatctcgtgtgcatatttgttttcatcgtcatgctcgatttgtttataaacaacatcatgtgggccaaacgtaaattgcatttcccgaaaaccccatcggaatgattacaggctattatttatttacttatttacagcatcaataaactttttttggcccactactaaaatggataataaaatgacagagaaactgcacaattaaaaggttgtttgatgattataataacttggaatctaagtattatttttaagtattatatacaaatctaaatttgctagtctagttcttgaagtaaaacaatgtgtactttctctggcagtaataatctgaaaatttgtttcgatctgagggacctaaacttgtttcttttagcggcttagagctgcgaccccttgtcccacgtaagggttaaggctaggcccgatcgtcagctcaagtccgttatcgataactagttagcacatcgcaagctccccccgcactcacacacacacacactcacgcacatgcacatacgcacagcaacaaaaacaaagcgatggccatcacatcatcagtggtgatcaaatctatatctatgcatgtgcacaaccagccactgtccaccgtcaacctccaaccacccaacgcccactgaccgaggattcgacgaccttccttacccacacagctgcagcactcctcgtagttcttgcccaggcatttgaggcactccttgcagcaggagcagttcttcagctcgcacttgcagctctgggtgagcatgcacttggagacgatcgaggcgcagacgacctcgttgcaggactccacggtgccgtagaagcagacgatggccaatagcacgatggtgcccactgtgagcgagcgccaaatttccatgatcggcggtggctgtgtgtgcgtgtgcgcgtgtgtgtgtagggattggaatgcgctctttcccgcagttaagtgtttgagtgtgtgcgcgggtgcaattacaacaaaacaacaattacaggcacacaagcacacgcagattgggcatttgatttgacttgacttgactcgatttgc

SEQ ID NO: 24806 - DNA, 780 bp, DROSOPHILA
atggaaatttggcgctcgctcacagtgggcaccatcgtgctattggccatcgtctgcttctacggcaccgtggagtcctgcaacgaggtcgtctgcgcctcgatcgtctccaagtgcatgctcacccagagctgcaagtgcgagctgaagaactgctcctgctgcaaggagtgcctcaaatgcctgggcaagaactacgaggagtgctgcagctgtgtggaactctgtccgaagcccaacgacacccgcaactcgctgtccaagaagtcccacgtggaggatttcgatggagtgccggagctcttcaacgccgtggccactccggatgagggcgacagcttcggatacaactggaacgtgttcacgtttcaagtggatttcgacaagtacttgaagggacccaagctggagaaggacggtcattacttcttgagaaccaatgataagaacctggacgaagcgattcaggagcgtgacaacattgtgaccgtaaactgcacggttatatatctggatcagtgcgtgtcgtggaacaagtgccgcaccagctgccagacgacaggcgccagcagtacgagatggttccacgacggctgctgcgaatgtgtgggatccacgtgcatcaactacggcgtaaacgagagccgctgtagaaagtgcccggagtcaaagggcgaactgggcgacgagctggacgatcccatggaggaggagatgcaggacttcggggagagcatgggtccgttcgatggacccgtgaacaacaactactgaaacaaa

SEQ ID NO: 24807 - protein, 257 aa, DROSOPHILA
MEIWRSLTVGTIVLLAIVCFYGTVESCNEVVCASIVSKCMLTQSCKCELKNCSCCKECLKCLGKNYEECCSCVELCPKPNDTRNSLSKKSHVEDFDGVPELFNAVATPDEGDSFGYNWNVFTFQVDFDKYLKGPKLEKDGHYFLRTNDKNLDEAIQERDNIVTVNCTVIYLDQCVSWNKCRTSCQTTGASSTRWFHDGCCECVGSTCINYGVNESRCRKCPESKGELGDELDDPMEEEMQDFGESMGPFDGPVNNNY

SEQ ID NO: 24808 - DNA, 3113 bp, DROSOPHILA
aattgccggagttagtccgaaaatcgttaagatcgggagcatgggtgcggcaatcttcattagcacggaaaccggtacgccgttctggaccctcttcggtgtgatcaatgcgccatacaattgcgaggtgagtaataacggccacagtgatgcactgaaaagaaatggaatacatctagcatgaagatgatgaaatctctaaggggatataaaagataactaaaagtatgctgcgttacgtagaacgtattcttttggtactctttttgtacgagtaaataatcatatatatttttctctctctgtacttccatttgtcgccgctttctaaccgatatttctgcgattgcacgccaacaggccaaatatccagtcgactgcaatggtttccacgagggcgaggccaaggtgaccacggaatatatccacaacgagttgtagtattccagttgcaaatggacaagcgagatccggacaagaaaagtagaagacgaaggctcattaagacgatttagctgtaattgagataaagatttcgtgtgtatatagtattacggattgaaatatatatttaaatttaaacagaaccttttattttaaactgtgtcataagggtcatgagatggttatctaactatttctaatcatagttgttgtctacagattttacgatctatttgaagtcaacgaaccgcaaaagaaaagccatccaactacagtcaaacttagctaagtgagatcactttaaataatcagaccaataagacaattttcaggattttcactttaatgattttgaattttagttattcaaaaacctgatcttagtttcaggcaacttattgaagccttaattcaccttacaagagctttttttgctgcacaaaccagttcgtgttggtggaaagtcccatttcagtgcctcgtttgaacttgcacttgcacttgccactcgacttgactttgacttcattgtgctttggtaatttggccaaagcagttgaaagatacaggagccatgcagctaatttatcgtgaactcgaggaggacatacttcgacgcactaatgcagtctttccggtacaaaattgctttgttgaggtcctccccgatcagtttatcattcccagaaagtacgtggagctgggcgaatcgattcgatcgcttcccgtttaccaggacgacgtatggatggtgtcctatccacgaaccggatcgacgtgggcccaggagatggtctggctgctgggtcaccaattggattacgtggccgctgagcaagatttaagattgcgatctccgctcattgaactatccgctttgtttagcatcgatcatcacgagacggtggcgtgagtatgaagaaactatatcattctgaactcatatacacattacttgtacactaatgtatatatatataagtgagtgaagcggggaaaaattcatattcaaaaagctttttcacctctttgcactttctcctcgcctgacagccaaaagtttggcaataccgtggatctggttcgcaatctgccacgcccacgttttgcacgctcccacctgccgtggcctttgctacccgagcaatttgagacggtaaagccgaggatcgtgtatactgctcgaaatcccaaggatctttgcgtctcgtactatcactacttcaagttgctgcacggcatgaatggggactttgagcaattcgtggatctcttcctggaggggcacacaccgatgggatcctattggcggcacgtcctgcccttttggaaacgtagccaggatgataatgtgctgttcatcaagtacgaggacatggtcaaggatctgcccagtgtagttcgccgctgtgccagattcctgggcgttcaaagtctcctcgatgtgagcactttgcagaaattgtgcgatcacctcacattcgacaagatgcgggcgaacaaggcggtgaatctggagaagctgctcccggaatcatcttccaagttcatacgcaatggcaagatcggggattggcgcaatcacatgggcaatgagatgtcggaacgctttgatgaatggaccgagagacatatgcgtggttctggattaaactttgactacgtgtgaaaaaccccacttgctaataatattttttgtgttaaaatattttaataaacttaattggattatgggcgtataaaatacgtttatggaggcgatgaatagttataaaaagacttattggttacttatccgtaaattaaattaaattaccaattttttttaatttcttgtctttaaaaactttttttccactttttatcaacatttaagctttcaaaaacataaaaacataaaattaacaaggtttgtgtttaaatctgagaccaccagtcttttctaaactgctcttgcgaacactacaaccatcagagattcaagattcagttctctacaactctaagcgaatcaaaatttcttaaaattattgttggaaacgaggtatttatgaacaaggaaacaatcgaagaagcccataatcgtataaaactataattataaggttagataattgcaatttaaaaacttcctggatagatattctttcttggaatatatgaaagtaaattttagtgataaatttcacattaagaaattattctctttaattcgaataaaaaatttgtgactcatattccagataaaatgactggattcttaagactattggtcgtattttgtgctgtttcaaaactgagcgcccaaaggttaaatgcttctgaagaagagaaaaatgcgagaacaaacctttttaaagtttttagtgaatagatcaaatgccgatgtcctgaatccacgctcgcctatgaatgaaagtcaaaaaagtgtggacgctctccaaattgctccaaattgctccaaattgccagtgtgtgccttataaccaatgttatccgccgtcggatggtattttggatactcaaaatatccactgtccagatatattggcactatgttgtccctacaatcgattacgaacaacgactttaagtccgagcccaaagccaaaaacgaggctgtggaattctcaatgtcggtggtttaaacgatatcccagctggcattt

SEQ ID NO: 24809 - DNA, 969 bp, DROSOPHILA
ttgaaagatacaggagccatgcagctaatttatcgtgaactcgaggaggacatacttcgacgcactaatgcagtctttccggtacaaaattgctttgttgaggtcctccccgatcagtttatcattcccagaaagtacgtggagctgggcgaatcgattcgatcgcttcccgtttaccaggacgacgtatggatggtgtcctatccacgaaccggatcgacgtgggcccaggagatggtctggctgctgggtcaccaattggattacgtggccgctgagcaagatttaagattgcgatctccgctcattgaactatccgctttgtttagcatcgatcatcacgagacggtggcccaaaagtttggcaataccgtggatctggttcgcaatctgccacgcccacgttttgcacgctcccacctgccgtggcctttgctacccgagcaatttgagacggtaaagccgaggatcgtgtatactgctcgaaatcccaaggatctttgcgtctcgtactatcactacttcaagttgctgcacggcatgaatggggactttgagcaattcgtggatctcttcctggaggggcacacaccgatgggatcctattggcggcacgtcctgcccttttggaaacgtagccaggatgataatgtgctgttcatcaagtacgaggacatggtcaaggatctgcccagtgtagttcgccgctgtgccagattcctgggcgttcaaagtctcctcgatgtgagcactttgcagaaattgtgcgatcacctcacattcgacaagatgcgggcgaacaaggcggtgaatctggagaagctgctcccggaatcatcttccaagttcatacgcaatggcaagatcggggattggcgcaatcacatgggcaatgagatgtcggaacgctttgatgaatggaccgagagacatatgcgtggttctggattaaactttgactacgtgtga

SEQ ID NO: 24810 - protein, 316 aa, DROSOPHILA
MQLIYRELEEDILRRTNAVFPVQNCFVEVLPDQFIIPRKYVELGESIRSLPVYQDDVWMVSYPRTGSTWAQEMVWLLGHQLDYVAAEQDLRLRSPLIELSALFSIDHHETVAQKFGNTVDLVRNLPRPRFARSHLPWPLLPEQFETVKPRIVYTARNPKDLCVSYYHYFKLLHGMNGDFEQFVDLFLEGHTPMGSYWRHVLPFWKRSQDDNVLFIKYEDMVKDLPSVVRRCARFLGVQSLLDVSTLQKLCDHLTFDKMRANKAVNLEKLLPESSSKFIRNGKIGDWRNHMGNEMSERFDEWTERHMRGSGLNFDYV

SEQ ID NO: 24811 - DNA, 5437 bp, DROSOPHILA
gccgcaataattgctcacgttctcacgcgctctcaacgcctcaccccctgtggcttttaaaaccaatttggtaaaaccgtccgaccaacggcagccagccaagtaagtcaaccaggtcaaaaagctgcttcaagatgtgtgtaattagacgtgacttttcctcgagttctactgaagggttttctggtggccgggggccaaatcgggccttaaagccatcttaacgctgttgttatttagagcttaattgtgcccggacacggaggaggagcagtgcccagggtcgtggttcaggcgattgggccgaagtgatgggttgaaggggaaccgcccttagagttcaagatggattaaagtccgcttcaatggctactccgtggagcctttgtcccccccatcccaaacgatgccccactcaaccgcaattagcttggcagaagctcgatatcgacacattagcatcccctgtgcaccgggcataatctgattatcagccgccaacccccggaaaaagcaagtgaaaaagtgctaatttgtgcacggaaatcacgcccaggaactgggatggatatcagggattttcccgatgccctccatgtgcgtgtcacctccagctgactgtttcccttatcgcctttgtgcaaattgaaaatatgccaaataattacacatttttatgtgaatttttcaatttatatgccgtcaaataaacgctgcgtgcacatcacagtattgacattcagttgggaggcacttgcgcccactttttcctcatttccgacgatattcgcaatgtcgtcagacatcttctggcagcttatttattcaaaaatgtatttgaccttgaaaagctctaggcaactttcggaaaatgtccacagatggcgtttcatcgctttctacttacgagcgtaagttacatttgtaaaatcccgtcaaatgtatgtaatgtcgtggaaatagagatgtcaaatcaaaccaggcccagtaaaagacaaaatttatgtaccgactgttgtttaatgcgtttacaagtatatgggtgtgttgtactgaacaacatgcactcgaaaaaaaacttacaaagttcagtgttaatgaaagccccactacaccaacaacaggatgtcagaggccaagagccaaacatctccgggtgcttggcttttaattatattgattatcaaaatataagttgacaagtgcagtttcatacattttaaatgtacaaacgggggaagttgggatgaggaaatgattaagatacaacgagaaggaaggaaatagtaggtcaagtaaatgagctgaattggaagttgggaattaaaagaattaatgaaatgattcaaatgataggggcactcaattcaagcgctgagttaccggcagctttttgcgccgtcttcgcaattgctgactgcgatcccagtactcatagtagcgttcctgtttcaaccattcctgatatttataccaccactcctcccacttgatatagtcctaaaagatatagataaatgttaccatttgtactggactgcggataaaatcgtcacttaccttcaggtccaagtctcttaggtaaccacgactcttgtagtactcgtaacggacgcgcacatcgtcccacgacagcattcccgacggtgctgtggtggctaactcctccggaaagtgcccggccggtgccggcgaatacgaatagcgacgcggcggcgactccaggccctcctcaatcattactttgagggccccaccggcggagtctttggtgatgcgcatgttctccatgttgctgcgatcgatgctccactgcgccattttgccgaatcgatccgagagcgtcagccgcgtagtagccgagaatgtgggcaacgtgccgacctcgtcgctgtccgagccgttcgaatcgtccgagtccgaggaggagtttgccgcgttagctccggtgccactggacgtcccgctcggatgttttttgcgtttctcaccttcaattttaatgcgtggcctcacctgatggaaaataatatatatggattgttatatttggtttcaaatttattttgactcttagcttcggacaatgcttacctccttttccttcttcttcttttttgcctgtgttgtaggtgctgcagctggcgctgacgccggctctggtggctctggcgggcggtgcttaagacgcggatcttccggcggaggcgaatggcgcgaggaccgcgcgatcttcatgtgggtgtccgacgaggcgacacgttcatgcccgatgtgacgcatcttcgcctggcgatacttctccatggcggaaaccgaactgcctccacctccgcgcacgggcggtggagtggtggggcgaccatggatacggccatgtgattccgacggagggggcggaggcgcccccgaacgataatggccacgtggcttgggtggcggcgagcgcggaccgcgggatctttaagatggaaaaaaaaaagtttaataggaacaaagaaaacacatttcatatatcaatacttaccgagatctgtgacgatgactgggtgagcagagggagcaggaatcatcggagctggtgctcatagagctgtttgatcgcgaacgcatcgagtgctgcaaagggacacggatatatgtataaatggtatggttctcactgacagaataatatgtatcactatctggttgaaaactcaccctcggtggtggcgatggcggtcgcttggagcgcggcaggatatgggcgactggacctcgcttctccattgccgacgacgagggcggaggaagcggtggagaccggcgacgtccgagcggagaacgcgacgcgtttggcttgcgtcgcaacgacgaggacgacgagccaccactgggttccggcggtgatcggggccttccgccgtggccgtttccgggtcgacgcatgagggcatcgtggctattgttgggcgatcgtggcattggcggcgagcgaggtccaccacggcgatccatgccactgtgcatagccatgggcggtgaacgacgacgcggaggtggtgaaagcggtggcgatttgcgcaaacgcgaccgactgcgtgagtgcggcgaacgagagcgtccgtaacgctgcgacggaggcggtggacctggcggcggtccacctgtgggcggataacgaccgtagggcggtgctccaccctcacgaccttcgcgaccgtcgcgttcgctctctccagagctgctctccccctggatgtacatcttcttgtagcccgtgtggcgccatcggtttggatccttctcctctgcctcgatcagcttcttgtcccaataatcgttggtggtgttggcgcgcgccttcttcatcacgttgtcgatctcgcgtcgctttccagcgggtaatgagggatctgcaaggttgagaggtaaaaggtaagcttcgattggcagggtggtgggcggtgctttgttccgggaagcccctaagacgggctgatgggtttatgggcccttagacatcgctaatcccggcgaggtaattgggttttcccacttctatgcagttgcttgctggtagttggtagaagtttcagttcaggtacctgttatgcgggcagctgtcggctgcctgtccatgtgcagttttggattcagttcggcgcgcctgcgcgacgccatcgcgagatttcggatttctatcgctttggcaactatgtatatgtatatatatcgcgcgacagatatatgtatgtatgtactcgggtttcaatgtttattacccccaatcggttagggtttggtttactgtttcggattcggtttggcgaacgcgacaacacactttaccatttcaaaaacatacacaacaagctgcaaatatattacaattgaatatagaaacatgtaaagagagcattagaaatggctaacacaaagcaacaacaatatcaggagcggagttatacagaatgggaatagagcggagagacctgaaaacgcagagagaatcgcggacgcgctccggctgtcatttaacccatatcacgccgcgggggtcggggacctgtggtcccaatcaaaatcgtgcgagagagccgatttttaatcggcttgcgcgtatatcttttcacatatgcattttgaatttcttccatttttcacacatacactcacaccagcaccaatatatttgccttgtcagcacgagaggaatgcagagcgagacagagagagagtgtgaggcaaaagttggcgatactcccgacggcagcaactaaatttcgaatttcagctctggcaattatgtaaacgatgtaaaacaggcactaaaataatttgcttacatttggcgacgtttgcgggcacgctttacgatatttcgtgagctgttaacgttttattggcaaatgaaaaacacggcgttgcgttcacttcaatttttctcgacggccatgttggtagtatcgatatgccggggcacaatcgatggcttggcttcaatagtctaaggactgttcagagtctgatgaactcgagtcagtttatatattttaataataaatattgtgttatttcaagaggcgctcgtagttgaaaacactattcgttttgggaatgttttatatattagactatttaaatcatatcatattgttttgacattattttaagtatgcattaacgattctgctaattattgcaaaaataaaagttattagttctatttaaattaaaacagaaacaaataataacgatcaattattagttattggtgagcattaattcattttttattgttcagtttccttaattgaccatatgattttaattttaggatctgaatgtagtgtggacgccagtttgctgctatcgcaaacgttatcgatagtacggtgttgcagtattttattacacccgactaacaaatgataataagcagatccacggtcacactttccactttgtgtccatccgactgaagttaaaaataatagtttaattgggagtttccaaaatgcagcgcgacgaaaagctttttgagctgacgctggatacggtccttcagcgtctgaacgacctgaagctggcggttctctcgatgatccaaaaacttgagctagagtacgagaccatcaactggccgactttcctggacaactttgccattatctcaagtcacttgacgggattgacgaaaatcttggcaaaggagcagtgtccgccgctaagaaatcgaacggtcctgccccttctggtctccatggaccgggatgacaccctcatcaacatcacagagggtcgggtgccagtcttttcacacgacattgttccagactatttgagaactcggccggatccgattacggaacagaaaatgctgcagaacgaacagaaggcggcgaacctcaccaacgacgctgccatgaaacaggtcactcaatacaacaag

SEQ ID NO: 24812 - DNA, 2957 bp, DROSOPHILA
ccgtcgagaaaaattgaagtgaacgcaacgccgtgtttttcatttgccaataaaacgttaacagctcacgaaatatcgtaaagcgtgcccgcaaacgtcgccaaatgtaagcaaattattttagtgcctgttttacatcgtttacataattgccagagctgaaattcgaaatttagttgctgccgtcgggagtatcgccaacttttgcctcacactctctctctgtctcgctctgcattcctctcgtgctgacaaggcaaatatattggtgctggtgtgagtgtatgtgtgaaaaatggaagaaattcaaaatgcatatgtgaaaagatatacgcgcaagccgattaaaaatcggctctctcgcacgattttgattgggaccacaggtccccgacccccgcggcgtgatatgggttaaatgacagccggagcgcgtccgcgattctctctgcgttttcaggtctctccgctctattcccattctgtataactccgctcctgatattgttgttgctttgtgttagccatttctaatgctctctttacatgtttctatattcaattgtaatatatttgcagcttgttgtgtatgtttttgaaatggtaaagtgtgttgtcgcgttcgccaaaccgaatccgaaacagtaaaccaaaccctaaccgattgggggtaataaacattgaaacccgagtacatacatacatatatctgtcgcgcgatatatatacatatacatagttgccaaagcgatagaaatccgaaatctcgcgatggcgtcgcgcaggcgcgccgaactgaatccaaaactgcacatggacaggcagccgacagctgcccgcataacagatccctcattacccgctggaaagcgacgcgagatcgacaacgtgatgaagaaggcgcgcgccaacaccaccaacgattattgggacaagaagctgatcgaggcagaggagaaggatccaaaccgatggcgccacacgggctacaagaagatgtacatccagggggagagcagctctggagagagcgaacgcgacggtcgcgaaggtcgtgagggtggagcaccgccctacggtcgttatccgcccacaggtggaccgccgccaggtccaccgcctccgtcgcagcgttacggacgctctcgttcgccgcactcacgcagtcggtcgcgtttgcgcaaatcgccaccgctttcaccacctccgcgtcgtcgttcaccgcccatggctatgcacagtggcatggatcgccgtggtggacctcgctcgccgccaatgccacgatcgcccaacaatagccacgatgccctcatgcgtcgacccggaaacggccacggcggaaggccccgatcaccgccggaacccagtggtggctcgtcgtcctcgtcgttgcgacgcaagccaaacgcgtcgcgttctccgctcggacgtcgccggtctccaccgcttcctccgccctcgtcgtcggcaatggagaagcgaggtccagtcgcccatatcctgccgcgctccaagcgaccgccatcgccaccaccgaggcactcgatgcgttcgcgatcaaacagctctatgagcaccagctccgatgattcctgctccctctgctcacccagtcatcgtcacagatctcgatcccgcggtccgcgctcgccgccacccaagccacgtggccattatcgttcgggggcgcctccgccccctccgtcggaatcacatggccgtatccatggtcgccccaccactccaccgcccgtgcgcggaggtggaggcagttcggtttccgccatggagaagtatcgccaggcgaagatgcgtcacatcgggcatgaacgtgtcgcctcgtcggacacccacatgaagatcgcgcggtcctcgcgccattcgcctccgccggaagatccgcgtcttaagcaccgcccgccagagccaccagagccggcgtcagcgccagctgcagcacctacaacacaggcaaaaaagaagaagaaggaaaaggaggtgaggccacgcattaaaattgaaggtgagaaacgcaaaaaacatccgagcgggacgtccagtggcaccggagctaacgcggcaaactcctcctcggactcggacgattcgaacggctcggacagcgacgaggtcggcacgttgcccacattctcggctactacgcggctgacgctctcggatcgattcggcaaaatggcgcagtggagcatcgatcgcagcaacatggagaacatgcgcatcaccaaagactccgccggtggggccctcaaagtaatgattgaggagggcctggagtcgccgccgcgtcgctattcgtattcgccggcaccggccgggcactttccggaggagttagccaccacagcaccgtcgggaatgctgtcgtgggacgatgtgcgcgtccgttacgagtactacaagagtcgtggttacctaagagacttggacctgaaggactatatcaagtgggaggagtggtggtataaatatcaggaatggttgaaacaggaacgctactatgagtactgggatcgcagtcagcaattgcgaagacggcgcaaaaagctgccggtaactcagcgcttgaattgagtgcccctatcatttgaatcatttcattaattcttttaattcccaacttccaattcagctcatttacttgacctactatttccttccttctcgttgtatcttaatcatttcctcatcccaacttcccccgtttgtacatttaaaatgtatgaaactgcacttgtcaacttatattttgataatcaatataattaaaagccaagcacccggagatgtttggctcttggcctctgacatcctgttgttggtgtagtggggctttcattaacactgaactttgtaagttttttttcgagtgcatgttgttcagtacaacacacccatatacttgtaaacgcattaaacaacagtcggtacataaa

SEQ ID NO: 24813 - protein, 567 aa, DROSOPHILA; identical to SEQ ID NO: 19026

SEQ ID NO: 24814 - DNA, 2674 bp, DROSOPHILA
ataaacttaattggattatgggcgtataaaatacgtttatggaggcgatgaatagttataaaaagacttattggttacttatccgtaaattaaattaaattaccaattttttttaatttcttgtctttaaaaactttttttccactttttatcaacatttaagctttcaaaaacataaaaacataaaattaacaaggtttgtgtttaaatctgagaccaccagtcttttctaaactgctcttgcgaacactacaaccatcagagattcaagattcagttctctacaactctaagcgaatcaaaatttcttaaaattattgttggaaacgaggtatttatgaacaaggaaacaatcgaagaagcccataatcgtataaaactataattataaggttagataattgcaatttaaaaacttcctggatagatattctttcttggaatatatgaaagtaaattttagtgataaatttcacattaagaaattattctctttaattcgaataaaaaatttgtgactcatattccagataaaatgactggattcttaagactattggtcgtattttgtgctgtttcaaaactgagcgcccaaaggttaaatgcttctgaagaagagaaaaatgcgagaacaaacctttttaaagtttttagtgaatagatcaaatgccgatgtcctgaatccacgctcgcctatgaatgaaagtcaaaaaagtgtggacgctctccaaattgctccaaattgctccaaattgccagtgtgtgccttataaccaatgttatccgccgtcggatggtattttggatactcaaaatatccactgtccagatatattggcactatgttgtccctacaatcgattacgaacaacgactttaagtccgagcccaaagccaaaaacgaggctgtggaattctcaatgtcggtggtttaaacgatatcccagctggcatttagtataaatccgaatttggcgaatttccctggacagtggctgtaatgaagaccggtaactattcctttgcaggcacacttattcatccgcgggtggttatgactgtcacctaccgggttgaaaattgtgaaaactacacagttcgtgctgggatattggacttaaaataaaattttgagcttctacagtctcaagagataagggtgcaaagaattataaagcatcccaaatgctgtaacgcggcactcttaatcctcgagcaatcattcgaactgaacgatcatattaatgtgatatgtctacctgaccaagaagctgctccaccacccacctcattgtgctatgccaatggatggggagagaatgcattcggtaactcgggccaatacacaaccataatgaaacggatgccactgcgcattgtggatactggcaagtgtcgcgatcacttgctatcaatatttggagcttttaactaagcacatccatactatgcgctgcaggccagccaggcgtagaaatagcctacgacgatgttggtggaccgctggcctgtccccttggaaatccctcggaaaatcgttaccagcttagtggcattgtggtgttcagattcttcaagggaccaacccgcatgaccaacgtatcatcgattcgaaattggattgaccaggaaatgactgccaatggttatgataagtcttactatatcgcctgattaggccaattagaaaaatattataactgtttaaaaaaataaaaacaaaacatatgttctttttgtagagaaaataataaaaaaaaataataagttataattatacaaatgatatataatttcagtttaattattaaagagggtgccactgattctgtatttccttttcctctaatacttgtgaaaataaaatgaattttttcatgttcgtcaacaacataaaactaaaatgttttctttttaaaaataagtattgtgacgaagtcatttctactaacattttcacatctgttaaaagttatctaaaaaattctgttaaatcgatagttgccgagtgttatcggatttggccggcttttctgtttacgttttggatgctacataatttaaaagagattttcgaaaacaaaatgacttgcgatgataccaccgaagcgctcgccactcacatgtgtgagctgttggagttttatatgctgccggagctgaaggaggacctggacaacattcagctggagacgtcgcaattcgacagctaccattccctacttatccaggatctgccaaagctctacgatttggtgcaggaattcctcctgaaaagtggtgatgcaggacacgaagaggttgtgctttgcaaacactcaattccacgactacaatctagttaactttcagctaagattcaagctcctcctgctgatttgcgaattgacagcttcgcctacaatttaccaactaaaggacgactctggtaatctcctgaagtatgctaatgatttggctagtaagctgtcttcccattggtgggagtcgacggatgatcaattcctgaaatactacgagaagaaactgcacagggattgctggaagagacaactaggagctgtgcatggtttcggcagatatctagaggtatacactaacagacaaatatttatccagatagtccagtttgttcacttactttatcccgcagcttcgttacggaaagaaatcc

SEQ ID NO: 24815 - DNA, 435 bp, DROSOPHILA
atgaagaccggtaactattcctttgcaggcacacttattcatccgcgggtgtctcaagagataagggtgcaaagaattataaagcatcccaaatgctgtaacgcggcactcttaatcctcgagcaatcattcgaactgaacgatcatattaatgtgatatgtctacctgaccaagaagctgctccaccacccacctcattgtgctatgccaatggatggggagagaatgcattcgaaatagcctacgacgatgttggtggaccgctggcctgtccccttggaaatccctcggaaaatcgttaccagcttagtggcattgtggtgttcagattcttcaagggaccaacccgcatgaccaacgtatcatcgattcgaaattggattgaccaggaaatgactgccaatggttatgataagtcttactatatcgcctga

SEQ ID NO: 24816 - protein, 144 aa, DROSOPHILA
MKTGNYSFAGTLIHPRVSQEIRVQRIIKHPKCCNAALLILEQSFELNDHINVICLPDQEAAPPPTSLCYANGWGENAFEIAYDDVGGPLACPLGNPSENRYQLSGIVVFRFFKGPTRMTNVSSIRNWIDQEMTANGYDKSYYIA

SEQ ID NO: 24817 - DNA, 3434 bp, DROSOPHILA
ttttttgaaaatgaagacgtccactgagaacccgaaaacacgctgtttgagaaatttcagaaacaacgcccaagtcggtgccctttttactatttctctcaacaatttccttaacgttctcatctttcaaattgaggcctagaaaagtccctggcttacgctgtgaaaaataagtgcttagttcgtttttaaagatgattaaaaaaaatttaatatttttcgaactttgataaacatatattagaaaagaaaagaaaactcaaattaccaagttaatttatgtttttagatgtatgcttgttataattatagagttttttttcccagtgtagcgcacatattagttaagaaattgtataacaaaagttaagaaaaatagcctgcgacggggcgaaaagacaggggagcaaagtgtgcccgctggacagagagagagcgagatctagacaatggcctggctggggttcatgcgtacaggggaccaggaaccgagccggggctatatgggatatcatatcggatcggatcgaaacggatcgtacctgcggtgcccagcacatctcgcacagctggagttgtcactgggcatgtaaagagccaaacaaaatcgagtcaatgggtgatggctcattttgaacctcatcctctggcatttttctgcctttttcgggaatcattttcatgtttgccgctctggctagcaaacaactaattaagtcatcaggatgaaagcaagttgctggaggaagctgggtaaatatttacgggatgtgactgtgagctggacagcagctgatggtcaacggaaaaagaagctgctgagttctcagagaaaggcagttaaataataacgaaaaagtgccattaagtcttattcactgatgaatatttttcaagtgtcgataactcgatccaaaaaattgttatattctgaaatggttttaaaaataagaaagccgtttgaaatttttctttttaaatttgtttattatttttttttctttttttttatatttcctaattacatatgtacaaaagttggtgagcaaactacaagggctctcggctggcaggaatccttcttcagcagtcctgaagatttggctgcgcattcattgccgttaaccatcgactttccaagtcgattcggaggagccgctgaagaagcgaagcggtcaatgcgatgatgaccaaaggaatttgctaaatgcagcatttagacgtcacgggtttttccacggggcaagcgagcaggaagtcctaccagtcctagctcttccccaagcgacccttttgtccctgggttttttttttcgatccaaagcgctgggcttggttctgcgccgactgccaagatttagctggatggaaacttgccaaagaactgcatgcgctgaaacaactcggcgttcaattgttgtggatagccctgcatctgggcgggatggggcgcctgatgatggtgggcctgaggagcctgctggtactgcatctgctgataggcagcctgataggcagcgggattcatgcgctggtacagggcggcggcggcagcggcggcgaatggaacagccgggtatccgtagctggaagctggagctccgtatggtgaagcagccatcatcggcgagaatatggcctgacgataggcggccaggcgagtgcgactggcgccgggattcttgcgcctcagcttgccggtggtctcgccaatgaatacctcctcggccgaggggtccaggatccagtagttgcccttgccgggatcatcgtagctgcggggaatcttcgtgaagcacttgttcaggctcagattgtggcgaatggagttctgccagccccgcttgttggccttgaagtaggggaatctattgatcagatactgatagatgccattcaaagtcaaccgctgctcgggactatcctggatggccatcatgatgagggcgttgtagctgtatggcggtttcttggtatcgctgccggcggtcattttctgtttcttgctgggattgccatcctcgctctcctggtcctcgtccagctgatcctccagctcatcgtcgaactccacgtcgagcttgtcattgttttgcgacgatagactctcggcggcactgctcatgggtgtgctggtcctgctggggctgtcgaaatcctccgaagccgagagttcgccatcggaattggagtacggatgaacgtactgatgatgatgatgcaccggttcggttttgatgggttgagttgcggtgttgatgggtttcttggccaagatggcatcgatggagaagttgctcttgaattccatttcacttttcaccatttttctgattcggatatctttagatttttgttttctttggtttctgattctcacacacgacttgggatcgcttgagatgtttgctcttgagatgctagctctaagctgattctctacagccccggatcgggctatttatagtccaacccccggtcgctcgaacgaagtctacacgaagagagcccacaggccgaaagagacgggtagctaatgcgcacagggagtgcgaaagggatgggcatcaggtagttgggcagttaaaccctcttcacaagactccgccctccattttgtgaccattttgttccactcgccttccacacgaaactatatgttggctatatgtttgtagacgttgtttgggaacttgtggatgtttatttgcagtcttttgctgcttcggcgtcaaaatatccattacatccaatccaaacagggtcggtattttggggttgctctcagtgcgtctcgcttccgctcgctgttttgactattaattgcactaacaagcggcaataaaaacaaaaacaccaatttcgggcagttgcaatttaatcaggatgtttataattcgagttcgatgatttttgattgggatccgagagtaatttacaaattgggccatttctaatcacttcaatggggatgacatttacactttgtcagatattagagtgttctggcaatgacctaatttcagtcataattaactcaaagatattaaatatgcttttatagatataagtaaagatatttacaatgttctagaatattggattggtgctttgatccacttatcatatgacattgaattctgcgaaccactgcactagcgatctgcgacacagactcctcgagttgctcctaatcccgcccaaactagttcaagggtcgcttttgtggtccggggattatctgaggcagatcctgccttggcttacggcacgattttcaacagctcaatggagctcaggacgcagaacgcaggactcaggtaatccgaaggggttaaacctccgagcaccgggatttgttctagtttcgcgacagatttgcgaattagttctgggcgcgcttcgccagaatcaatgtggatctctggcaatcc

SEQ ID NO: 24818 - DNA, 1434 bp, DROSOPHILA
cagcttagagctagcatctcaagagcaaacatctcaagcgatcccaagtcgtgtgtgagaatcagaaaccaaagaaaacaaaaatctaaagatatccgaatcagaaaaatggtgaaaagtgaaatggaattcaagagcaacttctccatcgatgccatcttggccaagaaacccatcaacaccgcaactcaacccatcaaaaccgaaccggtgcatcatcatcatcagtacgttcatccgtactccaattccgatggcgaactctcggcttcggaggatttcgacagccccagcaggaccagcacacccatgagcagtgccgccgagagtctatcgtcgcaaaacaatgacaagctcgacgtggagttcgacgatgagctggaggatcagctggacgaggaccaggagagcgaggatggcaatcccagcaagaaacagaaaatgaccgccggcagcgataccaagaaaccgccatacagctacaacgccctcatcatgatggccatccaggatagtcccgagcagcggttgactttgaatggcatctatcagtatctgatcaatagattcccctacttcaaggccaacaagcggggctggcagaactccattcgccacaatctgagcctgaacaagtgcttcacgaagattccccgcagctacgatgatcccggcaagggcaactactggatcctggacccctcggccgaggaggtattcattggcgagaccaccggcaagctgaggcgcaagaatcccggcgccagtcgcactcgcctggccgcctatcgtcaggccatattctcgccgatgatggctgcttcaccatacggagctccagcttccagctacggatacccggctgttccattcgccgccgctgccgccgccgccctgtaccagcgcatgaatcccgctgcctatcaggctgcctatcagcagatgcagtaccagcaggctcctcaggcccaccatcatcaggcgccccatcccgcccagatgcagggctatccacaacaattgaacgccgagttgtttcagcgcatgcagttctttggcaagtttccatccagctaaatcttggcagtcggcgcagaaccaagcccagcgctttggatcgaaaaaaaaaacccagggacaaaagggtcgcttggggaagagctaggactggtaggacttcctgctcgcttgccccgtggaaaaacccgtgacgtctaaatgctgcatttagcaaattcctttggtcatcatcgcattgaccgcttcgcttcttcagcggctcctccgaatcgacttggaaagtcgatggttaacggcaatgaatgcgcagccaaatcttcaggactgctgaagaaggattcctgccagccgagagcccttgtagtttgctcaccaacttttgtacatatgtaattaggaaatataaaaaaaaag

SEQ ID NO: 24819 - protein, 322 aa, DROSOPHILA
MVKSEMEFKSNFSIDAILAKKPINTATQPIKTEPVHHHHQYVHPYSNSDGELSASEDFDSPSRTSTPMSSAAESLSSQNNDKLDVEFDDELEDQLDEDQESEDGNPSKKQKMTAGSDTKKPPYSYNALIMMAIQDSPEQRLTLNGIYQYLINRFPYFKANKRGWQNSIRHNLSLNKCFTKIPRSYDDPGKGNYWILDPSAEEVFIGETTGKLRRKNPGASRTRLAAYRQAIFSPMMAASPYGAPASSYGYPAVPFAAAAAAALYQRMNPAAYQAAYQQMQYQQAPQAHHHQAPHPAQMQGYPQQLNAELFQRMQFFGKFPSS

SEQ ID NO: 24820 - DNA, 3426 bp, DROSOPHILA; identical to SEQ ID NO: 2707

SEQ ID NO: 24821 - DNA, 887 bp, DROSOPHILA
ccatttgcagtgccagatgggccatctgatgtgcgccgcctgtttcacgcatctgctggcggatggacgcttgcgcgatcagattgccacgtgccccaattgccgcgtggaaatttctaagagcactgcgtcgcgcaacttggccgtggagaaggccgcctcagaattgcccagcgagtgtcaattctgcaacaaggagttcccatacaaatctctcgaacgccatgaacaacacgagtgccaggagcgcccgaccaagtgcaaataccatcgcattggctgtcagtggcggggaccctaccacgagaccaacgagcatgagcgcaactgcttgcatccccagaagtctggctacgaggtaatggcagccctggaggcccacgacgataggatcaaggaggagaagaagatgtttaacaccctgattgacttgcttagctacgagaagatcatattcaatgacctccaaatgaaaccctaccgcacagacgagtacgtgcacaagctcttttatgagacggcccgcttctcggccttcaatcaacagtgggtggtgaaggcgcgcatcaacaacagccagcgcgatccgcatcagtccaacgagcggaccatcacctatcagctgatcctcaagaccaagaccagcacgcccatgagcatacatttctttgcgctgaagggtccgttctcggatatgaaagtttccacgcagatatacaaacatgaattcaccgagacgagtaccgaaagcgagtactatgtcttgccattgccagatggagtcggcggtagcggctccagcgaatgcaaccgtatgctggccaacaaaggcattaacttccgcctgctcatgtttctgctgaacaagtagacgctttcgctgctca

SEQ ID NO: 24822 - protein, 284 aa, DROSOPHILA
MGHLMCAACFTHLLADGRLRDQIATCPNCRVEISKSTASRNLAVEKAASELPSECQFCNKEFPYKSLERHEQHECQERPTKCKYHRIGCQWRGPYHETNEHERNCLHPQKSGYEVMAALEAHDDRIKEEKKMFNTLIDLLSYEKIIFNDLQMKPYRTDEYVHKLFYETARFSAFNQQWVVKARINNSQRDPHQSNERTITYQLILKTKTSTPMSIHFFALKGPFSDMKVSTQIYKHEFTETSTESEYYVLPLPDGVGGSGSSECNRMLANKGINFRLLMFLLNK

SEQ ID NO: 24823 - DNA, 3489 bp, DROSOPHILA
aactctctgtaagttactatatatggattggttaatattctttagaaatgtagctatgcttttgaatcattgaagccaaaagtgcaataattacatttaaagcttaatgtgatcatgacactttgatttttaaactggctcttcatttcaatgaatgactgctgaaatccaattgatattggcgatgatgtcaaatctcacgcttttttttattaatttaggagcccccgtttttccaataactacttatcttcaagtgacaaactgtgcagacttatctctaacaatcgtattgggtcactttttaaacagtagacgaaatacatataaaatctctcttatctgcgaaaggaaggtgaggcaattgggtgtataaatttaatcataagtctcgaccaagttccactcgagatactttcaataaacaataataatgcgcactaaacgcgagcgtcgtaaacgaaataatttaataatccggccgacaattcaataattttgttaagtcatatgttttattattggaatcaagaaaatgatacatacaaagtggtataaataaaagaactgctttcgcttgcttgcttgcggtgtggaatctattgattaataagtttattaatattggatatagcgtgtatgtggatcctttttgctgatctatgtaattagcttctatgcatatgcgtttccctttctatccttcaaaacttctacctcgccgttctcgtcgctttcggcgtacaaaaagtgaataaaaatatattgaatatttttaagtgcgaacaaattgggattacaatacttcatatataagcttaaacataaaatatatagaaaaaacatgaagaaaatatatatgttgattagacatgaaaacataaataaaaaatattgattcacgaataaacttaggattaatacattcctttgttttgttttgttttttttttgacattttttagttttctacttttttttacgttttcgttcgatttttgttgttgttggatatagtttaatatagtaatttgcgatcaggctcttaacgtggctggccataattgaaagtctaccaaaaatgaagccgctccgaagacaattttcaaaacgattttcgactacataaacaacgcgaagattcaaaaaggattgatttgctgattttcactgaacacatattgagctcaatatgtcattgtatctacggctggctaataaaagttatttgcggaaactacgaaacagaatattggattgctactgatattacttcttctttgtttcgtttctgtggcgaaaatcgtccccttgccgacgaactactcctcgatgctgtagaggaagtagtagttctcgttgtcgttaatggcagccggcggtgcctgcggtgccttcctggacagcggctcgaagcccatgaagaggaacgcctcgatgaggcgagctcgatccggctgatctttaggcattaccataacgatgccgtccacctccagcttctcctcggcgaactccagaagcgagatgaaggtctgcttggagccggccggaggaaggtccttcggtagagcgacatacaacaagttgttgactgggttcagaatcgtattccaattggtgtactggtcctcggtgacatgcagcttgatggtgatctgcaccggctggtcgtgctgcaagatctggcgcagcacttcctggcagtcatcgtccgagcacagcgagtggatgtcgggctgcgactccaagtcggagcaatccgactgggaggacgacaacgacgacgcccgggagctggcctcgtacaggctgccaccagccgagtcgaccgaagacttacggctgtagcctacacggaaggaattaacacattttagcataataagtacttaaatggttagttattattactcacccgtcaagagcgatgccctatcgtgatctgttctgtggtggacagggacatcaggaccaccacagaggccctacgccgagagagatgcggtaggactccgaggacatggtcgtggcgcaagacgaagtcgagatggtgcggagcttgccgtcggcaattccgctgtcattaaattctcttctaacgaagccactactaaacactgggtcgctgtggaaaaaaaattgggtatttagtcaaaaaaaccccatatcgaactgcgatgtgcctgttcgattttgtagcgcaactccatctgttggaaagtttatatcccctttttaatggcaagcatatagcgaatattcccatgtttttataaagattatttcccatttacaaattacttatgtgaattatgaattgaatttataaacccgaaatctttaccacaacatggtgtagagtaaaactcaattggtaactgaacgtcgcaaaagctgctaacaaactgatggccacgaaggcagaacgaaaggcttatcagcgaagcggcgacaatttaattatttcgcttttatgacgctaacaaattgcagttgtttattttaaagcgataagatacgcccgcgcgccttatcggcaaaccgataagctgtttccgatagtcacgcagcgcatgcagccctgcgctcacgcaccaccaatttcaccacaagatggccgccggcagctgtcaaagcgggagcgagcacgcaaacacatacactcgcaaacactcggcataaacgcttgcacaaagaaaaacggagaaaaaatttagcggtttcggtggaaaaaaaaacagtgaaaaatatatagttgaacgaacaagaacagacagcaacacaccaagctagcgaacatgtctatcggagtgcccattaaagttctgcacgaggccgagggccacataatcacttgcgaaaccatcaccggcgaggtgtaccgcggcaaactcatcgaggcggaggacaacatgaactgccaaatgacccagatcacggtgacctaccgagacggacgcaccgccaacctggagaacgtctacattcgcggctccaagatccgattccttatactgcccgacatgctgaaaaatgccccgatgttcaagaagcagacgggcaagggacttggtgggacggcgggacggggcaaggcggccattctgcgcgcacagggtgagttgggcactttggcccacacacacacatacacattcactttttgcacggactgcctttaaaaacaaaatattttctatgctctcgtttaacttctaaatttaactaaaatatttgctatcccaatttaataatccaaataccatacaatttttatgatagtaaaaaaaatggtagtaaaatttatagaatttaatatgtataaatagtgctacaaaaaatatattaatgcagggtttagtttgttttaaaaactgagctgatagttttcgtcaaatcatatccctcccatttaattcattaatttcaaaatttaaagtattaacgtatgggtaaaataagaaacatgctaaggtagtaagtttg

SEQ ID NO: 24824 - DNA, 1204 bp, DROSOPHILA
ttgttagcgtcataaaagcgaaataattaaattgtcgccgcttcgctgataagcctttcgttctgccttcgtggccatcagtttgttagcagcttttgcgacgttcagttaccaattgagttttactctacaccatgttgtgcgacccagtgtttagtagtggcttcgttagaagagaatttaatgacagcggaattgccgacggcaagctccgcaccatctcgacttcgtcttgcgccacgaccatgtcctcggagtcctaccgcatctctctcggcgtagggcctctgtggtggtcctgatgtccctgtccaccacagaacagatcacgatagggcatcgctcttgacgggctacagccgtaagtcttcggtcgactcggctggtggcagcctgtacgaggccagctcccgggcgtcgtcgttgtcgtcctcccagtcggattgctccgacttggagtcgcagcccgacatccactcgctgtgctcggacgatgactgccaggaagtgctgcgccagatcttgcagcacgaccagccggtgcagatcaccatcaagctgcatgtcaccgaggaccagtacaccaattggaatacgattctgaacccagtcaacaacttgttgtatgtcgctctaccgaaggaccttcctccggccggctccaagcagaccttcatctcgcttctggagttcgccgaggagaagctggaggtggacggcatcgttatggtaatgcctaaagatcagccggatcgagctcgcctcatcgaggcgttcctcttcatgggcttcgagccgctgtccaggaaggcaccgcaggcaccgccggctgccattaacgacaacgagaactactacttcctctacagcatcgaggagtagttcgtcggcaaggggacgattttcgccacagaaacgaaacaaagaagaagtaatatcagtagcaatccaatattctgtttcgtagtttccgcaaataacttttattagccagccgtagatacaatgacatattgagctcaatatgtgttcagtgaaaatcagcaaatcaatcctttttgaatcttcgcgttgtttatgtagtcgaaaatcgttttgaaaattgtcttcggagcggcttcatttttggtagactttcaattatggccagccacgttaagagcctgatcgcaaattactatattaaactatatccaacaacaac

SEQ ID NO: 24825 - protein, 199 aa, DROSOPHILA
GLCGGPDVPVHHRTDHDRASLLTGYSRKSSVDSAGGSLYEASSRASSLSSSQSDCSDLESQPDIHSLCSDDDCQEVLRQILQHDQPVQITIKLHVTEDQYTNWNTILNPVNNLLYVALPKDLPPAGSKQTFISLLEFAEEKLEVDGIVMVMPKDQPDRARLIEAFLFMGFEPLSRKAPQAPPAAINDNENYYFLYSIEE

SEQ ID NO: 24826 - DNA, 3052 bp, DROSOPHILA
aactgaattgatagggtatccgcaggtcgaccattggtgcaatgagcagcggtcatcacaaaatgttttgaaataatagaaccaccgcaggaatgcgagccatcgtagctccttagggatacctacgatttggaacagaaaatatagtatcttgacattattaattaaatataaataatatttaatccgaaaataccagaaatccgttgattaagtaattgtcctcatttgggacacttccggtatattttaatcatatatcctatttgtatactttttttaaggattatatttcacttaacattttcttaccacgaaaggatatttcagcacactggagtccgtaccattgaccacccttgatatggaaggcgcggcctgaccaaccgtagttacggccaggataacgattaaactcagactgagatcttgattcgacaacatatttggccaataaatggcaccccctggttggctaccgcttttataagctcgccgaatatgcaagattaatattatttacgactttagataggcggttattgaatctgtcgtcattgatataaaatggtaagcttcaggctcccaaaaaccattttaaaaaagaaagccacaatgcgcaaaataatatggttttcccaacgaactttgtggctaaaaataatgaacgaagctatcggacataagtttatatttgtaaataaaacgaaaattaccaaatgccatttgagattaaagctaatttaaatacatgttaattaaccaacttaattgttctacaattggttttttaattggaaagaattgaaggtcgactttaaattcacatagtaacttatattaatctctggcttaaatgattttaaatcaaattattgattaaattctattataggaaatgggatcttaacccaatattagtatgatactccttatcaaagaaacaggcaaatcccaactaactcacttgacaccgatttatggcttaagaaggcaccaatttaatcattcaatatcaattttatttattgcacgcatagcccatacactattcactcagataatgcgatgactaggccaagatgatctggctcttcttgatccagtcaacatactggctgaccttgcagtaaacacccggatagggtgccacggtgcagggcttgatgctccacgacacgatgcccacctgctggccattgtagatgaggggtccacccgaatctccgctgcactgtcccttgccaccctcgtccacccctccgcagatgtggtacctgggatcggtgcgaccgccatggcgttcggtgcactcctcgtctgagtagaccttcaattccacctcctgcagtgtggattggatgtatccgccagtctaaagatattaacgcccggattagatccttgaacacaaaatataagatgaatgaaaaccaaccgcattgagtccccatccgatgagcactccctcgccaccggcatccgtttgaggtgtggcaaaggcgagctccggcaactttacgggtgcaaccgtgacgccatcaaactcgaatggctcctccacgagcagcagtgaaatatcgttggcatagttgttgtagggattataatcctcgtgctggatgatcttcttcacgcgcaccacattcggaccggtggcattaatcttagtcactccatactgaacagacaaatccgatgccttgcgtccatccgtacaatgagcagcagtcattacaaactgcttggaaataatggagccaccgcaggaatgcgagccactggatccacgcatcgaaatctgaaagatattaagataaacattattttcattccacccacattacgacacttgatccaacttaccacgaaggggtatttctccacgctggaatccgtgccattgaccacacgacccatttggggagctccatgggaaatgcccgcggtggtcaagagggcgaataccgccaggcagagatcctgattccgcgacattttttcagctaaaaatgagaaccctatcgtccgacagccgcttttataagccttctgacattgccaattcacattgattacgattatttacagcaattgataggacgagattaaaccttctcgattaaatgagagcgccactatcgcgttatcttgaccaacatcaaacgaaactgcttcgattatatttaaacaattttaatcaaattaagcacaatgaacagaatgaaaaaaatgagcggcggtttcgaccagccctggaatgtgatggttctcaatgaagtgcgcttaaaatagaaaatcaaagaatttaaaacttaacaacggattttagctgcaaacaagtgggtgggttagtatacaagtaaaaggccatcggtgttaggacttacataacaattacgaataggaatagcaatatatatagacatagggttcttggggagcgttacaaatagcggtaatgatactgctgtacatagaaagcgaatctagtagagacatttgtatatctgtatattgtatataagatcatagaagtctattgtactaagcgatgctccttgcacatcgacctacaaaaatactctaacaaatgcgcaccaggcgccgaattcaattcaatttttttttgtctattgtatgctgcagctgcgtaccgtggacaacttctgctcctcatcgtccaagtgcttggcgcttaaaatgctcttgatgctctccgcctccttcatccagaattccagcttaaatattgtttcttattggtgaatttattagcattaaatgcacattttgctaacctgctgcagcaacagattacggcgttcgccctttggttcattgtttacaaacggcaccagaatgcccaaagctgaagtatacgactccagtgctgcgtccagcttccgctcgtagaggtatagctcacccttccgtccgatttccaggccagtcttcatggacggacttgagttcgaaagggcatctaaaaaatggaggaggacggtatggaagaacatcaagtttacaaaacaaatcaaatcatacatag

SEQ ID NO: 24827 - DNA, 924 bp, DROSOPHILA
aaggcttataaaagcggctgtcggacgatagggttctcatttttagctgaaaaaatgtcgcggaatcaggatctctgcctggcggtattcgccctcttgaccaccgcgggcatttcccatggagctccccaaatgggtcgtgtggtcaatggcacggattccagcgtggagaaataccccttcgtgatttcgatgcgtggatccagtggctcgcattcctgcggtggctccattatttccaagcagtttgtaatgactgctgctcattgtacggatggacgcaaggcatcggatttgtctgttcagtatggagtgactaagattaatgccaccggtccgaatgtggtgcgcgtgaagaagatcatccagcacgaggattataatccctacaacaactatgccaacgatatttcactgctgctcgtggaggagccattcgagtttgatggcgtcacggttgcacccgtaaagttgccggagctcgcctttgccacacctcaaacggatgccggtggcgagggagtgctcatcggatggggactcaatgcgactggcggatacatccaatccacactgcaggaggtggaattgaaggtctactcagacgaggagtgcaccgaacgccatggcggtcgcaccgatcccaggtaccacatctgcggaggggtggacgagggtggcaagggacagtgcagcggagattcgggtggacccctcatctacaatggccagcaggtgggcatcgtgtcgtggagcatcaagccctgcaccgtggcaccctatccgggtgtttactgcaaggtcagccagtatgttgactggatcaagaagagccagatcatcttggcctagtcatcgcattatctgagtgaatagtgtatgggctatgcgtgcaataaataaaattgatattgaatgattaaa

SEQ ID NO: 24828 - protein, 265 aa, DROSOPHILA
MSRNQDLCLAVFALLTTAGISHGAPQMGRVVNGTDSSVEKYPFVISMRGSSGSHSCGGSIISKQFVMTAAHCTDGRKASDLSVQYGVTKINATGPNVVRVKKIIQHEDYNPYNNYANDISLLLVEEPFEFDGVTVAPVKLPELAFATPQTDAGGEGVLIGWGLNATGGYIQSTLQEVELKVYSDEECTERHGGRTDPRYHICGGVDEGGKGQCSGDSGGPLIYNGQQVGIVSWSIKPCTVAPYPGVYCKVSQYVDWIKKSQIILA

SEQ ID NO: 24829 - DNA, 4891 bp, DROSOPHILA
aggcccgcaaaaacaacggcggatcaacagttgctagtcgcaagttgcaaatcgctagttgcacgttgccaatttgaaattgcacgcttccacgactgagagcaggaaggaaaggaatcgctgccgcagcaggaagcagacgaaacttcgctgggcgaaagtaaaagcagggttgggaaataaagcaaatcaaacaaacaagaaatcgaccgcacagacccacaaaggcgctttagccagccatggaacgtgaatctaacccaatgcaacccatgtgccgctccggttgcggcttctatggtaatccagccacagatggtctctgctccgtatgctataaggtgattattttcgttaagatccagcaaatgaacgcaaatattaatccttgttgccttgtctatccctcaggactcgcttagaaaaaagcaacagccacctgtgagcagcacacctgtctccgttccaagcccacaacctagccccacattcagtccggccatcgcaatcaccaacaccgcacagcccacagtcaccagtttacaacagccacacaacgatgtcaaagaggtgagcagagttacggagatgtttgcagaggagtagttccagtttccactatcaagattagttgtaatttcaaatttaaaaacgtctttcagtcttctttaaaagctatattttgtactcctgaaaagcggtcctcttagcttagtaagcgtttcttgaaattagaaactggaactagtctagtagaatagtaactaagatccttgcatgttacatacttatggaactttttcaaatgatgatacttccatgcaccactctgaagcttttattagcattgtgcagattatggatttctgaataatgaaaaatttcataatttaatacatgactgctttgatttgcacgaaaaccacataggctcggcgttttgtgccctgtttagtatatttttacattcagtcagtgataattacttttgactttcggacataaattcagtgtaatcttaagtgaaattgttgaaacaatttgttgtttgtgcaaatgaacattaggggaaatcaagaagttggcttgcggtgtcgatttagtgatctctgtaacttttgtgtccgtgtggatgagtttactatcctgatgatcctgccaccaattactccgccgcatttgtaaataaggtaaagtgtccacggtctctatccgccagtgaccactccaagaagctgccgcttcagttatacaataatcttagaacgacttagagcggggattctgagatttcgtttcagttttaaagtagagtaccattttcctttgatcttgttcgataattgcgctattttcttcttagttaatgtttgatctgtaagcgatctcagaagcccttattcctgcaagaaatcgttcggtttaatgtcacttatttgtcaattccattcggtttcagtttggcagtagcttctgctcggaatcaaaattttcctatatttcggcccttatttcaaaattaaaagtctttccaaattgttaatatggtagttaccattgttgcctctccgcataaaaaaactggtcgtgtggtacctcccaaaagtaccccagttgccgacaaatctcgatccgtttccacgcttctatcgactcataagcgaaaggggccgatgagccttggaatcaagcgtgccgcagccggcgcgctaacgagtcttagcggaccgatagccgccggacctgtgggccttggcctggtcactggaacggataggaatggattcccgcaacacattgcggcctcaaagggtactgaatgttcttactgggtctaccggcgtcgcccaggcgcactaacctcgtttcccacctacacatctctcctatacttcgatgcgatgttgcagcacaagcgacagcaacccgtccagcagctccgatcccgccgccacgctcatacctccgggcagggacatcagcagcacccgcttctgcctccgctcgccttgctgccaaggtgcctggtgccccagtcgtcggattggtctcacacaccggaagcagcaacataagccaacctccgtcagtcaccaagaagagctccctgtccagccgtaagcttggaggtggcaaaaccacagattccagcatcaagcggcgcgtaaagttctcggcaaatgtgcacacattcccttcccttacaaacaccaagaagtccacccggattggcgagctacagctgaagaagaaggtaaagaagctgaagcggatccgatcgcgtcgggagggcggaagtggtgagacagcgcgtgatctccttaactcaagtggtatagccgcaagtaatctggacatttacaaacacggcgttatcgttgatgtggaaccagttaaaacaccagaaccaccacgtgttctgcgcctaaacgttgtgggcaaatcatcgccggcgacgggaaaatctgcattaataacagcgctgcggcgtaaggctaaaagatcagcagaacaggaagaaaagtccaaagaatctatagctactgctacaggtagtaggaccggaaagcccaagacaaagacgatcagaaaaagtggtggtagcagcgcgaagactctgctcgcatccagctctcatttggtggatagtagggctggcttagaggggaggaagaaatcagtagtaacggcggcaactgccagtcagcgggttagtcataaacaaaaacaaaatgggcggcgaggccatggaaaaatctgaaggcggcgatcagccggagagtgctggcgagaaggagcaggtgcatcaaggagcagaccaacaggttcaacgggaaaagcgtcgtcgaagtgtgtctcctgatgggggcgatgtaggcagtgtaaagatggctgatgtggttttagaaggcgcatcggatgttgccgtaactaagaagcgggtaaacattaaccacaacacatcatcatcgcatcgccactcttgttttcctcacaaaatagattctcactcggccgattcgatacgtattcttggcaacagttgtacagttgacggtgctctgctaaagccgaaaaaacgccactcaacgccacacagcgaatgctaatacattttgatgaaacagtcgaaattgtttagtctaataaaagaggaaataatatactaaagcaaagttcttcaaggctttttgaatgcagatcgaggcggcggacgagaatgtatagttgtggtttaaataatagatgctgtgtttcctgtgtttcaatctacaattaaattaagagattaatagagattttccattccctttttgatttgtaaagctctcgcccttcactattattttgcgctcagctatggaaaagctttctttctgttggaaaatggctagcaaatctgttgatgctatcatatatttttgtcatgtgattgaaattccgtttttgttttatttccgtttccgcagaaaatcaccgaagaagccgccgctgctgccaaagtcaacagcgaagccatcacatcggcgactggtccaaacacttccacacaagcagccgcctccgccaacgaggaggatgacaaggacaaggaagacgataaggatgccaaaaagaagaagaaccgatgtggcgagtgccgcaagaaagttggcctgaccggtaagtgcccgccgtgctggctcttgtgttcccaaatgatggtacatcatttctaacgaaatccatcttttaattgtaggtttccagtgtcgctgcggcggtctgtactgcgccgtgcatcgttattctgataaacataactgcacattcgattatagagagcatggcgcacaggaaatccgacgcaacaatccggttgtcgttggcgagaagattcaaaagatttgaatttcgatattgtgccagtaacagtaacagtagccgtagaatgataataaccaactacacatgataagagtacatatatatatatatgctgcgctataacaaggaaagcaacaagaaaaacaacaccagcagaaagcataaacacacaccacacaaaatcacacagagtaatgctaaatgaatcgataaaaactgtaattgtaatttaattataatgtaaacagcaatttcaagcaacaatagttcagagaaacgataaccaaataccccgcaaaaatgaagcaacaactggaacaacaatttcgatgctcaacaacgttaagctagcaacgtccagcagcaagctgcggcagcaacttgccacaatgcaccaggaagcagcgttcagcggccaacacctttgaaccagacgcgtgacagcgttagcaagtgcaacaacaatcaccgccgcgtttgtggaatacgcagagcaaacgcagcaacatcaacaacaaccagcacaaccgattgccttggtcgcctgctgagctgggccgaaaaaaaaacagtcttgaagaaaacacctttcatcgatcaacgttgaaatagtttgttattccaaatacaatttgaaaattgtttgtatttagctaaaaatccaacaaacaacacacggccacatttgcaacgacaacaagcacacaacaaacaacaaacctttgtttcatgttatcaaacaccgcaacaatcttttagtaagacaatgtgtgtcatttgtttttgtaatatgttggagtgtattaaataaaaaaaaaattcaaaatgcaaagtatgaaaagaaattttaagaaaaatttaacaaacccaaattcacatacaaaacaaaaaaaccaaccaagcaaccaactctttctcaattcttaattatgagctattaaatgaaaaaagaaaaaaactaatatatattaattaattatgtatatgtattaaaaaagaaaaagcaagaaaaaaatatgcaaaa

SEQ ID NO: 24830 - DNA, 1509 bp, DROSOPHILA
cataaattcagtgtaatcttaagtgaaattgttgaaacaatttgttgtttgtgcaaatgaacattaggggaaatcaagaagttggcttgcggtgtcgatttagtgatctctgtaacttttgtgtccgtgtggatgagtttactatcctgatgatcctgccaccaattactccgccgcatttgtaaataagcacaagcgacagcaacccgtccagcagctccgatcccgccgccacgctcatacctccgggcagggacatcagcagcacccgcttctgcctccgctcgccttgctgccaaggtgcctggtgccccagtcgtcggattggtctcacacaccggaagcagcaacataagccaacctccgtcagtcaccaagaagagctccctgtccagccgtaagcttggaggtggcaaaaccacagattccagcatcaagcggcgcgtaaagttctcggcaaatgtgcacacattcccttcccttacaaacaccaagaagtccacccggattggcgagctacagctgaagaagaaggtaaagaagctgaagcggatccgatcgcgtcgggagggcggaagtggtgagacagcgcgtgatctccttaactcaagtggtatagccgcaagtaatctggacatttacaaacacggcgttatcgttgatgtggaaccagttaaaacaccagaaccaccacgtgttctgcgcctaaacgttgtgggcaaatcatcgccggcgacgggaaaatctgcattaataacagcgctgcggcgtaaggctaaaagatcagcagaacaggaagaaaagtccaaagaatctatagctactgctacaggtagtaggaccggaaagcccaagacaaagacgatcagaaaaagtggtggtagcagcgcgaagactctgctcgcatccagctctcatttggtggatatcagcgggttagtcataaacaaaaacaaaatgggcggcgaggccatggaaaaatctgaaggcggcgatcagccggagagtgctggcgagaaggagcaggtgcatcaaggagcagaccaacaggttcaacgggaaaagcgtcgtcgaagtgtgtctcctgatgggggcgatgtaggcagtgtaaagatggctgatgtggttttagaaggcgcatcggatgttgccgtaactaagaagcggaaaatcaccgaagaagccgccgctgctgccaaagtcaacagcgaagccatcacatcggcgactggtccaaacacttccacacaagcagccgcctccgccaacgaggaggatgacaaggacaaggaagacgataaggatgccaaaaagaagaagaaccgatgtggcgagtgccgcaagaaagttggcctgaccggtttccagtgtcgctgcggcggtctgtactgcgccgtgcatcgttattctgataaacataactgcacattcgattatagagagcatggcgcacaggaaatccgacgcaacaatccggttgtcgttggcgagaagattcaaaagatttga

SEQ ID NO: 24831 - protein, 178 aa, DROSOPHILA
MEKSEGGDQPESAGEKEQVHQGADQQVQREKRRRSVSPDGGDVGSVKMADVVLEGASDVAVTKKRKITEEAAAAAKVNSEAITSATGPNTSTQAAASANEEDDKDKEDDKDAKKKKNRCGECRKKVGLTGFQCRCGGLYCAVHRYSDKHNCTFDYREHGAQEIRRNNPVVVGEKIQKI

SEQ ID NO: 24832 - DNA, 3402 bp, DROSOPHILA
aaggaggaaaacgggtgaaaacgttatcgttgttattgtttcatttaaggttgccagaacaactcttatcagctcgtcgtcaggccaggccccataaagtgaccagccggcaattgaaacgcaaaggtgccgtatttacgacccaatggagtctcctcatccactcatccactatatataccagttccgattattgtcgcactcatcagtattcggcgagctgtttaacccggaggatcctagattgatttttttttgcaatgtcccaggcagtgaaaacggaaacgcccaaggaaccaaatgttgtggctgccaaagccaatggcggcaccgctgtcaatggaaagttggaagcccagaagagaccccggcatgtttctggtggtgtggaggaaatcatcgatcccttttgcaatccggagaaaccgcaacgcatatccttccatgacgtcacatccgctgcctttctcatccgcggtggcgtggaacgcactccttgtccggtagatattcatgcaattgatattttggagtcccagattaagtgattgacttacagaaatccacatcatcggatctatatggcatggagttatatctgaaaaaggatttcctacaatatacaggcaggtaagttatcaaaatttaaaagagatgatcaggtctttcctcctgtctgtctactttttaattgcacttatatgtaggtccaaagtgcatttgcagttcggctttattattgtttatactgataggtttcgctcaacatttagtaatcaattagtatactataaatattgtctgggagaattatttgagtactttgataagcggctgtatttacatgcatttcacactcaaaataaagctgcaaaatacgattatacaattttgacatgtattttacataattattacatattatgcatttttagctttaatacttttgtttgtttttaccttagccactttatttcgcgtcgtttaatagagtacgtcgcatttctattattacgccaaaaatttcgttgataaatttggctgcacataaaagtcaaagatccgataagatagggtttaattggtagatatggttcgattggctcaaattaattgctgttgctaattgatatttgattttgtgaacaacatgtgactgatatgcccaattcacaattttgacagcttcaaggagcgtggcgcacgctatgccttgctatcattgaccgaggaacagaagcgaaccggagtgatcagtgcctccttgggtaatcacgcccaggccctgtgctatcatggctggaaactcaatataccagtgaccgtggtgatgcccaaggcggcgcccatcatgaagatccaaaagtgccggaactacaaggcacgcgtcatcgtcgacggaaatgacatgggcgaagccaagtccctggccatgcgaatgtcccgcgaggagggactcctgtacgtgaatggctacgatcatccgcacattatggccggccagggaactattggtttggagatactcgaacaggtgccggaaccggatgcagtggtggtgccagtgggcggcggtggactgattgccggtattgccacagccgttaaagctttgtcccccaaaaccaagattattgtaagctatatttttattattactttctttgtatgtcaccttattgttttttaacagggtgtggagtcggagaagtgcgccagcttcacccgggccatggaaaatgatggacctattcacacgcccatcaagaacacattggctgatggcttggccgttcctaaagttggctataatgcctatgccaccgcaatgccgctaatagatcgcatggtggtggtcaaggaggagtggatcgcagtggctatcctaagattggtggaggaggagaagtgcgtcgtcgagggagcgggtggtgcgggtctggcggccattctggccggacacttggatgagctcaagggaaagaagtgagtgctttcagtttacttaactataatttctaaacatttctttgttttttttttatgatagagttgtggtgcttctgtgtggaggaaacatagacaccaccgtttttggacgttgtttggagcgaggtttggctgccgttggacgcctggttaagtttaatgtggaggttagcgatcgtcctggcggaatcaacgatctttgcgccctgcttgtccgagtaggcgtgtccattaaggacatcatgcacgagcgagcctggctgagggatgtttataccgtggaagtgaaggtcgtgtgcgaaaccgtggactggacccatagtttgcagctaaaaaacgagctgaagaagttctactcgaaagttcagttctccgatgttccgctggccctgtcaaatgataccgattcgtaggattctcttctgtatatatatatatatagtacacatatgatttattcacttcagcagcgcagcaaaacttaaagctttaacttagagcttagttgtattagagtaaacataatcgtagtcgaagtagaaatgtaaattaggtgtaaataaatatacatagaatacaaagtctagaaacaaattgacaaacgtagggattgcataatatacaaattatgaatcactgcctaaaaactaaaacacaaacaactaaaaatatataaattcatgagcttaggttacgaacgccgttcttcaagcagacacacaatatcagttttattttattttctcttatctttttttcgtttcacttttttttttgttttaagatctcttgcggtttttggcacattaaggatttataacatacgctcagtcaggcaaacacacactacagtacacatcgaaatttacatttacatggctagaaaatatatatgtctctatataaatatggtttatatggtaaaatgtatagtaggtatgtgctatctcataaatacaggcaactcgttgtcaagtcctcggacgtaacgtactttaaaagcgctgactaaatctacgttgagtatacgctaagtgttccgcatggagccgctcttagtggctgttgtccaggcgcagaatcagtgcatccaccacattgtagatctcatcgaaatgcggtcgggattcggcgtcggctgcccagcactggagcatcagtcggtacatctcctcgggcgtgctcttcggcgttggcatacgatatcctagagatcataagtcacatatcatattcttttcctattaaaagcaaatctagtagtatttacccgtatcgatgcgctctctggctctggagttggtcatgccggagtagggtgtgtcgcccttggagaagatctcccacatcagtatgccataggaccacacatcgcacaacgaagtgtacttgccgaaattcaaggcctcggga

SEQ ID NO: 24833 - DNA, 1189 bp, DROSOPHILA
catttctattattacgccaaaaatttcgttgataaatttggctgcacataaaagtcaaagatccgataagatagggtttaattggtagatatgcttcaaggagcgtggcgcacgctatgccttgctatcattgaccgaggaacagaagcgaaccggagtgatcagtgcctccttgggtaatcacgcccaggccctgtgctatcatggctggaaactcaatataccagtgaccgtggtgatgcccaaggcggcgcccatcatgaagatccaaaagtgccggaactacaaggcacgcgtcatcgtcgacggaaatgacatgggcgaagccaagtccctggccatgcgaatgtcccgcgaggagggactcctgtacgtgaatggctacgatcatccgcacattatggccggccagggaactattggtttggagatactcgaacaggtgccggaaccggatgcagtggtggtgccagtgggcggcggtggactgattgccggtattgccacagccgttaaagctttgtcccccaaaaccaagattattggtgtggagtcggagaagtgcgccagcttcacccgggccatggaaaatgatggacctattcacacgcccatcaagaacacattggctgatggcttggccgttcctaaagttggctataatgcctatgccaccgcaatgccgctaatagatcgcatggtggtggtcaaggaggagtggatcgcagtggctatcctaagattggtggaggaggagaagtgcgtcgtcgagggagcgggtggtgcgggtctggcggccattctggccggacacttggatgagctcaagggaaagaaagttgtggtgcttctgtgtggaggaaacatagacaccaccgtttttggacgttgtttggagcgaggtttggctgccgttggacgcctggttaagtttaatgtggaggttagcgatcgtcctggcggaatcaacgatctttgcgccctgcttgtccgagtaggcgtgtccattaaggacatcatgcacgagcgagcctggctgagggatgtttataccgtggaagtgaaggtcgtgtgcgaaaccgtggactggacccatagtttgcagctaaaaaacgagctgaagaagttctactcgaaagttcagttctccgatgttccgctggccctgtcaaatgataccgattcgtag

SEQ ID NO: 24834 - protein, 316 aa, DROSOPHILA
MPKAAPIMKIQKCRNYKARVIVDGNDMGEAKSLAMRMSREEGLLYVNGYDHPHIMAGQGTIGLEILEQVPEPDAVVVPVGGGGLIAGIATAVKALSPKTKIIGVESEKCASFTRAMENDGPIHTPIKNTLADGLAVPKVGYNAYATAMPLIDRMVVVKEEWIAVAILRLVEEEKCVVEGAGGAGLAAILAGHLDELKGKKVVVLLCGGNIDTTVFGRCLERGLAAVGRLVKFNVEVSDRPGGINDLCALLVRVGVSIKDIMHERAWLRDVYTVEVKVVCETVDWTHSLQLKNELKKFYSKVQFSDVPLALSNDTDS

SEQ ID NO: 24835 - DNA, 2897 bp, DROSOPHILA
agttgtagaacttgatccgcctatctatggataagtaaaacgattccggatttagtcctgactccttccttgggccaactcgggtgtcaccgaattcagcgtgccattggcgacagccattcccaatttcggcagcttgtaactgggtggctcccgcagagatccgctcgccaggatctcatcctgcgccatgtgctggtccaggtttctgcggaagctttcgagagcaatgtcactgtcgaacttcggcatcagcacacagtctatgcaaatgaccatgtccactgtatcgggtgccattgtcgcgtaaataaaactgtagaaggcgcccaatgagtgtcccatgagcgaaaccttctcccaaccaaagtgcttcataatccgcggaataatgaacacgtcgttgtacacatcatatcgaattcccagtggcagaggcgaggatcttccatgtcctggtaaatcgatgcagagcactcccacgtgaccgggtagcagtggaaccaggcgatcgaaggtgcccaggttgtccagccatccgtgtagtgccaggatggggcgttccgttcgatttccataccatcttcccgaaatgtagccccaaggagcaggaattttcagttccttgcactgtaggcataatgaaatttctatgaaattctatacggcatctgttccttacttacttcggtaactggaagttgctgcaacatggtttttagtttatgcagcaaacggcgtttcaaacgtctttttgctttgacgatcagtcaacgacttctttaaatttttatgttgctgctgctttttggcgctaatgtttacaatatcagtaatcgagatacgctaaaaaaagcttcccacataaaagcttttttgattacaaaacgcacaatataatcttaaagcaggggaacctaattgtactctgcatctttcctcaatttctagtttattttactatttccaaatatgtgtttcctaaaacttaaatagcacattaaagtttgctgcttcttggaggtctgtgatttcggatgaagggaacgatatagcgggcacactcctcggcggcatgcaggtggacatgatgcttgccgccctccacttcgtagaactcaaagttgggattatcatgtgacagaatggacattgtttcgttgcatcgaggtcccacaaatggtgaaagggatcccttaattaccagatagggtttcttctcaatacgcctcgccatttcaagagcaagtccgttttcaatgtcgaatatgtgatagaactttacacgtccatctctggagaagaataccttttccgggtacatgtttgatttggccacctggcggtggagcatgtgatcggccaggtgttgcggcaccgagttgttgctgttcctggcgagcgtctcacgcagcttactcaaggtgaacgatggcggctcatgttcggtgccatccgcctgtcgcctctcctccagcaaataaccttctatgtccttggtcaacttgctgggatcctcgattctccgcggcagcagtacatccaatgatataatcatatcgactgtgcttggtgccatggccgcgtacatgaagctcatcacacctccgagggaatgacccattaaggagaccttggaccagccgaactccttcatcaccctcggtatgatgaacacatagtcgtagacgttgtagggcacacccggcggaagcctagaagatctaccatgtccgggtaggtcgatgcacagcacgcctatgtagtcgggaagcaggggaatcagccgatcgaaggttcccagattgtccagccatccgtgaattgccaaaatgggtctatcagctcgattgccataccaacggcctgctatgtgaccccaaggtgctggaatcatcacctcttcatactgcaggcgtttctaaatatatatagaagaaatcaatattcaattgaatattcattttaacaggataaactacataaatttattgcaaaattgatttaagtgcaagagtatgaaatattccactggcataagtacacacttttctgctttttgttttgattacttacatgcattgcttccttgtagtttgttccaccgaaaatgtaattttctactaaaatgcttttttcattcttattcaaacaaccgtttctgatctttgccttcaatgcaaagttctgttccagttattttgacagagtattatctttactatcttatattcatatcacatcaaccgatgtgaattaccaaaatttgtagcaacgactttcaactgcgacggctttttagcgactaaattgttttcgtgacaatgatcatcccagcaatataaaatctgtgaaatatataccataatgagcaaaaatgagacagatggtagtgaaaaaataaaacaggaattaacccattgtaaaaaagggctaccaaacattttaaaaagaatttaaatatgtttaaaaatatactgttgaattaaataaaaaaaatataaacatagctacacttattgttttttaaacatttgttgaaccttatcttacataaattgaacttgttatattttatgaaattcctcttcggcgttcaggtttcgtgctcaaattcgcccataggtatacgtgggttaaggtcgaagagcgaagtatatacatacttctgagattagggaacaactttgagtggtgtatgtaaacaaacacaattcaactgtgctgttatgtatttgcatttagttttttgaaattcgggcgatgatcctcttatcagtttcaaaatcactacattcttcaccaaacctcttgtagcatgacattgcccagtttggaccacctgatggtcggtcatcgacgtccggtctcaataaactgccgtgggattttgggaa

SEQ ID NO: 24836 - DNA, 897 bp, DROSOPHILA
atgattccagcaccttggggtcacatagcaggccgttggtatggcaatcgagctgatagacccattttggcaattcacggatggctggacaatctgggaaccttcgatcggctgattcccctgcttcccgactacataggcgtgctgtgcatcgacctacccggacatggtagatcttctaggcttccgccgggtgtgccctacaacgtctacgactatgtgttcatcataccgagggtgatgaaggagttcggctggtccaaggtctccttaatgggtcattccctcggaggtgtgatgagcttcatgtacgcggccatggcaccaagcacagtcgatatgattatatcattggatgtactgctgccgcggagaatcgaggatcccagcaagttgaccaaggacatagaaggttatttgctggaggagaggcgacaggcggatggcaccgaacatgagccgccatcgttcaccttgagtaagctgcgtgagacgctcgccaggaacagcaacaactcggtgccgcaacacctggccgatcacatgctccaccgccaggtggccaaatcaaacatgtacccggaaaaggtattcttctccagagatggacgtgtaaagttctatcacatattcgacattgaaaacggacttgctcttgaaatggcgaggcgtattgagaagaaaccctatctggtaattaagggatccctttcaccatttgtgggacctcgatgcaacgaaacaatgtccattctgtcacatgataatcccaactttgagttctacgaagtggagggcggcaagcatcatgtccacctgcatgccgccgaggagtgtgcccgctatatcgttcccttcatccgaaatcacagacctccaagaagcagcaaactttaa

SEQ ID NO: 24837 - protein, 298 aa, DROSOPHILA
MIPAPWGHIAGRWYGNRADRPILAIHGWLDNLGTFDRLIPLLPDYIGVLCIDLPGHGRSSRLPPGVPYNVYDYVFIIPRVMKEFGWSKVSLMGHSLGGVMSFMYAAMAPSTVDMIISLDVLLPRRIEDPSKLTKDIEGYLLEERRQADGTEHEPPSFTLSKLRETLARNSNNSVPQHLADHMLHRQVAKSNMYPEKVFFSRDGRVKFYHIFDIENGLALEMARRIEKKPYLVIKGSLSPFVGPRCNETMSILSHDNPNFEFYEVEGGKHHVHLHAAEECARYIVPFIRNHRPPRSSKL

SEQ ID NO: 24838 - DNA, 2997 bp, DROSOPHILA
ataattggtgggtaaaggttgtctattaatctattaatgtacttacatcgctcagtgacaaagttcccattgctcttaattctcgatttaagtagtactggtttttgcttatcttaatttgctctaaatcatttgtattccgtttgattgtctactcgtctttctgctttaacatgttggcgcaaactaacatattgtattaagttgggtttggtattactcaaactgcaaacaaaaagagatcttgctattctcttaattaactcttaattaataattaagagagcgagataagattgggttctaagttgtattctctcacgagctcttattacaacttccaattacagtgtataaaatgcatagaatgatcttcgtgttcttaatcacatcaagttgttgttaactattgtttatgtacattagtttatatttcatttattaaaatacaaatatctagaaattcgcgagcgcttaagttgacataacaaaaacatgaataagcaagctttcgatgagagaaaaagctttcgagtgtttcggggcgaatgtcaatgtgagatctgttaaatttaaatattactttgtatcctaaaagaagatccaaatatttggatttagtttataatccgaatttcaagtagcaaatgaaattgatacactggtctgtatcaaatttaagtcaaaagcatgtaatcaaagtcatctgctgaaattatgaacaccaccgcataaaccaaaaagcctacaaaagcacgttaagtgcttgtagattgctaacttaaaaataccgtctatttataaacaaagtagctccgcctttattaccttttgaaatgaaaaacgcgtaacaacaacaaaatcattcataaatactgccaagtactaatgactctaattttaacactgattattgcacattcttagattaaactcgcgatcgcaagatcggaatttatgctcttgctattaaaactaaattaattgcgattggatttgactataactttccttggaacagagttgctcccatcggtggtcgatggtactgaataaagggacacatgtacttcgcacactcctcggggaattccaggtgaacgtgatgggtaccgttttccacttcgtagaactcaaagtgtggattatcctgggccaaaatggaaacggcttcgtcactgtgagcgcccagaaagggcgacatagatcccttgataatgagaaagggcttcttcccaacgcccccggccatatcggcagccagttccgcaccaatgtcccagtagttgtagaacttgatccgcctatctatggataagtaaaacgattccggatttagtcctgactccttccttgggccaactcgggtgtcaccgaattcagcgtgccattggcgacagccattcccaatttcggcagcttgtaactgggtggctcccgcagagatccgctcgccaggatctcatcctgcgccatgtgctggtccaggtttctgcggaagctttcgagagcaatgtcactgtcgaacttcggcatcagcacacagtctatgcaaatgaccatgtccactgtatcgggtgccattgtcgcgtaaataaaactgtagaaggcgcccaatgagtgtcccatgagcgaaaccttctcccaaccaaagtgcttcataatccgcggaataatgaacacgtcgttgtacacatcatatcgaattcccagtggcagaggcgaggatcttccatgtcctggtaaatcgatgcagagcactcccacgtgaccgggtagcagtggaaccaggcgatcgaaggtgcccaggttgtccagccatccgtgtagtgccaggatggggcgttccgttcgatttccataccatcttcccgaaatgtagccccaaggagcaggaattttcagttccttgcactgtaggcataatgaaatttctatgaaattctatacggcatctgttccttacttacttcggtaactggaagttgctgcaacatggtttttagtttatgcagcaaacggcgtttcaaacgtctttttgctttgacgatcagtcaacgacttctttaaatttttatgttgctgctgctttttggcgctaatgtttacaatatcagtaatcgagatacgctaaaaaaagcttcccacataaaagcttttttgattacaaaacgcacaatataatcttaaagcaggggaacctaattgtactctgcatctttcctcaatttctagtttattttactatttccaaatatgtgtttcctaaaacttaaatagcacattaaagtttgctgcttcttggaggtctgtgatttcggatgaagggaacgatatagcgggcacactcctcggcggcatgcaggtggacatgatgcttgccgccctccacttcgtagaactcaaagttgggattatcatgtgacagaatggacattgtttcgttgcatcgaggtcccacaaatggtgaaagggatcccttaattaccagatagggtttcttctcaatacgcctcgccatttcaagagcaagtccgttttcaatgtcgaatatgtgatagaactttacacgtccatctctggagaagaataccttttccgggtacatgtttgatttggccacctggcggtggagcatgtgatcggccaggtgttgcggcaccgagttgttgctgttcctggcgagcgtctcacgcagcttactcaaggtgaacgatggcggctcatgttcggtgccatccgcctgtcgcctctcctccagcaaataaccttctatgtccttggtcaacttgctgggatcctcgattctccgcggcagcagtacatccaatgatataatcatatcgactgtgcttggtgccatggccgcgtacatgaagctcatcacacctccgagggaatgacccattaaggagaccttggaccagccgaactccttcatcaccctcggtatgatgaacacatagtcgtagacgttgtagggcacacccggcggaa

SEQ ID NO: 24839 - DNA, 822 bp, DROSOPHILA
atgttgcagcaacttccagttaccgaatgcaaggaactgaaaattcctgctccttggggctacatttcgggaagatggtatggaaatcgaacggaacgccccatcctggcactacacggatggctggacaacctgggcaccttcgatcgcctggttccactgctacccggtcacgtgggagtgctctgcatcgatttaccaggacatggaagatcctcgcctctgccactgggaattcgatatgatgtgtacaacgacgtgttcattattccgcggattatgaagcactttggttgggagaaggtttcgctcatgggacactcattgggcgccttctacagttttatttacgcgacaatggcacccgatacagtggacatggtcatttgcatagactgtgtgctgatgccgaagttcgacagtgacattgctctcgaaagcttccgcagaaacctggaccagcacatggcgcaggatgagatcctggcgagcggatctctgcgggagccacccaataggcggatcaagttctacaactactgggacattggtgcggaactggctgccgatatggccgggggcgttgggaagaagccctttctcattatcaagggatctatgtcgccctttctgggcgctcacagtgacgaagccgtttccattttggcccaggataatccacactttgagttctacgaagtggaaaacggtacccatcacgttcacctggaattccccgaggagtgtgcgaagtacatgtgtccctttattcagtaccatcgaccaccgatgggagcaactctgttccaaggaaagttatag

SEQ ID NO: 24840 - protein, 273 aa, DROSOPHILA
MLQQLPVTECKELKIPAPWGYISGRWYGNRTERPILALHGWLDNLGTFDRLVPLLPGHVGVLCIDLPGHGRSSPLPLGIRYDVYNDVFIIPRIMKHFGWEKVSLMGHSLGAFYSFIYATMAPDTVDMVICIDCVLMPKFDSDIALESFRRNLDQHMAQDEILASGSLREPPNRRIKFYNYWDIGAELAADMAGGVGKKPFLIIKGSMSPFLGAHSDEAVSILAQDNPHFEFYEVENGTHHVHLEFPEECAKYMCPFIQYHRPPMGATLFQGKL

SEQ ID NO: 24841 - DNA, 2615 bp, DROSOPHILA
ttgagggagcatcccatgactttggcaccgtggtcacttgggcgcaatcgtgcgagctcttcgatagtccagcgaacacctcagatattgcacagtccgttccagatacgaacgatgtgttcttcatgccggccttcagtggcctgggggtatgttttttaaagcacttttgcaactggttcaagattacctaatccccatcttatctttgacagcccccggtgaacgattatcggtcagcaagtggctttattggcctcactccgtccaccaccaaagcccacatggtgcgggctctgctcgagagcatagtatttcgtctggtgcagctgatcgaggccgctgagaaggagacctctcagaagcttcatatgattaggtatttctgtctatccatcttaaccaattttacattgcacttattttcttctattttagggttgatggcggcgtctcccgcaatgacttcgtctgccaattccttgcggatctcagccgactgcgggtggagcgggcggacaatgcggagagcagcatcatgggagccacgttcatggcgggcatcaacctcggaatctggcgcgatgtgaacgatctcaaacgtttccggaaagtggcgcgagtctttgaaccgcgtcccaaggagtacgaaaccattgccaaccggatggacaaatggagccggacgattgcccggtttagtgactggtattaggttaaacttttattctctgtctttgttatttgttattcattagtcacttagaaggctaggtagttggtaaataaaatgctgaatttatatattacatacgtttttatgggctgtggaatatatatatattttaaatgacatatttaagtgctaatcttcgaagctgaataataaatttcaaatatattaaccaacaatcagcttgccgccgataaccgataacgaagcactgttattgtcatcgctaaccataccgggtgtggtgacactgattttggggcttagcacgctgcacgtttgtttttattttgattttgttggtgcacaaatcgcagtagaatggcaaaaacgaagaaaaatgtaagggccaaggcgaaaagcgtggtgggggcggccaagcagaaggctcaggacatgaaggccaagctgcgcgaggatcgtctgctccacaagacccttacgcccaagaagacgaccaccaagaaggagaaatccgaggcgaaacacaagaagctgctcaagagattcgccgaagcgcgtaagaaacgcaaggaggagcacaagaatcgcgagaagaccaaagttgtcggagatctaaaaccactgcgggatgccctaccctcgctgcaggacatctacaagctggtgaagaccaagcaaaaggatgtctccgagggggcagccctcacagaaccagaggtccgactgagtgccaacgagaagatccggaaaaaacgcactgaaatggtcaacaccgtcaagtccttcgaaaagctcatcaaagacaagaacttcaagaagaatccccgcgaagtcatcgccgcccatgtgcgcaacaagtaccaggcgatggaagaggacgactacgaatagaagcctcaaatcagcagattaattatttttaggtataaacataaataatacaaggattgtaaagaaatatacgatgacgcaagtatgttagtccaaaactatgaaaaacgttactaattgagcactgtaaaataaactgtgcatatctagaacaatttatgatcaatgtttagagctaaaaaattcagttgcccccaagaagaaaacaggtggattttgtttattaagaagtatctttattatatatgcattaggtatagttatcatttaacgatgcatataaatattacacgtacgaatgtaagttgtaagcattaaatcgtaagagggtcaacagaacgaggattagacaagattcgaacgtgaggacttttggggggatctttgcattttacggcccgggctatgtgatcgtagttagtctatcgctacgttatatcatagagcgttctatatgcgcctgcttagggttcgaatttcaacttggtgttgttcttcttacagtgaaaacggagccgtggactcgaggtccttgcgtccggacagttaatctacggctattttatggttattatcggtattatcgcgttagcgtgggctggctccttcctgtgagatcattaaacgctagtcaaacacacatcagtcgtcttgtccatcgtatcgtatccatttcgccaccagcactaacagtagagttaacatagctattgaaaggtgtctccataaaatggcgctatctcatctcatgtacaaaatgtagccgaatctacactaaacttaggttacaacctaccgcgttacgtctgcgtgatcttaaacttcattgaaacatgaacgggatcgggaacgggttgcgggctatcgggaagcggttctcggttaggcccaggctcgtcgttaccgcctcgaagtattacatatacattgatagaaaatataagtcaactatatctaggttttgcacattcaagagtttgaaacaacaaacttaagctaatttgaaaatcttagttcgctgagcagc

SEQ ID NO: 24842 - DNA, 615 bp, DROSOPHILA
cacgctgcacgtttgtttttattttgattttgttggtgcacaaatcgcagtagaatggcaaaaacgaagaaaaatgtaagggccaaggcgaaaagcgtggtgggggcggccaagcagaaggctcaggacatgaaggccaagctgcgcgaggatcgtctgctccacaagacccttacgcccaagaagacgaccaccaagaaggagaaatccgaggcgaaacacaagaagctgctcaagagattcgccgaagcgcgtaagaaacgcaaggaggagcacaagaatcgcgagaagaccaaagttgtcggagatctaaaaccactgcgggatgccctaccctcgctgcaggacatctacaagctggtgaagaccaagcaaaaggatgtctccgagggggcagccctcacagaaccagaggtccgactgagtgccaacgagaagatccggaaaaaacgcactgaaatggtcaacaccgtcaagtccttcgaaaagctcatcaaagacaagaacttcaagaagaatccccgcgaagtcatcgccgcccatgtgcgcaacaagtaccaggcgatggaagaggacgactacgaatagaagcctcaaatcagcagattaattatt

SEQ ID NO: 24843 - protein, 177 aa, DROSOPHILA
MAKTKKNVRAKAKSVVGAAKQKAQDMKAKLREDRLLHKTLTPKKTTTKKEKSEAKHKKLLKRFAEARKKRKEEHKNREKTKVVGDLKPLRDALPSLQDIYKLVKTKQKDVSEGAALTEPEVRLSANEKIRKKRTEMVNTVKSFEKLIKDKNFKKNPREVIAAHVRNKYQAMEEDDYE

SEQ ID NO: 24844 - DNA, 8277 bp, DROSOPHILA
gacatgggcgaagccaagtccctggccatgcgaatgtcccgcgaggagggactcctgtacgtgaatggctacgatcatccgcacattatggccggccagggaactattggtttggagatactcgaacaggtgccggaaccggatgcagtggtggtgccagtgggcggcggtggactgattgccggtattgccacagccgttaaagctttgtcccccaaaaccaagattattgtaagctatatttttattattactttctttgtatgtcaccttattgttttttaacagggtgtggagtcggagaagtgcgccagcttcacccgggccatggaaaatgatggacctattcacacgcccatcaagaacacattggctgatggcttggccgttcctaaagttggctataatgcctatgccaccgcaatgccgctaatagatcgcatggtggtggtcaaggaggagtggatcgcagtggctatcctaagattggtggaggaggagaagtgcgtcgtcgagggagcgggtggtgcgggtctggcggccattctggccggacacttggatgagctcaagggaaagaagtgagtgctttcagtttacttaactataatttctaaacatttctttgttttttttttatgatagagttgtggtgcttctgtgtggaggaaacatagacaccaccgtttttggacgttgtttggagcgaggtttggctgccgttggacgcctggttaagtttaatgtggaggttagcgatcgtcctggcggaatcaacgatctttgcgccctgcttgtccgagtaggcgtgtccattaaggacatcatgcacgagcgagcctggctgagggatgtttataccgtggaagtgaaggtcgtgtgcgaaaccgtggactggacccatagtttgcagctaaaaaacgagctgaagaagttctactcgaaagttcagttctccgatgttccgctggccctgtcaaatgataccgattcgtaggattctcttctgtatatatatatatatagtacacatatgatttattcacttcagcagcgcagcaaaacttaaagctttaacttagagcttagttgtattagagtaaacataatcgtagtcgaagtagaaatgtaaattaggtgtaaataaatatacatagaatacaaagtctagaaacaaattgacaaacgtagggattgcataatatacaaattatgaatcactgcctaaaaactaaaacacaaacaactaaaaatatataaattcatgagcttaggttacgaacgccgttcttcaagcagacacacaatatcagttttattttattttctcttatctttttttcgtttcacttttttttttgttttaagatctcttgcggtttttggcacattaaggatttataacatacgctcagtcaggcaaacacacactacagtacacatcgaaatttacatttacatggctagaaaatatatatgtctctatataaatatggtttatatggtaaaatgtatagtaggtatgtgctatctcataaatacaggcaactcgttgtcaagtcctcggacgtaacgtactttaaaagcgctgactaaatctacgttgagtatacgctaagtgttccgcatggagccgctcttagtggctgttgtccaggcgcagaatcagtgcatccaccacattgtagatctcatcgaaatgcggtcgggattcggcgtcggctgcccagcactggagcatcagtcggtacatctcctcgggcgtgctcttcggcgttggcatacgatatcctagagatcataagtcacatatcatattcttttcctattaaaagcaaatctagtagtatttacccgtatcgatgcgctctctggctctggagttggtcatgccggagtagggtgtgtcgcccttggagaagatctcccacatcagtatgccataggaccacacatcgcacaacgaagtgtacttgccgaaattcaaggcctcgggagctgtccacttcacaggtatttgtttcatgccatcggaaactattgaaggaaactttcattcagttttaaggttcttctctattgtgtagttaaaattacctatatattcctcttcctcgcgagacattccgaaatcggagatcttcacactgtgctccaagtcaacgagacaattacgcgccgccagatcgcgatgaatgcagtttttggactccagatatcgcatgcctaaaagaaagagtttttgaatattacttactctgttactgttatttattaacttttaagtacacccacctgccgccgcatctctgcacatgcccatttgttggcgagtggtgaggccattggagttcttgcgtaaataagttaaaagcgaaccacctgaaatatgaagtttaaaataactataaattgatttattaataacaatttcaaatatataaagcactcaccgagcaccaattccatgacaatcatgatgggctgcttctgcacacaaatgccaatcaattttacgatatttggatgatcgtattgcttgaggatgcgcccttcctgtaggaatttacgcttctgttcgtcgggcagggtcattcgacaggttttgacagccacatccagtttggtggacttcagtttggccttgtagacatccccaaagtttccctacgaatatcaaaatccatttagtatgaagtacttgaaatcataggttgtaatgttagttactaacccgaccaatcctctccagaagtaccacatcatcgttgctcagctcccagcgctcccggcaaacgggtcgtcggagtatggctcccgatttcacggtcactggcaattccgagtgatactgatgcatgatcagctcctggatgctggcaaatggtggtccctcgaaccggaaattaccctctccggtggtctggacaatgaagtgcttatggccattccaacagacactgagcacaatctggctctcctcgtttcgaatcgtttcgcggaccaggaagtcaccatcgttattcagcaatcgaaccacttcctcgcgcggcagaacgccatggaaccattcctcctcgtaaagcggacgatttgtggagagcgatatctgaaagatacggataattagctaaatctatatataataatccccgaatgtttttagtgaaagcatgcagaatacaaaaaaaaaaacataggcgaaggaaaataaaatagctgcgaatcggttagcacgccatttccacatttccaaatggaaaacggaaatgcgtgggtgcaattggctctgacgaaactgcagtagctatgggctagaaacgcaaattaattataattaaatactgtaagcaaaaggcaaattaaatcataagtacgtatatatcgttactacacaaaggtggaaaatatggatctgcattcaaggttgtctcgtcgtcgagtgactcacaaatagtttcgattttggccgcttttttcgggccggtggaattggccgacccgtgaagacaattgtctcgaaaatccccccattctcggctccggcatagttgctgctgtgtccggaactgctcatgatggaacaaccagatgacccaaaagtcaaaaactactacttcaacttgcgcaattgtctcgcggaacaaaaccaaaactgaaatagtcacgcgttctgtcggatacgaatgtgatatatctccaactgctcactggccaaacagacgccaaacatttcaatggactagattaatggcgactgctggtcggtatccaaactgctcgtccgatcggtgagaactaaaagatataatcgctttattctcctcaattctgaacttgtctctcggtcactttcgctctttcccattggcacgcacaagtaattttggcaatgggaagggtgtggaaacttaaaaatcagcaacgacatttctacactctcactaagttaatgagttacactttaatttatttaattgattttaactatgcaaaatttgaaggaaagtacgaagtggcgtttctattcctttgctaaacggcaactctttcatgttcttaagatgttttaaacttaaagtgaaatcaaatcacatcgactacttgctatgcccaacccataagatttaaggtcaccctgtgtcttatttttagatccgctttataaaaagctctcttttccacacaacatgctttcgatattgaacgtgagcgcaggaaaaacatgcacaatcaatcaaacatgcaaattgaagaggcatgcagagcgatgcgctttttgattctctgtgaggtggcgtctggtggcgcccagttggcttagatactcgcgatacggtgggtgcggtggtttattctcagatactggtactgatactgatacggatacggatgcgactacgggtaactcacactggccgccaggctgggcacgcaatagcagtgatccttcatgctgagcacgtcgtcactggcgctatcctcctcctcctcgtcgttgtcgatgtcccgatccgagttctcgtccagctctccagaactggactcgaacgggtgatctttgtggccggatatttggacggatggcttaacaggcttttgaccagctggcggacagttgcagaattgctcatccgccgccgaaccagccggttgttccacctcgaactctttggcaaaatcaaagacacttttgctgggatggatgcgacgtctcttggtgcactgtttgcacggcttggagcgcttcaactggaaattgagcaacttggagcggaatgtattgcggatggcctttgatttcttctggatcttgggcactttgaatttcagtcttgagttttccttggacggcgtcgtggtagttgtagtcgttatggtggtggtgatcgtgctcgttattatcgtggactgtgaggcactgtgattgctattgctactggtatttttattattattattattattactgctggagctgctactgtttgtggggcaatcactgccactggaatgatgatgttgacttggctgcgtccttttcgcatcctgctcttcgttgaggatatgattcttgcccatcctaacgagtggactcttagagaactcctttaggttgctgaatatgttgcttatggatttctgactaaaagacagggaacgcttcttggagtgactcgtgtccttggaggatcggcactctgaactggaactggagctgcgtttcgtttggctatctggatctttggccaacttcctggtttgtatgtgattctcctcggcactttcgatggcattcacatcatcgctgggctgaagagtacgcttcagccgatcgtctagcactcggttcagctcatcaatcctgtccagatgggcatcaatggagttctgaggcgcggtttggttgatttcaattcgtatttgctcttttttcggttgaatttgttcccccttacattctggactcggtgaagtatccttctttttatccaactccagatcggcatagatatgattgttattggtgttagtaaggacagcagcggtaagctgagtgagcggggcgggcgaggcaaggacaacaggctcctcgtcctcgcccaaacacaacatggaacattgggttcgtcgcagacgcgtcaaatcgggcggattagtggagctcgtggcgatctcctcgcccaaataatgaacacttgccgcctggcgcaaacgatggttagtaatgggctcgtaacgtgcaggacttggcccattcccatccctaattaccgacaaggatccgaggctctgggatcgtggttgcaacttgttgaaccgtccttgtcgcgatcgcgtcatcggcgtcgccggttgtggtgtactcttgcgcttaaagtggcgaccccttccacgcaagagggtcaataccccaccgcgtcgcatcagctcgttcattatgcccagacctggtgaactggtggagttggatctctgctaatgggttaagtttcggttgtgtgtttatggatttatatggcatgggtaagagggcagcatccagagagaaagaaatggtattgtatcacatacgattagttcgaccatgaccacctacttcttaaagattagccaaaacctaagtggattaacgtgaaaactaaagacccacctgctgttcgttgttatagccattctcgatgaagttctgctccagggtgaggtcatcgtcgcaaccggagggcagctcctcgcatcccacctcgttcagggcgcacttgatcatgtccaccagcttctgtttctgcttctcctggcagcgcagtgcattaaggtccttcgactggcggctacaaaaacagagattacaaaatatatagttatatatgtatattatttcgcttaccataggctatccttgttggactgaatgccgttggatgtgttgctgccgttggatataatgctgccattggccaccggcgagccaccattcacatgctcgatcatcttcatctgcttctcctggcaatccctgacggctccctccagttcctggagacgattacgcagccagtccaccgtgaggttgtccactgtcaatgtgctcgactgcaatttgccgggaatatcctggatgagcgtctcatcgaactggaagagcagcggtgttgtgggagaggttctggaaatataactaatcaattagattgcatatcaactaaataccaaagaggggaatctcacttgtatttctcggtgaactcgccgtactcctcggtcggattgatgctccctatcacagtgtcaatgcgcttctggatctccttgtacttgtcggccgtgaggtcgccatactgggccgcctcctgcaggatgttgcgccacagcaggatgaagctctcctgaacggactgctgatgctccagcagtcccggcagcaagacgttgcgaaagtccttctccacttcgatggcttccgtgatggacagcacgtactcgttgtgtgtgagatgcaatttgcggcaggccttctgatacttgtcacgcacatcgtccagcttgcggccactgcgactgggtgctaaaatttcaatttcaatcatatcataccaactcagaaactcagttcattgtgccatattcggttggattgccacttggcaacccgatatacccttcatttctcactcaccctttatgtagttctcctcgaagcgcgtgcgcagcgccttgtagccctccaaatgtttttggtattcagatttcttgcgcaccacctcgtcggtgagctggaatgacaagaggaagcggattggggtttagccgggcgtttcactgcggtcagtgggcacacgtgtgcctctgtcatggcggcactttcccaaataaaaagaaaaaaatggggaaaaaacctggacctgtgcccattacatcatgattatcgccggcgtcactacgtgtttgcttttggtcgcgcaaagtgctctacatgcgagtaatcgcataatggaacccacttggttgccccaactcgatgaatccaccgacacctatctgctccattgagtatctctcacactttcttcgcaaaacattttctcacgtttgtccattatgcaaggtacacgtcccaccgcaaagccaacaaaaaacactaaacaatataagagatagaaaaaaaaacaagcgcggcggctccacaaatgactgataagtgactaggcaaaaggattgcattatgcagctgagccaacattcaacatccacatctacatcccagcatccgttagcagtgtcaacaaaatcaacagcgactttgttgccgaggactgtgactgcagcggaattgcaagtcgggcctggagctgaatctataagccagagccaaagccaaacttaaagccaaagccacaactaatggcagcaaagtgcagttagtcaagcagctgcaaagttgctgagttaaggttgcatggacataatgcagctgatgcagggcacagtggggctaaagatgctctgaagctatgcgtaatatttctaacttattaacattacctatgatcatttttatcatcactcagctataactatttgcttcataaaccactttgtccaaattataaactagtttggatttaaaaacggaaagtaaaatgagaaccttaagacgcgaatgcaaaatagtaacaataaatataaatttataaactgaaacactaaactcatcgaatttgaataactcgtcaatgctatcaaaaaatcgattataaatttctttctataataaat

SEQ ID NO: 24845 - DNA, 3198 bp, DROSOPHILA
cagctcaccgacgaggtggtgcgcaagaaatctgaataccaaaaacatttggagggctacaaggcgctgcgcacgcgcttcgaggagaactacataaaggcacccagtcgcagtggccgcaagctggacgatgtgcgtgacaagtatcagaaggcctgccgcaaattgcatctcacacacaacgagtacgtgctgtccatcacggaagccatcgaagtggagaaggactttcgcaacgtcttgctgccgggactgctggagcatcagcagtccgttcaggagagcttcatcctgctgtggcgcaacatcctgcaggaggcggcccagtatggcgacctcacggccgacaagtacaaggagatccagaagcgcattgacactgtgatagggagcatcaatccgaccgaggagtacggcgagttcaccgagaaatacaaaacctctcccacaacaccgctgctcttccagttcgatgagacgctcatccaggatattcccggcaaattgcagtcgagcacattgacagtggacaacctcacggtggactggctgcgtaatcgtctccaggaactggagggagccgtcagggattgccaggagaagcagatgaagatgatcgagcatgtgaatggtggctcgccggtggccaatggcagcattatatccaacggcagcaacacatccaacggcattcagtccaacaaggatagcctatgccgccagtcgaaggaccttaatgcactgcgctgccaggagaagcagaaacagaagctggtggacatgatcaagtgcgccctgaacgaggtgggatgcgaggagctgccctccggttgcgacgatgacctcaccctggagcagaacttcatcgagaatggctataacaacgaacagcagagcaatagcaatcacagtgcctcacagtccacgataataacgagcacgatcaccaccaccataacgactacaactaccacgacgccgtccaaggaaaactcaagactgaaattcaaagtgcccaagatccagaagaaatcaaaggccatccgcaatacattccgctccaagttgctcaatttccagttgaagcgctccaagccgtgcaaacagtgcaccaagagacgtcgcatccatcccagcaaaagtgtctttgattttgccaaagagttcgaggtggaacaaccggctggttcggcggcggatgagcaattctgcaactgtccgccagctggtcaaaagcctgttaagccatccgtccaaatatccggccacaaagatcacccgttcgagtccagttctggagagctggacgagaactcggatcgggacatcgacaacgacgaggaggaggaggatagcgccagtgacgacgtgctcagcatgaaggatcactgctattgcgtgcccagcctggcggccagtatatcgctctccacaaatcgtccgctttacgaggaggaatggttccatggcgttctgccgcgcgaggaagtggttcgattgctgaataacgatggtgacttcctggtccgcgaaacgattcgaaacgaggagagccagattgtgctcagtgtctgttggaatggccataagcacttcattgtccagaccaccggagagggtaatttccggttcgagggaccaccatttgccagcatccaggagctgatcatgcatcagtatcactcggaattgccagtgaccgtgaaatcgggagccatactccgacgacccgtttgccgggagcgctgggagctgagcaacgatgatgtggtacttctggagaggattggtcggggaaactttggggatgtctacaaggccaaactgaagtccaccaaactggatgtggctgtcaaaacctgtcgaatgaccctgcccgacgaacagaagcgtaaattcctacaggaagggcgcatcctcaagcaatacgatcatccaaatatcgtaaaattgattggcatttgtgtgcagaagcagcccatcatgattgtcatggaattggtgctcggtggttcgcttttaacttatttacgcaagaactccaatggcctcaccactcgccaacaaatgggcatgtgcagagatgcggcggcaggcatgcgatatctggagtccaaaaactgcattcatcgcgatctggcggcgcgtaattgtctcgttgacttggagcacagtgtgaagatctccgatttcggaatgtctcgcgaggaagaggaatatatagtttccgatggcatgaaacaaatacctgtgaagtggacagctcccgaggccttgaatttcggcaagtacacttcgttgtgcgatgtgtggtcctatggcatactgatgtgggagatcttctccaagggcgacacaccctactccggcatgaccaactccagagccagagagcgcatcgatacgggatatcgtatgccaacgccgaagagcacgcccgaggagatgtaccgactgatgctccagtgctgggcagccgacgccgaatcccgaccgcatttcgatgagatctacaatgtggtggatgcactgattctgcgcctggacaacagccactaagagcggctccatgcggaacacttagcgtatactcaacgtagatttagtcagcgcttttaaagtacgttacgtccgaggacttgacaacgagttgcctgtatttatgagatagcacatacctactatacattttaccatataaaccatatttatatagagacatatatattttctagccatgtaaatgtaaatttcgatgtgtactgtagtgtgtgtttgcctgactgagcgtatgttataaatccttaatgtgccaaaaaccgcaagagatcttaaaacaaaaaaaaaagtgaaacgaaaaaaagataagagaaaataaaataaaactgatattgtgtgtctgcttgaagaacggcgttcgtaacctaagctcatgaatttatatatttttagttgtttgtgttttagtttttaggcagtgattcataatttgtatattatgcaatccctacgtttgtcaatttgtttctagactttgtattctatgtatatttatttacacctaatttacatttctacttcgactacgattatgtttactctaatacaactaagctctaagttaaagctttaagttttgctgcgctgctgaagtgaataaatcatatgtgtactatatatatatatatacagaagaga

SEQ ID NO: 24846 - protein, 592 aa, DROSOPHILA
MIKCALNEVGCEELPSGCDDDLTLEQNFIENGYNNEQQSNSNHSASQSTIITSTITTTITTTTTTTPSKENSRLKFKVPKIQKKSKAIRNTFRSKLLNFQLKRSKPCKQCTKRRRIHPSKSVFDFAKEFEVEQPAGSAADEQFCNCPPAGQKPVKPSVQISGHKDHPFESSSGELDENSDRDIDNDEEEEDSASDDVLSMKDHCYCVPSLAASISLSTNRPLYEEEWFHGVLPREEVVRLLNNDGDFLVRETIRNEESQIVLSVCWNGHKHFIVQTTGEGNFRFEGPPFASIQELIMHQYHSELPVTVKSGAILRRPVCRERWELSNDDVVLLERIGRGNFGDVYKAKLKSTKLDVAVKTCRMTLPDEQKRKFLQEGRILKQYDHPNIVKLIGICVQKQPIMIVMELVLGGSLLTYLRKNSNGLTTRQQMGMCRDAAAGMRYLESKNCIHRDLAARNCLVDLEHSVKISDFGMSREEEEYIVSDGMKQIPVKWTAPEALNFGKYTSLCDVWSYGILMWEIFSKGDTPYSGMTNSRARERIDTGYRMPTPKSTPEEMYRLMLQCWAADAESRPHFDEIYNVVDALILRLDNSH

SEQ ID NO: 24847 - DNA, 9993 bp, DROSOPHILA
tttatttatatgttttttaattgagattaatgagccacttgacgaagctcacaaaagcagccaacccctcttaaccccatttccccgctgcacccactgccagttcacatttcagataattgaaatcacttgaggaccacttgttaaatgtttgggggaaagggccacccacagagggaaattgaaaaaaattatttagggtggaaaagtccaaaagagcactcaagggttaagtgcagatgatggcaatgacttttcacggatgcagcccaaagttatgcaatgttttcatggattttcgagattacattcaaattttgcagttacgagttacttacttgcttaagcataaaatttaaaactaaatacctgaaaagttaggaggtattgaaaaaaattataaatgattagctttatttttggggtaaaacatgttcgatattaattgcactatgttttgtgactgtgactgtgtgggagaaatagttataaataaatattaaacatatgattaatggcaaaaatttcgactggccgtaagtgaatttaaattcttactttaaatatattttctaaccatttgggaattctctaatttttgcaagccttagacttaatttgaactaactaaataaatatttctactactatatttaaagcagagaaagtataagcaaaagacatttttcaaacataaaatatttaaaaaccttttgcgcaggcattttagtatatcttttaagctaaagttcaatcgaactaataaattttggtagaaaacagtgaacaatcatgcaaagtaaaatggcaaacaaaataaaaaagacaaaaacttttagctcatgggctaaaattggttttgggaaaacagcaaaaatagtatgccaactaattaatggcaagaatgtcgaggatcggcagagaagcaaatggcgctggttaattgggcgggaaatcgttttgtgttcatctttcaactgggacagcttgtccagatctctcagagaaatcccttgatcgtctgtttcgttatgttctcgtagtatttgctgcgtcgccaagaaggcggcggtttcgattcgttggggttagttgaagccggagcggtgttattggccgatgtgtagctcacctccggcgtgtgggcgttggacatcctgggcgccagctccgtcgtaatgccagtggccaaattgaatccttccacctcgctgtccgattcgatggcctgcggcaatggtagtggcagaagcaggtgttgctgctcctcgtccggagtgggcgttacactctgactatgcagctctgccatgcccgccacactgtcctgatcttcacttttcatcctctgctgacggtcggagaagtagctcatttcggagctatcaaaggacatattgactggcgaaggtggtagttcgggtatttcgaatgtgcttaaagttgagtcgtccgcctcatcgaaggagttcttggccgatcctatgtaggagctagtgcgtcctgaggctgtttgaaaggatgaggaatgcgagttcggcgtaaagttgccttcggaggcagtggcgaaggattcgtcctcggtggagcgcgattgccaatcctaaagcgacgagattagtaccattttacacaaacggaaaaagaatcaacatttttattatttaaacttacctcaatgcttcccaatttttttatgccatgtcctccagtgacattgctgattccattgctaacaacgccctcctgctgctggacatcccggatgactgcgtccagggactcggctacctcggcaatggctcccagcttgtgggaaatggcggcgcaggccagttcgttgctgcctgtgggcaccacttgcacagtagctggcagggtttccacgggtatctcgcttccagcactgctggtccttccactgtcatggagtggacttggtgcagtgcaatccaggggtagttcatcggccacgacactaaaatcaccagagagacggggattatcgggagctccggaatccactgaggcagtgcgtgagtgcgatggtgtttcattgtcggtatagtcgctatgcggatatgtttcactgtcgttgcggatgagggccttgatcttgtccagactctttagcggcggacccgaatccacctcatcctcctcctcttcggtttcctccaagataatatccctttctattgaggccttggctattttggtcttgacacttgaagtactggctgtctcatcatcgtcttcatcctcgtagtcctcatcttcaccttggccatcttcgctgcttagttcgggtagcttactggcctcattgatagcgtccaaaagtcgacttagatcgctggaggattcacttaggatctcaggggggctctgtaccaaatcctcctcttcgctggccaaaggagcagaggcattagcctgataagcagcttcatccagggatttattttcaccttcctcaaccggaatctccacctcattgggcggttcatccaccacaatgctgggcacttccggcctgggtccaacctcctgctccacttcctcatcgccctttgatttggcaaacaaattacgaaatctggcaaacattttgagcttttttgggttcgctgcctagttggcgcctctttttttttgttttttttttttttttttttgggcgtggaacaattagtttgacgtaaggggcagcaacacgcgtttggctagtggccagttgaagtgagctacgtctctctgataattgtagattcaattattcactttgccgggataagcatgcagatatttcgagagtggaaccatgaagacacttctatatttatcaccttcctatcacaatgctccccgctgtgacccacttgtcacgcctgttctccagcaaattcactctttatctgatatgtgctctatacatacatatatgctttgacaaaccgacagttttcttgagttttcccgctccgtgccgaaaaacggaaaacagaaaggaggaccgaacgacaaccgcactggaccacgcactgaaatagactgcttggatttggacgccgaatcttggacggaatgagctgctatatagaatagttcttttattttatttcaatattttttttgtgcttctttcgaattttgggtggtggaacttttgagtgcgtcgcggcagcttgacatttgtttcattcagtcaaaaattatttttggctgtctagtttgtggttacttgggaagtgtggttcggtttgatggacttcgaattgcttttatatgactataattttttttgatagcgaacaagttatatttgatttaatacatttggtaggtgttgtacacgtgttaatggcttttgaagaaatcgttttatttgtcgtagggcaggatgttaatatattcaggcttgtatgggatatttatctcaataataaactttctgactcaggttttatttacagcattgagttcataaatgaagtctgttttttaaaacctgattatcatgatttttatatttttattgccaagttgcctttgtactttgttttccaaatacaatttatcatttcttttagttttatttctagcaacttgttagttctttgctctttttctaagttaatttgccgcgaactcgtggggattttagtggaaatctttctcatttttatttgatatgcagaacgttttgcagtttttgtttctgagttttatgcgttgagcataatgaagtagccgccgatacaaagttaaagtccatgcactcacgcacctgcaaaagtattatagatttttagtcgctataactcacctctttcctgttaatgcgtccagaacgaagggctctttgagacgcttcttcagcaatcttcccagtctgaccattctgcccacttcgacgagcagttgctccctggccaccaagtgcctctgtagtcgcggaggcatctcccccaatggagacagctccgattccaattctgcctcggcatcgctacctattccactgctgctgcggttgtgctgctgtctttgctgctgctgtagttgggcggacagttccttggtcaaaaggggtcgaagttccctcaactggcggtaataggcctccacactgcggtggaaaacggcggagacgcgcagtctggtcatttgctcctgggccacagactgtaggctgtgccacgtgtgctgcagttcgtcactaatgaaaccctgactggaattgctttgtgacctaaatgatgatggttccagtttgcagcagaggcgcagcgtttgggaagcctccagcaattggcagccatagtggtagatgctctaaagcagaaagcataattagtacatatatgcaaaaattttaaaatcagaggataattttatcaatatcctagcaatatgtagatagtttttaataaatatgatacagctagatagaaaccttggccaaacagtcactccccgtctctgtcttgcagtctggatggattccctccatcttatttcccccccaaaaaaatgaagtcgcccgaaaaacgggggaaaactcacccgtccggtttcctcgaacccctgcagctcatccttctgcagctgaatctcgtggatgttgcagccgacatgggagtggcagcgcagcaagacggcatacaactcctgcagccagtcccgcgccctccgcgcgtcctcctcgtaggcgtggatgtgggtcacctgctccaaggtgagccgctgcagcgctagccgatgtccgcacacctgacgacgacgccggctctcgtcgatctgccggcgcagctgggcgatctcggcactgtagtccagctggaggtcacggcccagagcgtctttcactggcatggccagcatgtcgctcagcttttcaccttcacgcacaagttcgcgctcgacgtggcctgtggatgttggaaacatgtttagagatcggttggatgttggatatagcatgtttagagatttgttgtttacggctcgagttcggacagacctaaatatacaactatgattttattaaaatgtatattatttcaaatgatacgattatttaagctaattaggaacggttccatgctagaaagagtattggttcgatgtatactatttgagttgcagccaaatcatgctgtgttcgatctcaaaagatcgagttccagcagatgttttgaatgcgttcatattaaccttctattcatttaaatttgaaagcgtgacacttgttgaaagtatttggtatgatttttttgttcagaatacttttttgtcatatccatggtaattatcagagcaattctagcttatttcaaggttcgctggctatatttcgagtgtagttgtcaaggctgcataaatatttctttagcaatatacaaaattacacttgtttgttaatatttttaaactcacccaacatttcctggtttttattgagctgcatgagtaactgctctgcctcgggccagtcaagcgatcgactgtccacctccaccacatggttaccggtggccagtaaatcctcaaattgatcgaggaggcgatggaacctcagggcggtcatcagtacatttcttcgtcgctccaatcgctttgcaaaggagcgacacacaaactgcatgaagtctcgctgcgaaagaagatcctggcatcggtccatgtcctttgaagatgcctgcctttcagcggcaaacttttcgatcttgtagagcaactccgcatagcaaccgtaggtttcccggcactccagttccagttggtcgtgagcagaacgtagtgcctcacatcccctaacatcacctgcaacgctcctttggcgactgagtaacagctcggcctcctgcaggatccaattggtgacgaaggacactccatcctccaaagtgctgagttcgcgtgcctccctcagagatcggagcagttccagccatgcagtccggatggccgtctgcttcttttcgatctcattcaatcgcaactcgatgcgggtgcgttcacaggcgagatcgggtggcaggaggggcttctggggggaacctgcactggcggagtgggcagcgatgggcgggggacccgcaggggactccgaggcaggtgcgaccgcttgtggcggcggtgaatgcgtctcgtagacctcgttgaagcgggccaagatcgcgttacctgaacaatgccgacatgcaaagagaaaagggaaaggggatgagaaaatggcactctgaaaaataatctatacctgcaaaacattttctattcccaatcacttatttaatacattcttgactggaattggtgaagacataaaataaatatttccttagaattttagaacatcaatcatcgtatttctcggagtgtatttttgggctttcattgcgcggggatcggatctagcgctattcacacatccacaaaagtgaaaactcacgcccggagtggttttttaatcccagtctagctctttggactgtggcatgtgccaccatttcgatgcgcatcaccgatttttgtggctgtaagtgaaaggtcacgattgttgctgttgctttggttgtcgttttgccaaacccacgcactcaaaccagaactcttccgaatttgaagtcgttgttcaaaaattgaagtgtgaacactgtgaaacacggtttgctcagggcacaatgatccccaaccgcaaatgattctcgaaaataacttaatgaagccagaaaagtatttgattcttagctgtggctttcataaattctgaattaatatgtggaattcatgaagtcatgattgttaaagtcttacgaaaattttgataatattcgggatgtctgccatttccaatcaatcaatctttctaatttcacaaacaattctcaattgtcaaatcatagccaagtctattcaacatcgtatggaactgtagattttaaaattatcttatcaaaagacgcatttctacctaaaagaccttctgtaggcctcagtatccaagctcaatgttattcagtgccgttaaaatcaacccacaataaaaatcgacaacaaacggcgcgaaaaacgagtttgccaaacgtggcgcatttctaattgaaaacacacacaaaattcaatgatttacttgtcacatgttgtgtgtctttctttccgtctctgtctgtctcacttaactcgtttgcttcgagggcaaaccgaattatgttaattgctcgcggggcaaacaaaaaacgactagcgaacagaccaaaaaaaacaaaagactcaagcaacgaactcgactcacccaagtcgatggcggtctctatgtcgttttgcacaccggcatgcatctgggcgcacttcttcagctccacatccgcttccgccggccgcagagacttgtgctcccgcagaagagccaacagtttctccatcgaagccaaagtctgcacatgcgacttggtgaactcgtcgatggactgcgtaaatatagccattatgtgccgttcgaacggtacagaaattggggcacttaccttgcgctgctgcagccacagatcgtagttgaactgcaaggtgccgcccagttcctcgggcaggttctgcggctctatgaacttgaacagcctcgccttcgacagcaccaggggctattaagagagcacagtgagaaattaatgagttcaatgtggaaattctaattactatgttgcagtttatggttatgatatattttattaggaactaaatcgatttaatgggaagctatttaaatctttaattcacttcttgagttgtgtccaacctaagctattagcttacctctcccttgacctgggacttggtgcacggctccacatgcttctcccagaagccctccgccctgactagatacagatccacattgatgtcgcccccgaagagggcgtaaatctgtcgcacctgctgccgtgatatccgcgaactgctctcctgggcattgaccaccacactcacgccattctgcaacaccgaagcgctgaaagagattaatgtcaagttggttaatcggtttgggactggaggaaagcgtctttaagcgcttcattagcttgccagttaggatttggctttaatcagacactcttttttcaggggaactgccagttgattgatcacaatcaatatatccataattcatgtggcttcttccctgtatttaaaagattgtttgatgcctacctcgtaaacttaaacaatttgcttgttgtgccaataaataaacaaacttaaatgggaaataacaaaagaagggcgtaaagcccataggtagttgtttaaataggttacgaacggtatataattttcataaattatcttaaggtttttaagagggtacatttattgctactactatttttacatatgttgcttgtaaagtgtgtttataaaatgaaagtgtgcttaaactgaccgaactttgtatcaagttactctgaagtaatatatgtaagtggatattaacaatgttttccattcaagacaaatcatctgacttcagaaactttaaattatttagttggctttaaatatctgacacttagcatataaataaccagattttgttaggtgttttccgcttttcgagacccgttttaagacccctcccagagagccgtgtctaatgaaaagtaatgcattaaagacgacaaaaaatgaaccttcatcatctgcgggctatttgcatatttcggccatatgctaatgaatcgtcggcatttccactgccggtttctaaagtttctgtgcctaatggcaaatgcctaataccacttaattcccgattctcacctgagagaccgcttcagatagtccagagtcacctgcagatagcggcgattccacagctgcagatcgttgaatgcgttgacaacgaagacgatgcgcttctggcgatcgaatccgccggataagtaggcactccgcgtctgcagggcgttcagcacgtcctcctccatctatagggagtttaatgatgggatcgcgatgacgatgcggcttttctaaatgctaattgagcctcttgtcgccgcgaacattttgctgctgagacaacgcggtattaggattttctttttgtttgcagttggctgtttggaaaagcttgaaaattaatacaagtcacagttatgcgagttgttttcgtttctgtggctgctgctgctgtttttcttgccgctgcacaatgctgcacatttccaaatgccgcgagactttgttggggaacacgtttgacaagttgcagcctgaaactttggttgcctttactttactttagtctggtacactgaggaaaatgctcatacccttaaaacgatagtttggcttaaatagctgcaggccatttaaacgaagcaaccagcgcttacttcatttaactacgaatggcattattgtaaaatacttttacgatctactcaatttctctcagtgcctagctagtctctccacatgattttcactgttttcatgttagtttaggagttttttgttggctttttcagtttgggtctctctggcctaatggaaaaattccatttttgcgcatgagtattttgacacaaattggagttttagctcttttccatgccggccagcagcagcagtttgaacttaatttgtcggttgataaggggcgcggcagacccaaacgctatatggtatgtacaatatatgctacatagaggaggaaaagagccaagtaattctttcacttgtgagccagaagtacgtgccagaaatcctgtttgctgccagtctatcttacagttatgcgtaagtggtcgatgcctcttttcctgtctctcagtcagccccatcttgctccgctttttctttactctaccaaagagtattcggagatctgcttaactcttgtcttgatatatatatgttttgatagaaattatagattagattagttatataagaccagctttgctattatagaaagtgaca

SEQ ID NO: 24848 - DNA, 3804 bp, DROSOPHILA
atggaggaggacgtgctgaacgccctgcagacgcggagtgcctacttatccggcggattcgatcgccagaagcgcatcgtcttcgttgtcaacgcattcaacgatctgcagctgtggaatcgccgctatctgcaggtgactctggactatctgaagcggtctctcagcgcttcggtgttgcagaatggcgtgagtgtggtggtcaatgcccaggagagcagttcgcggatatcacggcagcaggtgcgacagatttacgccctcttcgggggcgacatcaatgtggatctgtatctagtcagggcggagggcttctgggagaagcatgtggagccgtgcaccaagtcccaggtcaagggagagcccctggtgctgtcgaaggcgaggctgttcaagttcatagagccgcagaacctgcccgaggaactgggcggcaccttgcagttcaactacgatctgtggctgcagcagcgcaagtccatcgacgagttcaccaagtcgcatgtgcagactttggcttcgatggagaaactgttggctcttctgcgggagcacaagtctctgcggccggcggaagcggatgtggagctgaagaagtgcgcccagatgcatgccggtgtgcaaaacgacatagagaccgccatcgacttgggtaacgcgatcttggcccgcttcaacgaggtctacgagacgcattcaccgccgccacaagcggtcgcacctgcctcggagtcccctgcgggtcccccgcccatcgctgcccactccgccagtgcaggttccccccagaagcccctcctgccacccgatctcgcctgtgaacgcacccgcatcgagttgcgattgaatgagatcgaaaagaagcagacggccatccggactgcatggctggaactgctccgatctctgagggaggcacgcgaactcagcactttggaggatggagtgtccttcgtcaccaattggatcctgcaggaggccgagctgttactcagtcgccaaaggagcgttgcaggtgatgttaggggatgtgaggcactacgttctgctcacgaccaactggaactggagtgccgggaaacctacggttgctatgcggagttgctctacaagatcgaaaagtttgccgctgaaaggcaggcatcttcaaaggacatggaccgatgccaggatcttctttcgcagcgagacttcatgcagtttgtgtgtcgctcctttgcaaagcgattggagcgacgaagaaatgtactgatgaccgccctgaggttccatcgcctcctcgatcaatttgaggatttactggccaccggtaaccatgtggtggaggtggacagtcgatcgcttgactggcccgaggcagagcagttactcatgcagctcaataaaaaccaggaaatgttgggccacgtcgagcgcgaacttgtgcgtgaaggtgaaaagctgagcgacatgctggccatgccagtgaaagacgctctgggccgtgacctccagctggactacagtgccgagatcgcccagctgcgccggcagatcgacgagagccggcgtcgtcgtcaggtgtgcggacatcggctagcgctgcagcggctcaccttggagcaggtgacccacatccacgcctacgaggaggacgcgcggagggcgcgggactggctgcaggagttgtatgccgtcttgctgcgctgccactcccatgtcggctgcaacatccacgagattcagctgcagaaggatgagctgcaggggttcgaggaaaccggacggagcatctaccactatggctgccaattgctggaggcttcccaaacgctgcgcctctgctgcaaactggaaccatcatcatttaggtcacaaagcaattccagtcagggtttcattagtgacgaactgcagcacacgtggcacagcctacagtctgtggcccaggagcaaatgaccagactgcgcgtctccgccgttttccaccgcagtgtggaggcctattaccgccagttgagggaacttcgaccccttttgaccaaggaactgtccgcccaactacagcagcagcaaagacagcagcacaaccgcagcagcagtggaataggtagcgatgccgaggcagaattggaatcggagctgtctccattgggggagatgcctccgcgactacagaggcacttggtggccagggagcaactgctcgtcgaagtgggcagaatggtcagactgggaagattgctgaagaagcgtctcaaagagcccttcgttctggacgcattaacaggaaagagatttcgtaatttgtttgccaaatcaaagggcgatgaggaagtggagcaggaggttggacccaggccggaagtgcccagcattgtggtggatgaaccgcccaatgaggtggagattccggttgaggaaggtgaaaataaatccctggatgaagctgcttatcaggctaatgcctctgctcctttggccagcgaagaggaggatttggtacagagcccccctgagatcctaagtgaatcctccagcgatctaagtcgacttttggacgctatcaatgaggccagtaagctacccgaactaagcagcgaagatggccaaggtgaagatgaggactacgaggatgaagacgatgatgagacagccagtacttcaagtgtcaagaccaaaatagccaaggcctcaatagaaagggatattatcttggaggaaaccgaagaggaggaggatgaggtggattcgggtccgccgctaaagagtctggacaagatcaaggccctcatccgcaacgacagtgaaacatatccgcatagcgactataccgacaatgaaacaccatcgcactcacgcactgcctcagtggattccggagctcccgataatccccgtctctctggtgattttagtgtcgtggccgatgaactacccctggattgcactgcaccaagtccactccatgacagtggaaggaccagcagtgctggaagcgagatacccgtggaaaccctgccagctactgtgcaagtggtgcccacaggcagcaacgaactggcctgcgccgccatttcccacaagctgggagccattgccgaggtagccgagtccctggacgcagtcatccgggatgtccagcagcaggagggcgttgttagcaatggaatcagcaatgtcactggaggacatggcataaaaaaattgggaagcattgaggattggcaatcgcgctccaccgaggacgaatccttcgccactgcctccgaaggcaactttacgccgaactcgcattcctcatcctttcaaacagcctcaggacgcactagctcctacataggatcggccaagaactccttcgatgaggcggacgactcaactttaagcacattcgaaatacccgaactaccaccttcgccagtcaatatgtcctttgatagctccgaaatgagctacttctccgaccgtcagcagaggatgaaaagtgaagatcaggacagtgtggcgggcatggcagagctgcatagtcagagtgtaacgcccactccggacgaggagcagcaacacctgcttctgccactaccattgccgcaggccatcgaatcggacagcgaggtggaaggattcaatttggccactggcattacgacggagctggcgcccaggatgtccaacgcccacacgccggaggtgagctacacatcggccaataacaccgctccggcttcaactaaccccaacgaatcgaaaccgccgccttcttggcgacgcagcaaatactacgagaacataacgaaacagacgatcaagggatttctctga

SEQ ID NO: 24849 - protein, 1267 aa, DROSOPHILA
MEEDVLNALQTRSAYLSGGFDRQKRIVFVVNAFNDLQLWNRRYLQVTLDYLKRSLSASVLQNGVSVVVNAQESSSRISRQQVRQIYALFGGDINVDLYLVRAEGFWEKHVEPCTKSQVKGEPLVLSKARLFKFIEPQNLPEELGGTLQFNYDLWLQQRKSIDEFTKSHVQTLASMEKLLALLREHKSLRPAEADVELKKCAQMHAGVQNDIETAIDLGNAILARFNEVYETHSPPPQAVAPASESPAGPPPIAAHSASAGSPQKPLLPPDLACERTRIELRLNEIEKKQTAIRTAWLELLRSLREARELSTLEDGVSFVTNWILQEAELLLSRQRSVAGDVRGCEALRSAHDQLELECRETYGCYAELLYKIEKFAAERQASSKDMDRCQDLLSQRDFMQFVCRSFAKRLERRRNVLMTALRFHRLLDQFEDLLATGNHVVEVDSRSLDWPEAEQLLMQLNKNQEMLGHVERELVREGEKLSDMLAMPVKDALGRDLQLDYSAEIAQLRRQIDESRRRRQVCGHRLALQRLTLEQVTHIHAYEEDARRARDWLQELYAVLLRCHSHVGCNIHEIQLQKDELQGFEETGRSIYHYGCQLLEASQTLRLCCKLEPSSFRSQSNSSQGFISDELQHTWHSLQSVAQEQMTRLRVSAVFHRSVEAYYRQLRELRPLLTKELSAQLQQQQRQQHNRSSSGIGSDAEAELESELSPLGEMPPRLQRHLVAREQLLVEVGRMVRLGRLLKKRLKEPFVLDALTGKRFRNLFAKSKGDEEVEQEVGPRPEVPSIVVDEPPNEVEIPVEEGENKSLDEAAYQANASAPLASEEEDLVQSPPEILSESSSDLSRLLDAINEASKLPELSSEDGQGEDEDYEDEDDDETASTSSVKTKIAKASIERDIILEETEEEEDEVDSGPPLKSLDKIKALIRNDSETYPHSDYTDNETPSHSRTASVDSGAPDNPRLSGDFSVVADELPLDCTAPSPLHDSGRTSSAGSEIPVETLPATVQVVPTGSNELACAAISHKLGAIAEVAESLDAVIRDVQQQEGVVSNGISNVTGGHGIKKLGSIEDWQSRSTEDESFATASEGNFTPNSHSSSFQTASGRTSSYIGSAKNSFDEADDSTLSTFEIPELPPSPVNMSFDSSEMSYFSDRQQRMKSEDQDSVAGMAELHSQSVTPTPDEEQQHLLLPLPLPQAIESDSEVEGFNLATGITTELAPRMSNAHTPEVSYTSANNTAPASTNPNESKPPPSWRRSKYYENITKQTIKGFL

SEQ ID NO: 24850 - DNA, 2481 bp, DROSOPHILA
ttgagttttcatttttgcatcaactttatcacaacgcagctcaacgactgaggcatcagatctttggatcttgtttatagcatttccagtttctcagaaactggagaaccgtttggggggcagggaaatatgagtcacatagtatatacttatgtatattggttggggtatgggcaacttatgtaaggcgatcgcaatagggcacaatatcatcccatagggattgtttaggatatatgtatatatatccatgaaatgcgattcttttataagagaacggaatctctggcactgggcactgggatatacttttcttttcttgacttttcatattttattaattctcaatgacttttgatatcttgtgaacacgttgcgaaaaaacgctccgatttgttcggccgatgtcgccaaatgaaagccccacgtaagcgagatagtgccactccattgctccacaaagtttttggcgagaaagcttaaagctttcgttcacttgataatgaacgaaactcggagagaaatagagagcgagtagggttgccagagtgttaaagtattaaactgatcgtaagctttgttgaacccgaaactcaacacattccgaaatcgatttggattcggaacaatcgactgtatcgtaaacgcgaatttatcaaaatgtaataatataattttaattttggaagcagagctctcttaggtattgaaactatttagtcttttgaaattatttcacggcatatacatatataatatttatttgttacaaattgaaatcattaaattaattacatctagatcccacagataaccttaagattaggcagattttgggcgtttcggcaatatcgttgccatcctgcccaatgacgaaaaccatccgaggtttggatgcgcttggcgcaagtaaccgactcccttaaattttcgtccaaaaaatctaaaaatatttatatttagttaaatttgaatagaatacgatttgccagagcagccctcacaaaccttcgcacttggcattgcaaatgccgccacgccttccctcctgacaaaacctgccattgatttggaacagcccatagttccgagatccattcgcattggttgtaatcctgccggtatccagatcgctttcgtgctctagcaaacaaatcccttaaatggggcaaaatcaaaagtcacaacccatttataatagtttgctaatcttaagatagagcatacagtatagagcatttttaatatatgtacatctgggtttcccactcacaattcgagagcagactgcgttcgaaaccatgctgatcgagcaacttgcgggccagttcacagcgcaggaaacgcttggcggaaaccacgccgcactcgatggccagaagcaggcccaatcccaatcccagccagtaccacgatccgaatggcgcagctctcatattgcgactgcctggtgatggcgatggcccctgtggacgcaccatagaatcaagcgaacgcgacgcgtgaccttggccaaatgactccggaatgggatggaatcaaatggggtcagatggaaggcagatagtgggagagccggtggccgataagctgggggcgtactaaatggaatcggtatggcttactccatgatgatgcctaatcttcccctgcccgaaacgaagctcttccgttttcggttattgaaatcacaacaggcggcggcgttcataaatcttttgtctctttaatatacaagagagttcatagattgattagttatcataaattaaacgatagttaagcctagatcataagataaactgtgtgtataattatttattcttcgctattgtataaatctctcctgttgccaattctttcgctacgtaggtccaagaacacatttactccttcggctgaacttgtaaatacatatctacgtgggcggtatgtgtatatgggcccgtaatatagtgtatatatattatatataattaaggtgtacataatgttatgttactgcaaagttaaatatattggcagaagcgagcaatcggtttttttttatttcatttgtattcgttattataacttatgaacatctgcaaatagtttctctcttggttaaccgcctccatttcatttgtgcttatccgtttttagctatccattctgcggtctgtcttttcctttcgatccatttttttaacccccaactcgagtatgtttaagtaactttctgtcataatgggcaattttggtaacaaaagaacttacagctaataaaacataattttctcttcagtgtctttttgttaatgactaaaaaaatagtacaattaaatcgaggacataatagcaaacctcctgagaactacaatttaacatgagtgcgtgtgtctactcctttgcatcatttaactaactaaagcttgttccaaaaaaaaaaaataataataataaaaatagcgaaagtgtacaattaattttgagtgggag

SEQ ID NO: 24851 - DNA, 366 bp, DROSOPHILA
atggtgcgtccacaggggccatcgccatcaccaggcagtcgcaatatgagagctgcgccattcggatcgtggtactggctgggattgggattgggcctgcttctggccatcgagtgcggcgtggtttccgccaagcgtttcctgcgctgtgaactggcccgcaagttgctcgatcagcatggtttcgaacgcagtctgctctcgaattggatttgtttgctagagcacgaaagcgatctggataccggcaggattacaaccaatgcgaatggatctcggaactatgggctgttccaaatcaatggcaggttttgtcaggagggaaggcgtggcggcatttgcaatgccaagtgcgaaggtttgtga

SEQ ID NO: 24852 - protein, 121 aa, DROSOPHILA
MVRPQGPSPSPGSRNMRAAPFGSWYWLGLGLGLLLAIECGVVSAKRFLRCELARKLLDQHGFERSLLSNWICLLEHESDLDTGRITTNANGSRNYGLFQINGRFCQEGRRGGICNAKCEGL

SEQ ID NO: 24853 - DNA, 3097 bp, DROSOPHILA
gagttggtggttcctgaaatggatgatttgattacaatggttgtactgtgccgcttgattgtggtaggcatatctaagttaataaatcaaatgatgcatcccaaacaagaataataaaattgttttgtgctttctcgtcgagtgtactactaataacatttaaaatttgacatagttctccaggcgggcttggttactatattacatgacttcgatacgggctcgataacgaaagtctaatctaaagtgacctgcaccacaaaccctcgactaccccttcccgtggtgtccctggtcacctggtcacaaatgttgcgcaacacgcaagcctcaattagttgttgattgccggagacagcgactttccgaagtgcgggtgagtgtgaggcaagtgacacacattttacagcttattaacttggccaacaaccatgagaggcctgccgcaataacaccgaactaatggcaaaatctggcaagcactctggagtgagctctacacacattgaccagcagggaggctttactaattaatattcgcaaaggtatggcttttggctgggtctctcaaatgtttacgtgtttgcttagtgtcatccaaagtggcccataaagtagaattgtcataaattatttatacgctaaaacactatctatttattttcctatcaactaacttccttcggtacaatactgcaaactccacaaaaaaaaaagtactgtggccctagcccaactccagctcgaatctactcccattctggccactgtggtcttggccttcttgttccggtcggcttgcgacatggggcaaccaagttcgcggtgccaccggttcacttagcggtcgctgctcgtctgctttattgctttatgctaatttctgcgaagccagcgaatgacgataggtgggccgtggccgtgctgataggtgggtgaatggcatcccgacccacaaactccccatcagcagacctttgctatttatttggctactttactaacccgttgcccgttggttgcgcgactgctcctgcaattgctggaacatattggccctggcccgaacgctgttgctccgcgtcaggccactgggcggtgtcatggtggttgcagtggtcgtggatgttgagttggcagatgcggaagcggctgtctcgtcgctcagcgactgaatagccgagtcctcctccaaagcggacatctcaaagatgtgctcgctgtccgtgccgatggatagggttagctgctcgctgagattgatgctgtcgttcaccgagttctggcgtgccaaagcggagccaccagtagcctgaccggccaggtggacaactcgcggcgactgcagcggttgggtggagctgcgggccagacggaacgaggatcccgctcccgagttcgtcgacgaggatagcagcagtggcgcgggcacgtggctgagtggctgtccggtgatcggcgaaatcagcggtgcatgcggtgcgtgggtcaagcggatgtccagcggcttggtgggcttgaaggccgatgtagccgagatgtcgaagggcgcggagttggctttgaagctgtaatagaagaatatatgtacaaatcaataagcatcaatgttttggtttcatggtttaatagcatgtttttatatgtcaatattataatttaatgtgattaaaatatgaagaaatatttgcatagcatataacattgtttgttttttgtctaaaatctcttgtttcccctcggcgcagaaatttacataacaacaggcttaatacactgtgaatctctttgtgaacattcatctctatcattctccctcggacataattataattataggcaattttggccaacttaattatgttttggtggtgaaactttgccgctgccggctgctgctgttgtggattcactgcgcgcctccagggtagcgaaggtaaaagtttaaaaggccgacgatggccagaagaattagccaaacggtttcggcaatataatgccagcagtgaaaggtaattgaattgatgataagagaaataaaagctaaatatatgtactgccgattgtgtgtatttttccacacaggctcttgtgcataaacttgcaagtttatcaccctccaaaggcctcttgaacattttccttctatatttagtacctcacctacaacttgttcgactctcgagtttttccgatatttgttttgtttatcaggcctattttccacgcctggcgcacatcgaatgttaaaaagaggaagcggaaaataacaaaaagactaaaaatatacaacaattttaatgcaacaactggctaattggatttcgggtgagggcggtgaaggcaaaaacgctccgtgagaattctctcgttcgaatttcgaacacttcgaggctcaataaaaaacaaaaaaaataatgatttgcgacaacagttgtcgagaattataggaaatatatacgactgtagatttcgagtgatctaatcgaagagcagcggcgttgctatttggccaaaatatacaaatatatataaaaaacagctcacggattttgccaatctagcgggtacacaaaccacaaacagacatttggcggaatatttcacgggcaaaaaacacacacatttagcacgcaaattaatgcagacactgtcagcgctgcttagctctatataattttaaatatatttcgcaaatttggcaatttgtgacaatcgaatgttggaattttcatttggctgcacgactgcacactttcatggaatttatttttagcgcattacacaatatatatacatttcgagagctagcgattcgtcgtggcacacatcttctcactgaattttcacggattttcccaaattttattttttattaactacctctttttccaattcacacgcggttggcgagcccgtctaccggcaactgggcaagaatttccgaagggaacgtggttttccttccactaagcacacatgcgactctatagggtatacactatactccctactatctggttctgcacctgataacgcgaagaccgcaccgccgagagccgcaccgcgattcggatgataaatttatcagttagtt

SEQ ID NO: 24854 - DNA, 582 bp, DROSOPHILA
atgcacaagagcctcttcaaagccaactccgcgcccttcgacatctcggctacatcggccttcaagcccaccaagccgctggacatccgcttgacccacgcaccgcatgcaccgctgatttcgccgatcaccggacagccactcagccacgtgcccgcgccactgctgctatcctcgtcgacgaactcgggagcgggatcctcgttccgtctggcccgcagctccacccaaccgctgcagtcgccgcgagttgtccacctggccggtcaggctactggtggctccgctttggcacgccagaactcggtgaacgacagcatcaatctcagcgagcagctaaccctatccatcggcacggacagcgagcacatctttgagatgtccgctttggaggaggactcggctattcagtcgctgagcgacgagacagccgcttccgcatctgccaactcaacatccacgaccactgcaaccaccatgacaccgcccagtggcctgacgcggagcaacagcgttcgggccagggccaatatgttccagcaattgcaggagcagtcgcgcaaccaacgggcaacgggttag

SEQ ID NO: 24855 - protein, 193 aa, DROSOPHILA
MHKSLFKANSAPFDISATSAFKPTKPLDIRLTHAPHAPLISPITGQPLSHVPAPLLLSSSTNSGAGSSFRLARSSTQPLQSPRVVHLAGQATGGSALARQNSVNDSINLSEQLTLSIGTDSEHIFEMSALEEDSAIQSLSDETAASASANSTSTTTATTMTPPSGLTRSNSVRARANMFQQLQEQSRNQRATG

SEQ ID NO: 24856 - DNA, 7131 bp, DROSOPHILA
aacgatgaattattattatatttaataatttttttacaaccggcacaaaaacgcgcgcgtttgcaaaaggtaaacaactaaaacgtaaaacacgtatttgcactgaaacgtattaaaatcgttgtacatttactacagaatatattccatcatttttgtgcggcactaatatctgtaacttttgttgtaatgtttcataaacaaaaaccgcggcgtcgcaaacagctgtgcgtcgttgcttcttcttgctccgcgacgcttgaaacgaccgttcggcgcgaaaactgtttaaaaatcgcgctgaattccggtttttgcctgcttatatacggcacagagtgaccagtttctatgcggcagataacgcttattacttttgcatacgctactctaaacctctcttaagcacactttcttactctctttctgttaagttgtacgagaaaaaagcgccagtgcggcagaagttggaaacttgtttcgatggtttgaaactacggaattaccagaaatgttaagattgacattctgctgggtaacattcaactaacacttctgttaaaagagtgaaacactgttaagtgaaagagaaaaatcgattcgtatcgttatcgatttcaagtttgaagcaaaaagggaatttttaatttccacatttgaaagtttggcgcgaaacgacaatttataatacctcatacttttggctgggaaatgtaagcagtagattatataaaacttcatgctgttattaaacattcagttagtaagaaagaacagttagtggccaaacaaaactacagttaagtaggatttccgtcaactttattaatgtttctttttatttgctttatcggcttttttgcatcacgtaaaaatatataatgtggcataatatatcgtttaaacaagttttcgataaaatatattatttcttgtgtatatatcagttaattagtttttgcacaaacggtagtaagcaatgcaagtttaaacttattttctaattttttacaaaatgtctgggctgaagaagcttgtataggggtttcggttgctgctgcatgagcaacactggctgctgctgctgttggccttgttgctggggcggatgcggctgatgttgctgtggccgctggtcaagtggccagtagtagtagctccttgccacgggctgcactctgactaggaatcttttgttcgagtgcggaaaattggttaaatcgaaagcaaaagtctcttcggcaaacgaacactgggtgtggagtgtgcggagacatatacaaatgttcaatacaaagtgatgaacgtctaactaatgtaaatttcatctcaactcgacaataattgtaaatatttagttttacttttgggaaccagtcttgaggagcacacacatttgatgcatgtatgttgctgtctaaacgttatgtctacatatacgattataaaaccacaatgccgcggaacgtcgcacacttacagcaggttagtaatagctatgggttagtgcactaacacacggagcacaggactcagatgctggacgaggaggagcaggaccaggaccaggaccaggactcacccatctggctgattctgctgctgcgactgctgctgttgctgccggcgacgtctggccacagcgctgttcttgattatggcctcgatctcgcggccccccgaactctcgccttcggatgccgaggcacaattcccggctgcatcgtcacgggccagcgatcgaggttgtcccaaagtagagagattccgcactaggctcacggcatcatcgtgcttcggcgtggagttctccttggaaacattcctcaggatctgggctaaattcctctgcggattgtccacctcatcactagctgctctagtggcatctgccgaggtggcagatttgcggagattggaaacagtggcatgtgtggagcgtttgagccggttcttcagctcggcattgagatccacaggcattaaaccgcgtcccatacccatcactggcattcccgtcttaagaatgctcttaagtggttcggtgctgggttttcctataaaatatagcaatcatcacaaattaattcatgttaaatttgccaaataatgacgtttgtgaagtcagtacgaatgcagcaaatcaatccttaaaagcaggcaaaaatcataaataacatgctcagtcactgcttacttacaaatttgagaagcgcagagtaaggctcgaggcaacaaacatgctcaaacacgataaagtacttactcagcatttgaattttacctaatagtatgtaactcccattctttagcacatttcttgtatttattttcttggtgtaacaacttccaattaattaaatattacaataataataataaatgtaatacatactcatcataatataattccgtttaaggtacaattcgtttttaaatgtaaataaaaagtagtgtattatgtataaataagcacaaagctgtttcgcataataataatataggataaaggtaaactggaaggctttgctggccagacataattaatatacgagccgttgggaataaaactgtctctcggtttaaatacatttctaacatacatagtttatttcatttattacttcgttttcgcttgacatatctgtggaattttcgtttcgttcagtttgttttcattattgggattactatgagacaactagttagcttaatagcttggaatcaggatcggacgcatctatcacactgagcgcggacccacacgaagagagcaatatttgtgtttgtgtttgggatttcggggatttggaaaaattgggaaattttgaatgctcggccaaaatagacaatttttcagcccaataactcgccgtacaacagcttgaagttcctgccagcggcccggagttcatccggcgtgacctcaatgtcctcgatgctggaaatggcggccttccgccggccgacgggcgaatgtgctctcttgggacttggcatggctgtgggactggtgcagccgctggagtagtgatccatggacaggggtcgcgtcctcttgagcagctcgcgccgtttggaaaccacggtagtgatctgcggtagtttcacgtgcgcattggtggcctcaacttggctgggtggcagcgattgcgttttatgcacggtggtcgtgctgttgcagctctccttaacaccaaagtacttggcaaagcgatcgtccacactgggcgaacgcgttccaacggtcacggaggtgatctcggtggtgtgccgccgattgacgggctgtggttgcggctgctgttgttgcaccagtcggctgattttcctccgcatctcggacaccctgggcggagctcgatcctcgtcctgcgactgctggtgctgcagatgttcctgctcgttggaggcgcagttctccttgcccgaatcggagccactgtcgctggttccgttcgctagcttctcggtgtgtggtttctcctgctgcttttcaatgaatggcgacttaaccttaccaatggtgcgcgaatgaacggacaggctaacgggctccaagctctgcagcttgaccatgcaagtgttgctccagctgttgctcccacttctactactgctgttattgttgcgatcgccgcggaaggtatcgggcaggactagctttcccacagtccgtatgctgatgcgcaggggcgaggtggacgacggcggttcggtggcggacctggtcagcacgtggaagccattgtgctgggaagattccctctggactggctccttcttcctcaacttgacctcatcctggtccacctgctccttgacctcctcctgctcgggctcgatgatgctctccagcgtgagactagatggctccttgtcgtggggaatcggagagtaatccatgggcgtgggcgtcatactgacactgctggcggtggtgctgctcctgggagtggtgcgatcgccgggcggactccttgaatagctgctggtgcgactgcggtaccttccaccggcactggtactcccacctcctccgccgctctcgcacagattgctgaagaaggccagtcgctcagccagcgacagggatgagggttctatatggggtttggttttagagattagtttttgctagaggagttaatccttgtggcctttgcaccacttacgcattgcatttgctcagtctgctcgaactgtctgtcactagttgaaagtatatttaagtctaaatattcattgctgctgctctggctgcctgtggtttctttcagatgcggcgacttacaagactcaaagacgagctgcgcattcggttatatccgctgcccacactcaaatgctgtcgctgccgctgctgcgataatgctatacatttcccgcactacactatcatttgcagctgcctttatcagacactaaacaaactgaccgaccaaacgaccgaccatcacaaaagatgatttgtacccccgcataactgaatcatagaaagtttgtctggcgtttgcaaagcaatttctataattcgccactttttgcgccatttacgctttttgctttgtccaccacacacacacacacacacaactgccatcttctcgattttcattttcatctgtaactttcgatattggttcttccacagcgctttcaattgatatgaactttctttgtaagcgtttgagtgacatattatgtgtgggttgtttgactgataaacgcaaagaaattatggaaaatttagcgagcacgatttcaaatcttaaaacattacttataaagaactggccatttattgaagagaacttcttttaggcttaaagaaagcacaaataaataaatcatgaaaccatataaatctaatcatatgatagtttcgcgatatggccaatagtgcaagtaaagtttgtacattcacttattaaagagatgaaacaaacagcttattgattgctaatattttcttgttgaaggccctttaacatttgtgcatgctaattatatatttaactggcgtctatcaaggtcaacgccattccatcttatcggcaatacattttactgcctgtttttaggccaaaccacaaagaacatgacgtcagctcgcacccattttcaagtgtgtcaggagttgtggtgaatgactttcaaggaagaaaacgcaatttgggtaggcgtaaaaaatgttgttaattaagatcgttaaattatgaacgcttaattaattgcgctaaagagctcgatggaaatgtggcaaataaatatggaaaaataaatcacgcgcgtcttaaattacataaaaatacagttgtggggcataaattattattagttttctcatgcggcaacacaacaacagcaataaaacaagtcaaaacagcaacaataacgaggagttaattcatttgttagagaactcaaactggcgtaaataatgaaaaactcgtaaatgaaaacccaatgtacgcacatgcatggaaaaccgaactagagtacaaatttcttttgcagtttttccatttctttcattgcgcaatttggcgtggctgcctttttttgcatcccgaatttggcattgttttttttattttttttttattttaaatcggccaatgcgaatttgttcaagttaattatgaattagtctcaggcgagtcaatgaaaactatatgaaattatagaaaacacagacacagtaagcaacaacaataagtattttgtacatgttttatcattccaaatgagcatcgtgcaaatcaaaagaaaacgtaaaatggccaagatgagggaggagttgagagccggaaaagctggaatcaccagcttatcggagtatcaatctcctcccttaagaatcgactaatatccatatagttactcaccgaattccgcatctatcgttgcatttggcgtggaccgctcgtcactgtgcatggaattgtcggctgcacttgaagacacctccgccgacgacgctggtggagattgacgggagttggtggttcctgaaatggatgatttgattacaatggttgtactgtgccgcttgattgtggtaggcatatctaagttaataaatcaaatgatgcatcccaaacaagaataataaaattgttttgtgctttctcgtcgagtgtactactaataacatttaaaatttgacatagttctccaggcgggcttggttactatattacatgacttcgatacgggctcgataacgaaagtctaatctaaagtgacctgcaccacaaaccctcgactaccccttcccgtggtgtccctggtcacctggtcacaaatgttgcgcaacacgcaagcctcaattagttgttgattgccggagacagcgactttccgaagtgcgggtgagtgtgaggcaagtgacacacattttacagcttattaacttggccaacaaccatgagaggcctgccgcaataacaccgaactaatggcaaaatctggcaagcactctggagtgagctctacacacattgaccagcagggaggctttactaattaatattcgcaaaggtatggcttttggctgggtctctcaaatgtttacgtgtttgcttagtgtcatccaaagtggcccataaagtagaattgtcataaattatttatacgctaaaacactatctatttattttcctatcaactaacttccttcggtacaatactgcaaactccacaaaaaaaaaagtactgtggccctagcccaactccagctcgaatctactcccattctggccactgtggtcttggccttcttgttccggtcggcttgcgacatggggcaaccaagttcgcggtgccaccggttcacttagcggtcgctgctcgtctgctttattgctttatgctaatttctgcgaagccagcgaatgacgataggtgggccgtggccgtgctgataggtgggtgaatggcatcccgacccacaaactccccatcagcagacctttgctatttatttggctactttactaacccgttgcccgttggttgcgcgactgctcctgcaattgctggaacatattggccctggcccgaacgctgttgctccgcgtcaggccactgggcggtgtcatggtggttgcagtggtcgtggatgtt

SEQ ID NO: 24857 - DNA, 2120 bp, DROSOPHILA
gcacaaaacaattttattattcttgtttgggatgcatcatttgatttattaacttagatatgcctaccacaatcaagcggcacagtacaaccattgtaatcaaatcatccatttcaggaaccaccaactcccgtcaatctccaccagcgtcgtcggcggaggtgtcttcaagtgcagccgacaattccatgcacagtgacgagcggtccacgccaaatgcaacgatagatgcggaattcgaaccctcatccctgtcgctggctgagcgactggccttcttcagcaatctgtgcgagagcggcggaggaggtgggagtaccagtgccggtggaaggtaccgcagtcgcaccagcagctattcaaggagtccgcccggcgatcgcaccactcccaggagcagcaccaccgccagcagtgtcagtatgacgcccacgcccatggattactctccgattccccacgacaaggagccatctagtctcacgctggagagcatcatcgagcccgagcaggaggaggtcaaggagcaggtggaccaggatgaggtcaagttgaggaagaaggagccagtccagagggaatcttcccagcacaatggcttccacgtgctgaccaggtccgccaccgaaccgccgtcgtccacctcgcccctgcgcatcagcatacggactgtgggaaagctagtcctgcccgataccttccgcggcgatcgcaacaataacagcagtagtagaagtgggagcaacagctggagcaacacttgcatggtcaagctgcagagcttggagcccgttagcctgtccgttcattcgcgcaccattggtaaggttaagtcgccattcattgaaaagcagcaggagaaaccacacaccgagaagctagcgaacggaaccagcgacagtggctccgattcgggcaaggagaactgcgcctccaacgagcaggaacatctgcagcaccagcagtcgcaggacgaggatcgagctccgcccagggtgtccgagatgcggaggaaaatcagccgactggtgcaacaacagcagccgcaaccacagcccgtcaatcggcggcacaccaccgagatcacctccgtgaccgttggaacgcgttcgcccagtgtggacgatcgctttgccaagtactttggtgttaaggagagctgcaacagcacgaccaccgtgcataaaacgcaatcgctgccacccagccaagttgaggccaccaatgcgcacgtgaaactaccgcagatcactaccgtggtttccaaacggcgcgagctgctcaagaggacgcgacccctgtccatggatcactactccagcggctgcaccagtcccacagccatgccaagtcccaagagagcacattcgcccgtcggccggcggaaggccgccatttccagcatcgaggacattgaggtcacgccggatgaactccgggccgctggcaggaacttcaagctgttcaccgaaccacttaagagcattcttaagacgggaatgccagtgatgggtatgggacgcggtttaatgcctgtggatctcaatgccgagctgaagaaccggctcaaacgctccacacatgccactgtttccaatctccgcaaatctgccacctcggcagatgccactagagcagctagtgatgaggtggacaatccgcagaggaatttagcccagatcctgaggaatgtttccaaggagaactccacgccgaagcacgatgatgccgtgagcctagtgcggaatctctctactttgggacaacctcgatcgctggcccgtgacgatgcagccgggaattgtgcctcggcatccgaaggcgagagttcggggggccgcgagatcgaggccataatcaagaacagcgctgtggccagacgtcgccggcagcaacagcagcagtcgcagcagcagaatcagccagatggattcctagtcagagtgcagcccgtggcaaggagctactactactggccacttgaccagcggccacagcaacatcagccgcatccgccccagcaacaaggccaacagcagcagcagccagtgttgctcatgcagcagcaaccgaaacccctatacaagcttcttcagcccagacattttgtaaaaaattag

SEQ ID NO: 24858 - protein, 686 aa, DROSOPHILA
MPTTIKRHSTTIVIKSSISGTTNSRQSPPASSAEVSSSAADNSMHSDERSTPNATIDAEFEPSSLSLAERLAFFSNLCESGGGGGSTSAGGRYRSRTSSYSRSPPGDRTTPRSSTTASSVSMTPTPMDYSPIPHDKEPSSLTLESIIEPEQEEVKEQVDQDEVKLRKKEPVQRESSQHNGFHVLTRSATEPPSSTSPLRISIRTVGKLVLPDTFRGDRNNNSSSRSGSNSWSNTCMVKLQSLEPVSLSVHSRTIGKVKSPFIEKQQEKPHTEKLANGTSDSGSDSGKENCASNEQEHLQHQQSQDEDRAPPRVSEMRRKISRLVQQQQPQPQPVNRRHTTEITSVTVGTRSPSVDDRFAKYFGVKESCNSTTTVHKTQSLPPSQVEATNAHVKLPQITTVVSKRRELLKRTRPLSMDHYSSGCTSPTAMPSPKRAHSPVGRRKAAISSIEDIEVTPDELRAAGRNFKLFTEPLKSILKTGMPVMGMGRGLMPVDLNAELKNRLKRSTHATVSNLRKSATSADATRAASDEVDNPQRNLAQILRNVSKENSTPKHDDAVSLVRNLSTLGQPRSLARDDAAGNCASASEGESSGGREIEAIIKNSAVARRRRQQQQQSQQQNQPDGFLVRVQPVARSYYYWPLDQRPQQHQPHPPQQQGQQQQQPVLLMQQQPKPLYKLLQPRHFVKN

SEQ ID NO: 24859 - DNA, 4612 bp, DROSOPHILA
caccgcaccaatctgatgcaatgcggcactccagaggagcatacacagaaggtgagcttagaagtttattatattaatatcaaagaaagtggaaatggtatttatttataattaacaatattgtttgactaattgttcgttcgtcagctggatgtgtgccacctactgccgaatgtggcgagatgcgagcgcacgacgctgactttcctgcagaatttggagcacttggatggcatggtggcgccggaagtgtgccccatggaaaccgccgcttatgtgagcagtcactcaagctgatcgcaacgtgttatggcaaaggataaagcagaaactgaagccaagcgaccatctcacaacctatgaatctcggacgctaatccactgcaatacaggcaatcttcgtttaatgttcgacttaagcactgactgcaccgaaagacgtaatgcgtaatccatactacgtatcatttatttattcaagcttccacacgagggtttggaaattcaatcctatgacgcagcggtgtatttttcgcacccccgtgtaactacacgttttactctgtttcccctagttttttacgtttttttgtgatatccatccagtcccacagcaagcaatacatgtctgtactcgatatccccaatggggttattgcctataacaatgaatcgtaactataactaacgtttaactgtaaagtaggcttagtgataatgacgcaactgcaatgatattaatctcgacgtttgttttttacaaattgaataaaattgagtctcatttagaatcgacttttacgtgctattctaaactaaaaacataacgactgtttttattcgaaaaaggaaaggatttgtattactattcaaaatcgtcatttaggctttagttagaatcgtgttgttggtaagttatgaatgcactttctatgaatatttaatttttctcagtaaactaaaataaatacattttaatttaatttttaacattacatttaattttttttttaatattgtaagtaatgaatgttagtaaacagttgatctttgcattattaagttttgaatttatgtggattatgaaacgagcttttgagacgactaattaaagccataatcatgagttatagttttagtggatgaaaaacagaatgcaatcttatcagctccagtgcggggtactattattgccagaatgacctacagagatagagatactaagagcgcggaattggaaaatgcacaatggaaatggaaatccggattgagtgtaaagtggttgttttggatagagagcgaatcgctgcgcagttcgctctcttcaaaatccgaaacgagcaacgaaagcaaaaccgaatccgaatcggaatccgaattcgtatttgtatctgtaagatacgctctcgcgctctcttcaacgacgaccatcggaatttttctatacagaaacaaaaatctcagtcagctcgctgttttcaagtttggaatccgcatttcagttcagttggattcagtcacagagtcagagcgtcagattcagatcatcgtggtcgccagtgagtttgtttatatgtttgtggctgcctgtgtgtttgcttgtcaagttctgcaacaaaaacaaggcatctaaacaaaagtggttcaaaacaattacgaggaataaaatccaactaaaacgaataataaaacacacagtgtcgcttaaatcgcagagtatctgcagctctagttcttgttgttgttgttttttgaggcggactggaatttaatttaattaaatcaagtacgaatgtgtgcgtgagtgtgtgtgtgtgtgtgtctaagctgggttcttgagttgttcttgttctaagttctttttttcgtggcgtgtatctgtgtgcgcgtgtcgtgtgctggtttgcgtgtgctttttgtgaactacgttttgtttcaatgccaaaaaaaagtatctatgccctggcatgtgctctctctccatctctctctcgctcgctcatgctggttacataaatactggtagaagaagtggaagagatggtggtgaagaaggaggaggcggaggtaacagaaattgaaatacaaattcaattaacacctgaaaacgaaaatccaactggaacgcaaacgtctgattggataaggaaaatagaaaacgggcaaacatgtgtttgaatttccaactcgtcttcttcttcccgtccctatgaaatgttcaaaagcaaagctccttgaaagaggagggtataaaagaatgtggaaaagagcagcagaaccagaacgagaacaccaaaaaaagaaaacgaaattaacgacgtcacataaaagtgtgtcaaagcagcagctcacgcacaccagcgtgcgccaatttgtatctgtgtgaagctttagctctctccctctctcgcaccgtccctctcattcgctgataaaacgcaacgcacacagcgcgtatacataatttatatatttatttaaatgtttttcgtttgctcgcttcgaacaacgagtttttctcgttctaagactgtcgccttttatttctcgctccatcttccgatttgagctcttttcaacatatggcattgctcaattattatgtcataaacagtttgaatggcaaatatgcgatagaagttcaattcgttcaaggcgatattatttttcaagctttgcgtttttggcgcaggaaatgcaaaagttgtcgctgacttgcgtgtggttgtgtgcaggaacgtgcagcaattttccaacgtttgcatgaaaaacctagtgccctaataagcgaaacgagagagagagagagagtgagaaaagtccagagcgcgagagcgaagctgttttcccgcattcgaatttaaaaatcaatgtataaaatgcaaagcggacaaagaaaacacgcacgcacacacacacattcccgagtccgaatgttagatagaaatgtgatcggacgggcacgtgtacgtggcacacagatacaaaagagcgccagagagcagagcggagcgcagagagcggagagagtggaaaaatgttaaattttcagctgctagcagcaaacgcaaagttgtcgttagaatcaaaaaaagcacgctgagacaagacgcgcacgaaaactgaacggaaaaacgtaaaaagcaaaggcggatgaagcagtgcaaaagggaaggcgtaagcaggcgctaaatattttgaaaatatatattaaaaactttgcgcttcgcttcggtaacatatgtgtgtgtgtgtaattgttctaaattaaaccgcgagcaacaacagcaacaacagaagcagctgagcccgaaaagtaaaaagtcccaaaataaattcaggatccactacaacaacaactacagcaaaaaccactgtcgcgtctcgaaatgaaacaataattgaataattgaattacccaaataacgaagaaaaaagcaaaggaaagcgcataacgagtaaaagttaaaaagtcaaaaaagtttaaaacatattgtaaagccgtactgcgtaagccagtcagcgcttaaagtaccatatataggtgttcttatctatacccacactcaattaattgcagctgaatgcacgactccttgcagaaaggtgaatatatttcaaactagtcataagttcttggattaagcatagtttaacataaggcaggtacatgttgtggttctcagaattttctaatgcagaaagggaaatttctttttttgtatctttcacattgaaagtatccgtattgatatgtgacgaggaaatatgactcaatttatttcaacatctttgttaacatttattccccgttgaatgattcaaattatttaactacccaaatctttggttgactcattgtaaatagttatttagcttatggaatctagttgaattgtagaatttcgactgaatttaaactttaaagttttcccctttgcgcaatcgaatgaaattgctttggagcatatttacgcggaatgtgaatgcgaatgaatatattcctattcctacatgggtttgaatatgtactgctgattggccgatctctttctctcactctgttttttcctcctacatctctcgtttcgttctctcatctgcatctggcatgctaatcaaagttgtagctcatctccacctttcccactaacacccgcccaccgccctttacgtttatctgctcatcaatttgctcgtttcatagcctaacccgacacttgattctagtttttttttcttccccagctgctgttaaatgcaaataggcattaaattgtccgcttgtctgttgtttcgtttcatttgcattcacactgtcgacctctctcacagcccctcgaccaccgcccacccctttgtccacgccccccatttggacgcccccgttgcgcaatttggtggggcagctcgtatgtgggttaaactgctgctacggctgctgttgctgcaccactggcaaagctacagaaaacagaaatggagaaaggaggtggagaagaaggaggtgcactgcacagagagaaatagtagtgaggtgtatttagctttaaaagtaagttccatcagttgactcaagctgacttcagccaaaaggcgcagtgtgcacgca

SEQ ID NO: 24860 - DNA, 830 bp, DROSOPHILA
aattttttttttaatattgtaagtaatgaatgttagtaaacagttgatctttgcattattaagttttgaatttatgtggattatgaaacgagcttttgagacgactaattaaagccataatcatgagttatagttttagtggatgaaaaacagaatgcaatcttatcagctccagtgcggggtactattattgccagaatgacctacagagatagagatactaagagcgcggaattggaaaatgcacaatggaaatggaaatccggattgagtgtaaagtggttgttttggatagagagcgaatcgctgcgcagttcgctctcttcaaaatccgaaacgagcaacgaaagcaaaaccgaatccgaatcggaatccgaattcgtatttgtatctgtaagatacgctctcgcgctctcttcaacgacgaccatcggaatttttctatacagaaacaaaaatctcagtcagctcgctgttttcaagtttggaatccgcatttcagttcagttggattcagtcacagagtcagagcgtcagattcagatcatcgtggtcgccagatccactacaacaacaactacagcaaaaaccactgtcgcgtctcgaaatgaaacaataattgaataattgaattacccaaataacgaagaaaaaagcaaaggaaagcgcataacgagtaaaagttaaaaagtcaaaaaagtttaaaacatattgtaaagccgtactgcgtaagccagtcagcgcttaaagtaccatatataggtgttcttatctatacccacactcaattaattgcagctgaatgcacgactccttgcagaaaggtgaat

SEQ ID NO: 24861 - protein, 142 aa, DROSOPHILA
MTYRDRDTKSAELENAQWKWKSGLSVKWLFWIESESLRSSLSSKSETSNESKTESESESEFVFVSVRYALALSSTTTIGIFLYRNKNLSQLAVFKFGIRISVQLDSVTESERQIQIIVVARSTTTTTTAKTTVASRNETIIE

SEQ ID NO: 24862 - DNA, 6565 bp, DROSOPHILA
aattatgaaccagaagtaaccgtttaccagagagagttcactaaacttcatgtctcgccaaaagctagcggcaattttcaatggatcggctaattgacagtccaaacggaatcggattttaaaccaggtctgatagcagccgcaaagtgcccatgcccataaataataaggcaaaatcagccgaagctcttgggttggctagtgaaaacagcaaacttgccaagcttgcacttcccccaaaaaaaaggtgcacaagtttgttttcgtttgaaaatcaatgcaaagtttgatcgtggtcaccctgaaagtatgcaataattcttacgagattcgaacacgccgttttgcccgtgtgttgccgatatgcccgaatgtatgcaacgtttttgcgtatacgacatgtagtctacacgacgtatacgtaatgtaatgtaaatgtaaaactaagaataagcaatacaattcttaattacttagcaatatataatgtcttttatagagaattaagatgtcagtgattcagtttcttatcaaatattgcactttagtaaccgtgagatactttacaggtatttctgttcggtaagtatagaatggccttctctcgcattatgatccattctgattattcataatacacacaattcgcagcaagacaccttatcgcggaacccacttcaattacgtcattccccttcctcggatgtaagtcacaacacacatcatccagataacacccccatcctcatcctcatcctcatccctccgcgatcggtatcacttgcacttttcgcattattatgtcattgccgtcaggtttaacgctcagttggcattgcacgaacaacgggcgcattgcagaaattgcagagaaaagtgcaacaacgttaataaacaaaacgattagcaataaggaaaccattttcacgcaattgcgatcgagatcgagatcggattcgttgcggtccacagcagaccaccgcatgcattgcaacttaacctatcttccagataccataaacactacatactccatattcacgattgcagataccagatacaagtggtgggtactcacgtttacgaagttttcacggtgcacatcgtcgacttcgtcgcgcttcgagatgcgcttcttccagtcgtcctcgccacttttgtggagtgccgccaaacgctccgcaatggagccggtcttcgaaatcaccaaagaccgctgatcggggcccatgacctggataaatggataatcgataatggatggttggcatcagctcacacgtgaatcggttcaattgaccgacactgggtcagatacaattaggggggtttctgtattgaaattatccaagggaattgattcgttcttgactcgtactgagcaatggtgatcacatttaaatgatgtgtagataattacaataaaaaggaatcttctaacttcttcctcagatggataatagactcacctcggttgatgatcgttggacgccttgaagaaactgtggcagagccgttgggtgcgatgagtctcccgaagcttctgcctgctcctggcgaagatccttcttatctggcgattccttggcggaggatgtgttgctgctgctactggtatcctcctccttggctacatgacgcaacttaacaaaaccgccgccgaggggaaggggtggtagctgggggccaaggccgatgggtgctgatatgcccgagtgacttttgcttttcgcaacgagattgctgcaagagaaagaaacagacgatagaccgttaaaagtgtgcataaagtgtggcaattaaggtgcgaatccacgagatatgagataaagagcttcgagtgcagatacgaatgcatgcaggaatggctgaaaacgtgcgttttcctcaatggtctccacaatccgttcccattttccccatcttaataggaaactcgtgacatggcattttcccggccactaatgaacgagtggagctgccttattcgaacgtccctcttcgaatagaatgcacaggaagcgatcgacagtcagtcggcctttttatttctgctgagatgttttgccctcctctgcagccaaaccaaaccaactttctcctttaataggcgaccatccatggaccattgaaccatggattttattaggcgctgggcagagattttcctcacagttggcaatggtattttctgctgcaaatggtcatcggatcggttattgttatggctgagtctcatttttattggccgtcagacgttgacgttaaaaaaccgcgggcggctaatgagacaagttgattgcttggctcgggggattatcctcttagccattcattttccttgtatcaactgacatttgaaagcatttaaagacggtggaagttgggaacggtctatgatttaattggaattatgttttgccaatagaaccaatttcaaatacttgttgagggacaacacaattcattattatgttcgatcgaaatggcatagaattccactggaatcattattatttcccgcacatttcattcagcacttccattgatcaaaagctgggctttgtctcagcaaaacaagattctatctgtatcgaatggaaaccgcctggtatattcactgtttttttttttttttagcagcaccgttaagaacgactcggagatttttcataaaattctgagcagacgcttattagtcaccggacacgattcggtacattttgatttctggattctgaccgccttgagaaatatctcacagcgtgagtcaaagtcgcgcggaaaacaaaaccccaacgaaatgggcccggcattaatatatgtcacggattattcggaacgacaggcggcattcagaaaccgctaagaacttgtttgcatttcgatttggcaatggccatgcaaaagggaaaacaaggcgcactcacatttgggaaatctctgcacgtgttttcctaactccgagaggcactggaaaagcgattgaaaagcgaactgcacgcgacgagcgaacaaagacgaatgagcagacagcatggattgggttccagtacacttaggtatactgtgtggcccatctgagttccaatcccgacgaggctcggcacctgcggcacctacggcaggtaaacaaacggccaaactgctgacagctaaattgcatattaatttggacaatttttgacagacccgcgacaggcaaacgctgaccaggtgctgggttttcggaactcatctacctaaaatgtcggacaaagtgtccactgtttgctgatcgtgtgtaaatccgttcaaaggtagcatgaggactatatcacattttattatattacttcagaaaaccgaacaatttttgaaaatatttcctacgcagtcaggagaatctcaaaaatctcagaatgtgtagtacatctctaagctaaaatcgccaattgaaattcgaatcaaactgaaactcgatttcaattaccatgcataaccgcatggaaaatggcattggtaaagttcaaagtttagccacaaccgctgagacgtgaaatcaaagtaaaagcctggctaatggaataatggcagaaattgcagactcggtggagtgagattggtagtggggaatatctgctggccaggagccataggtcagagggcagacatgcgagtggctcctgccgggcttgaacttctcctatttccacagtcgatagctatagtttttagtgcagtaattgccctttggaaagcgtttagcgagcaattagtttgagtgccaaactcctgggtgcggtgaatggacatgctgagccacacccttgaagatacatacatatgtatataaaaaacccagccgaaaacacctccattccacacgactgactgacggacagttcagggagctcaggttctgcatataattagaagccattccggggatcgttgatcagctcacttgcgttttgtaattgaattacccagtgcggtaattaaaattgaaatttctttggccaaaagtgaatgtgaaccgagactgagagtgatcacgcgatcggtttggcaatgcggcagcggtttatggggacttaatgatataacaaaatgaattgttttataaactatttggcgcggcataaaaaatggcacgccatcaagccttcgctttatgaggccctcacacggaatgatctctaatggagttgtaagcccacagattccacatcaaggtgttgaaaatgtatgcaaaaatacctcatataaatgatgtgaagagtgcctgctgcactcccgatcatgatcaatgccaactccccgttcctagagggtctctgtcattgtctctatgtcaagtacccggttcgagttaaacgatttaaaggcaaccataaatcaacggccgtggcaactgtttgagtttgagcggtttttagcaaggttgcagccgcagttgaggctaaataagtaaaaataataatatctcacagctaataatactaaaacatgatatatttccaacagaagcatctgacttgatggcaaaccgcaaaatgatatcagacaggccatcgagttggatcgtgtggcgacacttagaaaaatctacaactataatttaaattgtattaaatttacgttaagaaaataaacacaaatatttgaccatgggactatttacaattgctataaatttaagatccacctttttttttgccagtgcagccatatgaaactcaggtgaattgccggtaatgcatcgcgtcatataaatcatcaggtaagcagaaattgacttatgcaatgaattatggcagaaagcgaatggaactcgcaaaagtcccaagagcagcgattttggcagccgaaagagtgacaattacccacgaaggcgccaagccaagttgatgagagcaatgaaaggcaatgaagatccggacaatgagcaaagatctcagagatccaagagatccaagatcggagatcccagatcccatagttggccagattcaagatcgcgttggggttgactttcccacgccgcagtttgcccgcttttcaagtcggaggagagcagttgaaggcggcggtaatgatgcaaaattacgacgtcaacatgggcttacagcttttttcgctttttgcctggctgcttggctcttttgtcttttgtctggccattcgacatttcattaggccgacccagtggaaggtttaaaacaaaaatagttaccaactctcgggccttttgttcagcagttttgcttattcgcccagctgaaaaacttgcttaattgttactctgagttaaaagctacaatttcacctcaagttcaaggtgtcgcgactttttggttgctttgtgaaatcgaaatttggcaatgggttgcacttatcttagcaaaaaaaaaaaaggtgtttacctcatcattcgcacttggcagattttcccttgcaatagaagtatttttatactaagtgttatatttcacatattgttaaatcttacaactttatagtttttcgaccttcaacctttctggggttaacgcttgtcaacatttgcctccgcaactttgttgcggaactcctgcaatcagctgcttttgtttttccacgagcaggcgcagtatcccagacacgtgctgtcagggcagaagcaaccctcgagtgagcagcccccgccgaccacccatcatccaacgcccagagccccacccacttgggggatccccagacgtgtttttcttttggttcctcggtttgccggttgccgagacaacgccgaaaatgcgtcaaaacaaaactcaacccggctctttgttcgatgccaatggccacgggtggggatgttgaatccgggagagattgggtggatttttgggagtttggggcatgggtaaatgttgggtaaaagttgagtgactccgtgttttgactgcagcggaagcaggaaacatgcgttttttgggcaggccagacaaaggagtttcatcgaatcccacttacagctggttaagatctgggatgcagctctatatgaatcccattagggcggggaaatccatttttcactggggttgtccgtactacgtacgtgcctgtcacggctttttcccggtcttgcagatgggcgtgcacttattgattaagttttcctatatattttccccaactctgggacccacataattacctctattactccaccatgaaactcttgcgctctctgcttcagtttccctgggaataaagtgagtcgacgtttttcagatggtctacaatttggccgactgtttgcttttctttctgcttatatctggtatcttctatactatactatatatatatatatttgatgtgacgctcccatttaccgtttcgctggtgtcagaggaaccgcgtcatcgtcgcggaaaaaggtaaacttctttcggtcttttcaacgttttgataacttgttttgttttctggccaggcccatgaccatgtcggcggaacatgtgcagatgtcatccgagtgccttaattgaccgccaagtgaatgtacttgctacgactgtctccggtgttccgccga

SEQ ID NO: 24863 - DNA, 579 bp, DROSOPHILA
acaaagttgcggaggcaaatgttgacaagcgttaaccccagaaaggttgaaggtcgaaaaactataaagttcaatctcgttgcgaaaagcaaaagtcactcgggcatatcagcacccatcggccttggcccccagctaccaccccttcccctcggcggcggttttgttaagttgcgtcatgtagccaaggaggaggataccagtagcagcagcaacacatcctccgccaaggaatcgccagataagaaggatcttcgccaggagcaggcagaagcttcgggagactcatcgcacccaacggctctgccacagtttcttcaaggcgtccaacgatcatcaaccgaggtcatgggccccgatcagcggtctttggtgatttcgaagaccggctccattgcggagcgtttggcggcactccacaaaagtggcgaggacgactggaagaagcgcatctcgaagcgcgacgaagtcgacgatgtgcaccgtgaaaacttcgtaaacgtgagtacccaccacttgtatctggtatctgcaatcgtgaatatggagtatgtagtgtttatggtatctggaagatag

SEQ ID NO: 24864 - protein, 186 aa, DROSOPHILA
MLTSVNPRKVEGRKTIKFNLVAKSKSHSGISAPIGLGPQLPPLPLGGGFVKLRHVAKEEDTSSSSNTSSAKESPDKKDLRQEQAEASGDSSHPTALPQFLQGVQRSSTEVMGPDQRSLVISKTGSIAERLAALHKSGEDDWKKRISKRDEVDDVHRENFVNVSTHHLYLVSAIVNMEYVVFMVSGR

SEQ ID NO: 24865 - DNA, 7986 bp, DROSOPHILA
gtgttaatccccttggcttatcggtttaatctatttataaaatcaattcaaacataaagcggcgcatatctcagcgatgttgggtaggtaaccaaaagtaaatacactctaattcctattgatcttgtataaatacgagtggatagttagttagatatcaccattttgcaccgtgcataaacataaagtgagatactcgttttcgagagatgcacttctgagtacccgtattcaaatcgtactctcagtagccaagtactcagtactcaagctgtttgtcttacgggtgtggacgtgcgagcagacactttaggagtgggatagccggagcagaccggctgaagtgtcatccgatcgaaggtcgcctcaacagcacagcgatttcgattccgattccaaatccgattctttggccataggaattcctctgggaggtggagcatgtggctgatttatttatttcgagcgatataaacagagcaatacgagaatgggcgaatataagtttgctcgaacggctggtccgttccgagctgaaattgaattgtaaatggccatattaattgggaatcatttaaaatttccaatgattttttctgtgttttggtgtcggcagtctatgcatgttcggtggcataatttatgggcgctaattactatcgccccattttgtgtatttcgcgtgctgtccaaggccaattacgcttacttattgcaatttatgtggccacagtccggccgtaattggaaattgtgtaaggtcgcaggcaatttcattatttgtatgcacttctggacgctccggttgccgggtctagcatttttctagcatttttctaatgacgccagcgcgtttggggacgacgttacctagcccagttttccctttgcagccatttgattaagtgacctacgtttcgcccacacagaatcatcaatttgttcatgtcgccgacggtgcgaataaggtccaacctaagtgagtgagctatccgccggcatggcggcgttggaacatccggatgccatgctgccatactccaaattgttgtcaacagccctcactgtggccagtggtaactcgaactcctccgatggtactttgctgctcatccagaccagtgcggcaccaggtggcgatgtgatggccaccggagccggagccggaaagttgggtgtgccctcgatgaactcgtacctggtgagcatggcgtggcccaagtcgctggcagtggccgtcttcctggtcatcatcctggtcaccgtggtgggcaacacactcgtcatcctcgccgttctgaccacacgccgcctgcgcaccgtaaccaactgtttcgtgatgaacttggccatcaccgactggctggtcggcacctgcgtgatgcctccatcggtggtgctctacataacaggtgagaatggcagcggagggcctgtccatgcccatcgatggccaaagatttatggctctgtgggggctttacacttccggggaaggtggaatcggggcaagtgtttactattcgaagccctccggtggaagttcgggtagtaaacatttgcccaaatcgatgggggagcacatttggtcgatttcgatttaaaataatcccacagcgaaaattataaaatttctccgttggcaaaatatacatatttttgattgcaaaatatcttgtgagtggtgtgcgagtgttttatgggtttcgctggaaaacctttgataattttttctggaatctatatttttagcagaattttgaataaagcataacaacattagtggttaaaaattttgtataatttagtaattttaaataaattatgtatctttaataattaacatctcttatttaacgcatttcataaatgtataaaaagcaatcaaacatgtgatcttttcgaagccaaatgaatatacaaagtttaatattccttgtcataacttgaacaatacaaagaagaatttatagtggtttaaattgaaggatctgccagtgtaatgcctccttaatcccggccaggtgcacaaaccgattgaagcacggcgacaaatatttgttctttgcaggcacttggcgctttggctggatactgtgcgacatttggatctcgctggacatcctgctctgcagcggctccatcctcagcctgtgcgccatcagtctggacaggtgagttggccaactaatttcgtaatttgccgttgatgtcatagcaatgaccacagtccatagcccgttgtccacggtcctcggtccttagataaagtcatggcaaggtgcaaaaacagtgcaaataatttatttgttgacgtttttattgccgcatgaccgttgtcctggccattcccagtgcatatcctttgagtgtgcgacgccacaatggcaaggattgggttgggcttggattcccattcacccattccctatttccccatttcctccatttagccatcccaccgtttgcttttgttggaagtttcaattacattttaatggcatttccaagttttgtgttgtggctcccgagttgagctgatccagctgagccatggagccatggacctgaacctcaaccaggacaaacaccgacgcccactggcgttgtgtgtgccttttggcctggccagaaagccgtctgcggctttgcgaacaatatgtccgcttggcttttgtttttttccagcatttctctggccatttccgttgcgtttattggcccggcttttataatttcctctttttcaccttcgtttttgttttatatttcgcaggtatctcgccgtcacacaaccactgacgtactccaagaagcgccgatccaagcgactggccctcctcatgattctcgtcgtgtggataactgccctgtcaatcacatgtccaccctatttgggctggtaagttagcgccagctgcacggagaacaaaatcaaccttaacccatgatggatcgcctattcatctgttaagaaaaccattcatgttataatcatttaattgaacgcattaaattgggttgggagtacaggcaacatgtgataatgatcagtatccaaaggaagaaaaataatatatttaatatcatataatattattaataatattatattataaatatggccaagataaatttatttgtagtgctctattaagtttatagatatatatttttttgaattttgtaatattattttcactctttcccgtgtaattcgaaatattatatgtaatatttttattgagcacccattttttttttaccaaatttgtccttccggaggcgtgacaatactttgtggctttttgtggctgaaagtcctgctcgcttttttttttcttttttgagctaatggctgtgcggtggcgcagcatagataatgtgctacaaaagggtctcgaaatacacacgtttatttatattatatttgcgcctttggctgcgcctaaaaaacattacgtaattgacgacgggttgttgctgttgctgctggtcgtgcagccattacattgaagttttaatgagttgttaatgactttgtttgccgcggcgcatttgctttgttctcacctacgcacacacactcagcgcgaaagccgcacacttgtgtgttgcatacttccaggcgcccaaattaaccagcactcactcacacacactcgcactcactcacacacaccacaaagccagcatgtccttaatgccattggccatggcttagttttggccccctttggctgaaagcgaagagcatggcttaaagggcacattaaaacggtctgaggccgaattacagccacagctgcaggacattggaaaatttggaaaatttggcgctgggggaaaatcgcaattataagcgccagcagatggcgccacttacatattttcattctttaagcggactagttttatgaaaaaagtttgcaaatgcagcggttgcaacaactgtttgttttactcacaatctgttatttgttattgcctaatgaatactaaactgattgtgtttgcttgctatttaaatttagatttaacttttggctaattgatttaagcattgtttatttagttcattttttaatttaactaatgcatagctaatgtattaaattgccctcaatttcggattgaataattaatgttaaacaagaagtttagtaggaaaatcggctatttccattcgggtcttgtaaataccaaccttaacaaagttgcatttgtacaattatactgtcaggttattttggtatcgggtagcagtaattaccgtgagtttttggataacacatacttggggtaacaagcagctagtttagttgaattacaacaccggaaaattccattgacagtagtgacaatgaggcaataaactttttgaaagagaaacattataggaaactgtgtatccagtgggcgtgccccaaactttggttggcatatttgtaaaaattggccatccaaaaaataaatcaaaacaactggcaatcattttataatcgtgtgggcgtgagtcttttaggcgattggggggctttagagtgggcgtggtaatgttctgaaataagcttgttcccgagatttggactccgggggacaaatggacataaccgaatcaaggatatatatacttcatgcttctgtctgctacatgatattcagtgaacctagtattctaagaatagtgggtacaataacccagtatgaactggaagaagctgaatcttgccacctacagtggatgtatgtgacaatttgcccattttttttactcaattccccacagcacacgggtgtacctttagttgacacatttggtgtacgccaccacattactctgttgtctcggaatcgttttcttccgcatattgatttaaagtcagctccgatttgtactgcctgaatgaccaacacactgcgatgtgcataagtaaaaggcttacaggtgggactactctgactggcttaggtttaggatttgaattcgaatttcgcccggcttaactcagccagttgtcattccccaagtcccagttccccagccgcaatcacaaccgcaagagccaccaaaccagagcaggtaccaggtacctcccacatccaccacatctcacatccttccaacccgcaaaccgcatgcaattcgaactggaattcaatttgccattcacatccacattcgcaggtacgaggtcggtcggcaccaggcggagttcgtggactgccgctacaaccaaaacaagggctacgtggtcttctcggcgatgggatcgttcttcattcccctcaccgtgatgctctacgtttacgtgaagattggttatgtcctcacgtcacggcgacagcgcattgtgcgcgatgcggtaagctacatctccagctccatcactatataagcatatatgtatgtgtccaccactttggtgtcccctgaaatgtgtccggaaatttatcatgtcacacctaacacatctaaccagctaaccaggggactaagttgtcaggcactggggaaaaagatccaggagtgcgctcaacacttcaagtgcagatcttcattaagttgggatacccactgggtatcccacttgagtaccagccacttatcgcacagtactgcaggtgatattttaagtgctgagctttgataacagaagtccaactaatatatctaatcacaaattaaatttgctgtgaattcttggatgtaaactgaatgaattatcttttgtttgttagcatgaaaaatgaacttcagtgtcaataaatgaaatgaaaatgcaataagaacactttttgaatatttaaaaagagtgcatagtagttgataaatatattcttttagtttagtactaattgaacgtttgctgccaagagcaagtgaagtaaattgtagaaagtaggtgacgtgaaatggaacgaagtaattacagcaatccaaatcccgaatctctatgccctgacatgcaatctaaattattcctcacgtttttgtcagtgctctgcttacatattcctcttctattatgtccttccaacagtactcggagcgcacggcagactacgatgtggatggggacaacttcatctcggagtcggagcactatcattgcacgccaaccaagtggctgccgaacaggaagtcccgctggaggttcaactccctgcacgacccaccacccagcgccgccacgaatgcagcagcgaagggacaccagtcgtccgtcaagtgctccaagtgctccaagtgctcctctgccactggaactgctggagctggagctggagctggtgtggtagacaaaacgctgacgttcaaacatcagcccaccttttacgagctggtcgaggtgtcgcgtctctcgtcgctcattcactgctcggcaattagctgcaagtatggaggaccctgcatgcactccacgccctcgggcatgcactacgttggcacggaggcctccttctcggacacctgcctgggtggcaatgtgagcaacaacaccaccaccaccaccaccaacaccgtcgcactggaaaccaacgagaaactggaggcggaggccaagcaaaagcaacagcagcaacgatcctccttcgaccaccatcacccgcatgcacaccatcatggctcccatggccagcagagccatcacaatcatcaccatcgcatgccgatgcgagtttcgaccacgaaacgtgatagcaagaccgccaagaccctgactattgtgatgggcggcctaattgcttgctggctgcccttcttcgtctattatctgctgatacccttcctgccgcgacccgccgtcctcgaggacctcatgttcggcttcacctggattggctgggtcaactgcgccatcaacccgttcatctacgccttctacaatccggactttcgcactgccttctggcggctcacctgtcgccccatttgcaagcagaagcgtccgcccaaccacctggccatgttccgtggctagtttccggatgcagatgcagttgcggatgcggatgcggatccggaaccggtttccgaatcactgagcacttgagtgtgtgtcatagtgccgccatctccagtcgcacaatcgacgctcacttgggtggtgggggaaatatctcaggcatatccttaacttttcgccgtgctggttcaccaacttctatgtaattagcataaaaaataagtggagaaactaccaactcgcatttcgatctttttgaagtacaagttatgccaatgcaaggacatcaaattgactctagactacagtacagatagtaaataaaaaagaatttaaggagtattaactacaatagataagctgtttgagaaatgcactatctcttatattaaatcaattgaagataatgaaaatcaaatattagcttaacaaaactgctgaatttaattcaagtttatttcatgaaaacaaatatatagaaactagtttaaaatttatcacacatgtccctccaaaaattgtaactaatattttggcaaacgaagccaatggagggaccttttggccaactcgtcgccactagctcaccaactaagtattcatttgccaggcactataagctgtttgccgcactctatctgcatcgtttatgccaaacgcagctagtaaaactaagatacttatggtcaatattgattggagcaaagattgccttgttaaacccaaaaaatcgactgccttttgaagcttcaaaagccgcatttcgagcagcatcttaaaggtcactttacggtcgcaattttttttttttaagactcactggacttggccggaagttgagattcttgcctagaccagatccaaatcctatatatagtattttcctgtgtgtgagcgttgattgtgcgaggcgagcggcacgaagcgaaacgtaacgaaacaaaagacaaattatagtatttgcgagtctttgttgcctgacggcaactgttggccatcgggatgagtgggatga

SEQ ID NO: 24866 - DNA, 1704 bp, DROSOPHILA
atggcggcgttggaacatccggatgccatgctgccatactccaaattgttgtcaacagccctcactgtggccagtggtaactcgaactcctccgatggtactttgctgctcatccagaccagtgcggcaccaggtggcgatgtgatggccaccggagccggagccggaaagttgggtgtgccctcgatgaactcgtacctggtgagcatggcgtggcccaagtcgctggcagtggccgtcttcctggtcatcatcctggtcaccgtggtgggcaacacactcgtcatcctcgccgttctgaccacacgccgcctgcgcaccgtaaccaactgtttcgtgatgaacttggccatcaccgactggctggtcggcacctgcgtgatgcctccatcggtggtgctctacataacaggcacttggcgctttggctggatactgtgcgacatttggatctcgctggacatcctgctctgcagcggctccatcctcagcctgtgcgccatcagtctggacaggtatctcgccgtcacacaaccactgacgtactccaagaagcgccgatccaagcgactggccctcctcatgattctcgtcgtgtggataactgccctgtcaatcacatgtccaccctatttgggctggtacgaggtcggtcggcaccaggcggagttcgtggactgccgctacaaccaaaacaagggctacgtggtcttctcggcgatgggatcgttcttcattcccctcaccgtgatgctctacgtttacgtgaagattggttatgtcctcacgtcacggcgacagcgcattgtgcgcgatgcgtactcggagcgcacggcagactacgatgtggatggggacaacttcatctcggagtcggagcactatcattgcacgccaaccaagtggctgccgaacaggaagtcccgctggaggttcaactccctgcacgacccaccacccagcgccgccacgaatgcagcagcgaagggacaccagtcgtccgtcaagtgctccaagtgctccaagtgctcctctgccactggaactgctggagctggagctggagctggtgtggtagacaaaacgctgacgttcaaacatcagcccaccttttacgagctggtcgaggtgtcgcgtctctcgtcgctcattcactgctcggcaattagctgcaagtatggaggaccctgcatgcactccacgccctcgggcatgcactacgttggcacggaggcctccttctcggacacctgcctgggtggcaataaactggaggcggaggccaagcaaaagcaacagcagcaacgatcctccttcgaccaccatcacccgcatgcacaccatcatggctcccatggccagcagagccatcacaatcatcaccatcgcatgccgatgcgagtttcgaccacgaaacgtgatagcaagaccgccaagaccctgactattgtgatgggcggcctaattgcttgctggctgcccttcttcgtctattatctgctgatacccttcctgccgcgacccgccgtcctcgaggacctcatgttcggcttcacctggattggctgggtcaactgcgccatcaacccgttcatctacgccttctacaatccggactttcgcactgccttctggcggctcacctgtcgccccatttgcaagcagaagcgtccgcccaaccacctggccatgttccgtggctag

SEQ ID NO: 24867 - protein, 567 aa, DROSOPHILA
MAALEHPDAMLPYSKLLSTALTVASGNSNSSDGTLLLIQTSAAPGGDVMATGAGAGKLGVPSMNSYLVSMAWPKSLAVAVFLVIILVTVVGNTLVILAVLTTRRLRTVTNCFVMNLAITDWLVGTCVMPPSVVLYITGTWRFGWILCDIWISLDILLCSGSILSLCAISLDRYLAVTQPLTYSKKRRSKRLALLMILVVWITALSITCPPYLGWYEVGRHQAEFVDCRYNQNKGYVVFSAMGSFFIPLTVMLYVYVKIGYVLTSRRQRIVRDAYSERTADYDVDGDNFISESEHYHCTPTKWLPNRKSRWRFNSLHDPPPSAATNAAAKGHQSSVKCSKCSKCSSATGTAGAGAGAGVVDKTLTFKHQPTFYELVEVSRLSSLIHCSAISCKYGGPCMHSTPSGMHYVGTEASFSDTCLGGNKLEAEAKQKQQQQRSSFDHHHPHAHHHGSHGQQSHHNHHHRMPMRVSTTKRDSKTAKTLTIVMGGLIACWLPFFVYYLLIPFLPRPAVLEDLMFGFTWIGWVNCAINPFIYAFYNPDFRTAFWRLTCRPICKQKRPPNHLAMFRG

SEQ ID NO: 24868 - DNA, 3814 bp, DROSOPHILA
ggtgttgttgtttttccgccctgtgtgcgttagtgtgcgtgtagttttccgctcttgtccaattggaatgctcagttttctggatttatttggcacaagcacacgcgttttttaattgatgctgattgaaagcgaagagcgacaagtccacgcaaacactttattttcctgttcacccgcaactgaaaagcgcggagttggccggagactaattttaagctgttgccagcgaccgaatggcgagtatcggtggatttcgccgcgagttggagacgagttttatatatgaatcactttaattttggagcggcggcggtcataaacaatacaaaaaaaaaaacattgaatcacgtacacgaacgcaggaacacacacaagcacaagcgcacgctcgctcaactggagagagcgaacagctgattagctatcgatagcagttggaactatcgcaccgaccgaggaagaaatcaagtggtaaacttaactaaaatacttatcaacttaccgctgtcgataataccaaccaacggtttaaaactaactgttggaaagttggtaggtgttccaactggaattctcgtcagtgagcggcattcaaatcgtatacaaatcatattaccttgtgttctgtgaaatataaacattcactcacagctgttcccatgaaaaagtacgaaaagaacagaataatttcaacgctacagtgtttctatgttaaaatattggggatgagaaattattacatgtgtaaagggtttaataactatttgcattagtactgttacactcagaatttaaactttatatataataatatattggctttatcatctaagatgataaatatataacgtttataccactttaaaatcaaccgaaaatatcgcatatcaaaggtactcacttctctctgtctataaagtgtcttttatctgtggtaaacaatgattagttaacaatctgcaatatatctcacattttcagtctgtgtagagattaggccgatccagacgttaatgagaaatggaaaagcgaagtggaacgccgataaatagccaaaagtttcgaaaactcagcgatgtggacatgacggaagtgcagctgaacaatttggatgactccagtgccaaggagacggtggaaataggtagctttcagggcaatgaccagagcaatcccgtgcagcacacgaaatggttcagatccaggctcttcctcatatccgtggttttctcggccctcctgataaccgccatgtgcattggcttcgttgtgcactacggcatgtccggcgatgtgggcgacatggagacggtgagctactggcccgtagatctgcccaaggagcaaaaggagtggtacgatcagggaatcgatgagcttcagaaggccgtttccaggcagttcaatcgccggcgagccaagaacgtaatcctgttcgtgggcgatggaatgggtccgaacacggtgacggccgcacggatactcggagtcaaggaggagggactcctgcgttgggagcagtttccggacatgggactgctgaagacctactgtgccgacaagcaagtaccggactcgttctccacggccacagctctctttggcggagtaaaggtaaactacgaaacgggaggagttgatgcaaatgtaccgctggggaactgcagcgcatccctgaaggaggaccaccacgttcagacgatcctcaagtgggcccaggtggatggaatgcgaacgggtttcgtgaccaccacccgggtgacgcatgccactccggctgccctctacgcccacgtgccggatcgtcgatgggagtgtgagagcggaatgccagccgaggctcagggtcagggatgtatggacatagctcgccagctgatcgaacagccgacgggtcagagcataaacgtaatcatgggcggtggtcgtcagatgctggtctcagatgtaaccggttcagcagccgatcccctggacacttgggccggccagtcgaaggatggacgagatctcatccgagattggaggctaaagaaagcggatgagggagtgtcacatgcggttgtgcaaaacaatcgtgagctgtggaatctcaatggtcaggatgttgactacgtacttggtattttcgccaatggacacctaatgtacgaccacgaacgagatcgcagtgacgccggcatgccctcgctgtccaatatgaccctcaaggcgctggaggtcctgggaaacagtgataaggggtttctgctcgtggtggaagccggtctaatcgaccaagcccatcacaggggaaacgctcgaaaggcgctaagtgaggtgctcgaactgaacgcagccgttgagtctacactttccttcctcaagtcatcggatcgcctggacgaaaccttggtcattgtgaccgccgatcactcgcacagcctgaccatcaatgggcatcccgatcggggatccagtatactcggcttggcgggaaactcgaagacagaagggacgccgtacaccacgttaacctatggcaccagctatcagggattccaggtggatccgcaaacgcagagccgcaaggatccaactgctgacgatattaccgcctgggagtacacccagcaggcagcaatcaacacggacgagaatctgcacggtggctcggatgtaacgattcacgcggatggtgccatgtcctacttgttccacggcgtccacgagcagagctatgtggcgcacgccatatcgtacgccctgaggatcggaagattccgggatagctccatcgcggaaactctggccgagctgacgcccatataagcgtagaaacaaaagcgtagccaacaaaacactttgatatatgtagttataatgaaaactgttcttgccaagcttacaaattagatataagtcaaagattgggtcaccgaaataggacatgagttaactgaaaccattgaaggattttaccgaatgagattgttgaataaacattaatttgaagagaaaacattcaacatttactttgccatctttgttctttatctttattacaatcccattatgttgacaaccaataatattattaccctagaagctaactaaatctgatgtttaaggctagtgcctgcacaaataaatgtgattactactattcattaaaggttgcggttttttttttagtgcaaaatggacttactgcaactgaacgacgattgtttggatattatatttggttatttgagtttggaggacctagcgccgctctacaatgaaattccctgttttggaggcgccatcgagagacagctgcatcgattcagggacttgaggttcagcatgagagagccgcctgctctccacgaagatttgctcattaagttgggtggccaactgaacagcctgcacatcaacgtgggctactccaccaaggaccaggacgtactccggtacctgaggccactgtgccaaggggccgccgagagccgcaggattcgggctctgaagttggaccatgccaagtggtcggcggagatagtgggcactgtgggccaggtggttccatcgctgctatttctggacatgcgtcactgcgatgtgcgagactaccagatagcacagctcttgcaatcggcagataagctaaaggcactcgctctactccacattgacaatcagacgggtgattcctatctgcagccgcaactactcaacagattgccatcgctgaagctcattcacctaaccaccttgggttccatgggctttaaccccgaaaacctgacacggctgtgcccgaacctgagcttcctcgtcagtg

SEQ ID NO: 24869 - DNA, 1814 bp, DROSOPHILA
gccgatccagacgttaatgagaaatggaaaagcgaagtggaacgccgataaatagccaaaagtttcgaaaactcagcgatgtggacatgacggaagtgcagctgaacaatttggatgactccagtgccaaggagacggtggaaataggtagctttcagggcaatgaccagagcaatcccgtgcagcacacgaaatggttcagatccaggctcttcctcatatccgtggttttctcggccctcctgataaccgccatgtgcattggcttcgttgtgcactacggcatgtccggcgatgtgggcgacatggagacggtgagctactggcccgtagatctgcccaaggagcaaaaggagtggtacgatcagggaatcgatgagcttcagaaggccgtttccaggcagttcaatcgccggcgagccaagaacgtaatcctgttcgtgggcgatggaatgggtccgaacacggtgacggccgcacggatactcggagtcaaggaggagggactcctgcgttgggagcagtttccggacatgggactgctgaagacctactgtgccgacaagcaagtaccggactcgttctccacggccacagctctctttggcggagtaaaggtaaactacgaaacgggaggagttgatgcaaatgtaccgctggggaactgcagcgcatccctgaaggaggaccaccacgttcagacgatcctcaagtgggcccaggtggatggaatgcgaacgggtttcgtgaccaccacccgggtgacgcatgccactccggctgccctctacgcccacgtgccggatcgtcgatgggagtgtgagagcggaatgccagccgaggctcagggtcagggatgtatggacatagctcgccagctgatcgaacagccgacgggtcagagcataaacgtaatcatgggcggtggtcgtcagatgctggtctcagatgtaaccggttcagcagccgatcccctggacacttgggccggccagtcgaaggatggacgagatctcatccgagattggaggctaaagaaagcggatgagggagtgtcacatgcggttgtgcaaaacaatcgtgagctgtggaatctcaatggtcaggatgttgactacgtacttggtattttcgccaatggacacctaatgtacgaccacgaacgagatcgcagtgacgccggcatgccctcgctgtccaatatgaccctcaaggcgctggaggtcctgggaaacagtgataaggggtttctgctcgtggtggaagccggtctaatcgaccaagcccatcacaggggaaacgctcgaaaggcgctaagtgaggtgctcgaactgaacgcagccgttgagtctacactttccttcctcaagtcatcggatcgcctggacgaaaccttggtcattgtgaccgccgatcactcgcacagcctgaccatcaatgggcatcccgatcggggatccagtatactcggcttggcgggaaactcgaagacagaagggacgccgtacaccacgttaacctatggcaccagctatcagggattccaggtggatccgcaaacgcagagccgcaaggatccaactgctgacgatattaccgcctgggagtacacccagcaggcagcaatcaacacggacgagaatctgcacggtggctcggatgtaacgattcacgcggatggtgccatgtcctacttgttccacggcgtccacgagcagagctatgtggcgcacgccatatcgtacgccctgaggatcggaagattccgggatagctccatcgcggaaactctggccgagctgacgcccatataa

SEQ ID NO: 24870 - protein, 596 aa, DROSOPHILA
MEKRSGTPINSQKFRKLSDVDMTEVQLNNLDDSSAKETVEIGSFQGNDQSNPVQHTKWFRSRLFLISVVFSALLITAMCIGFVVHYGMSGDVGDMETVSYWPVDLPKEQKEWYDQGIDELQKAVSRQFNRRRAKNVILFVGDGMGPNTVTAARILGVKEEGLLRWEQFPDMGLLKTYCADKQVPDSFSTATALFGGVKVNYETGGVDANVPLGNCSASLKEDHHVQTILKWAQVDGMRTGFVTTTRVTHATPAALYAHVPDRRWECESGMPAEAQGQGCMDIARQLIEQPTGQSINVIMGGGRQMLVSDVTGSAADPLDTWAGQSKDGRDLIRDWRLKKADEGVSHAVVQNNRELWNLNGQDVDYVLGIFANGHLMYDHERDRSDAGMPSLSNMTLKALEVLGNSDKGFLLVVEAGLIDQAHHRGNARKALSEVLELNAAVESTLSFLKSSDRLDETLVIVTADHSHSLTINGHPDRGSSILGLAGNSKTEGTPYTTLTYGTSYQGFQVDPQTQSRKDPTADDITAWEYTQQAAINTDENLHGGSDVTIHADGAMSYLFHGVHEQSYVAHAISYALRIGRFRDSSIAETLAELTPI

SEQ ID NO: 24871 - DNA, 2881 bp, DROSOPHILA
gactcgatttacattgagtcgaggccgttcgtcattaattatttttgtgtaagtccttgagggcaagcaacgaaaagttaaggtttttgacattgcattgcaatatgctcttttgttcatgctaacagaaaaactgtggtttctggcttaacatcttacaagtctgagataaacgtcataacgtctcatattatcacccatatatagtatcaaaaatcttcacataaaacgtagccaagacaagcgatcttggaaagaacccgaaaacttccacaagttgcctctcgaagagggctcataatagattattggtacgtgctgcgagacaggtttcaaggatgtaggataggacaggcagcacacgagactcattaatcctgttggcaaacgggtgcccgggtggccttcggcttccttgccacgactcatttgtgctgaaaactttctgtttgataaattgcccataatacaagcacacattctcgcttctcttacaactttgtgtggggccaatcccaaaccatgtatagtcatgccagaagctgcaaaagggctggtagctgttttggcctgaactttttcgatagataaacacttaacacgtttttgccagtaatctaaatactccccttttggcgaacatatatttacttaccattcaatcatatttgtgtggtggcgaggagagcactttagcaacgggttttctgcagccctttggcgttttaatatgcaaatacttgggcgtcggtattctcttatttttctcaattgacgtgttttttctttgcagtgccatgtctgtacacaatctgataccgtcacgttatgtcaaacttatggctgatttgatttgtgcgattgtcacgtttttgttttgattatttaatgccatgaaagacaacttaaagtcacggtagaaagtttggtctataaataatttgaattttatattaaagaaaatatatagacctttaaactcaaaggcatcaagtagtaattatttgtctgcatattccggatcgctatcactagtaaggctctgattaatgcttatgttattgagaaatctgtcgtcagccgattccgagtcccctgttactgagcttgataaggacggtgatgtcctaccagaattttgacctgaactaagtgctgaaggctctgcgtaattttctccagcatcaaaatcctctttattattgccgacccaacatttttcgcactgatctccgtcgtccgattcactcatgtcttcctcttcgaaatcaccataagaggattcagatttaaggagcgtgtccccaggtggcaaacttacactaccttgatgttcatctgatcgacatgcctgcgcttcccatttagaaatgcactcttagtttctttatgtttgtacttaccgtatccagatttcgacttctacacacgatttgagcgtcatgcagctccttcatcaaggcatttctttccaatgagtgatactcgcgttgaagatgacactcggattgcagctctcggttttgtttgcgtaaggaaaacatttcgctcaaaatttgatgctgcttctcaactatagtagtcaccaactgctcaaggttctcaattgtaacttcgtattcgcgtaatttctttttaaggagccagttctctacacggcagtcggatagacttgaggccgacaatctaatctcagcagcattatgccccaatgattctttattcaccctaagagaagtccagtggtaacaaaagataagataattaaattatcacttactcgttgaaagcgctcatgtcgtcacttgcaggcaaaggaaacgctactaggtctctggtggcaatgtccccgagatcatggtattggcaaatacaggacattattcgataaatttgaaagtattctaaagcattaattgcaccagacttttaatacaaagctaactaatttctcgagtagagcgtaaaaatgggttagttctaatattacaaaacgctgtgtttctctgtaaatcaactttgcgacaataataaccgattgtcctcctgttttaaatgttgatactcctctcaaagctgacttaaactgcccgaacagatatgggtgtcagggcatttcactttacagactgcacccatctaccgctcgctgcgtcccctcagccagtggacactttacgacttgacattttcacactttgttggcaacgttttggaagcttcctacactttcctccctgtggggcacagcaactgacttttgggtcgtccttgttacagcgtcaaagccagcgtcgatgcaagctccatgaatccgcttgggatccgagaagtgcaagtgtgtggcttcagctgaataggaactgtataggtatgagacactccttttttgtgtgcgtcggtggattgaagtgcaaaattggtttaagtgtttgctaaattggcagcaaaatggctttttcaatttatcctcaacgtttgtgtgcatactcggaaaaggcaaacgctgtacaaaaagttaagcaagataaactaagcattttttaccacatttttttggcaactggttttatatagctatgttgttgatatttctccgtttgttaacttttgcagtgctttgcgaagtcaccaaaacgcacccataagtgaactctcatccggatacgagcacgcattactcgcctaggtcatttcacactcttactattgacgctaaacgttttcaaataactgtattttttgtgcacacatatcttaaagtagagataatcatggcttgcaccgaagccactattgcaaagcacatatacgattgctcgtattttactacaattaaagtcgtatcgtaatcgtgatacctcaacaatgccaaattact

SEQ ID NO: 24872 - DNA, 777 bp, DROSOPHILA
atgtcctgtatttgccaataccatgatctcggggacattgccaccagagacctagtagcgtttcctttgcctgcaagtgacgacatgagcgctttcaacgaggtgaataaagaatcattggggcataatgctgctgagattagattgtcggcctcaagtctatccgactgccgtgtagagaactggctccttaaaaagaaattacgcgaatacgaagttacaattgagaaccttgagcagttggtgactactatagttgagaagcagcatcaaattttgagcgaaatgttttccttacgcaaacaaaaccgagagctgcaatccgagtgtcatcttcaacgcgagtatcactcattggaaagaaatgccttgatgaaggagctgcatgacgctcaaatcgtgtgtagaagtcgaaatctggatacggcatgtcgatcagatgaacatcaaggtagtgtaagtttgccacctggggacacgctccttaaatctgaatcctcttatggtgatttcgaagaggaagacatgagtgaatcggacgacggagatcagtgcgaaaaatgttgggtcggcaataataaagaggattttgatgctggagaaaattacgcagagccttcagcacttagttcaggtcaaaattctggtaggacatcaccgtccttatcaagctcagtaacaggggactcggaatcggctgacgacagatttctcaataacataagcattaatcagagccttactagtgatagcgatccggaatatgcagacaaataa

SEQ ID NO: 24873 - protein, 258 aa, DROSOPHILA
MSCICQYHDLGDIATRDLVAFPLPASDDMSAFNEVNKESLGHNAAEIRLSASSLSDCRVENWLLKKKLREYEVTIENLEQLVTTIVEKQHQILSEMFSLRKQNRELQSECHLQREYHSLERNALMKELHDAQIVCRSRNLDTACRSDEHQGSVSLPPGDTLLKSESSYGDFEEEDMSESDDGDQCEKCWVGNNKEDFDAGENYAEPSALSSGQNSGRTSPSLSSSVTGDSESADDRFLNNISINQSLTSDSDPEYADK

SEQ ID NO: 24874 - DNA, 3369 bp, DROSOPHILA
agctcactccaatccgatccgttcctctccgttttccaggcctgggtggtggagcgcatggggcgctttcacaggattttggaccccggactcaacatactagtcccggtggcggacaaaatcaaatacgtccagagcctgaaggaaattgccatagatgtgcccaaacagagcgctattacctccgacaacgtgaccctgagcatcgacggcgtgctctacttgcgcatcattgatccgtacaaaggtaggtctccacaatccataagcagcggcacgtcaccacatctgttatatcaccgttaagcctcgtacggcgtggaggatccggagttcgccataacacaactggcccagacgacgatgagatcggagctgggcaagatgtccatggacaaggtcttccgcgaaagggagtccctcaacgtcagcatcgtcgactcgatcaacaaggccagcgaggcgtggggcatcgcctgtctgcgatacgagatccgtgatattcgagtaggtcacatccttcagttgactctcaagtagcgagattaatggatcgtgtcccttttcagctgcccaccagggttcacgaggcgatgcagatgcaagtggaggccgagcggcgaaagcgagccgctattctcgaatcggagggtgttcgcgaggccgaaatcaacatagccgagggcaagcggaagtctaggattctagcctccggtaagcggcagtgttccttacagaatgtacccagtagttacattcatggttccttcttccacagaggcggagcggcaggagcacatcaataaggccagcggagaggcggctgccattatagccgtggcggatgccagagcccgcagtctactggccatagcgaaatccttatcccacctggtaagtatttcgccgggggactccaccaactctcgatttcggttaggtagaatgctaggcatttaatttcaaaaacactttggcatcacactacgaacaaatattggaattcggagatgtttcaatcagagtatcagcaacgattgcttccgggcgtcgccgtcggcaaaaaggaggacatcgatctgcgctgcattcccacacgagctggtaaccactggaaccggaactttgtcaatgctccgggagactccaatgtgtacgagagctctgtgtactcatgcctcttgcgcaacgagttcctggacgagaacatcacttccttggagaactgcgagcagaccgcacaggtccatgcccagactgatgattttagggatcggcataaccgtatctttggttttgccagcggttcttcgtcgccagtacgcacaccattcgccaacatcagcgagagcagccagcggctgctcagcatcttcaagagacccatgcgccgactgccacgtcgcccgtacaagatactcgatgcgccggagctgcaagacgacttctacctgaaccttattgactggtcgtcgaaaaacaccctggccgttggtctcgggtgctcggtttatctctggagtgccgtcagtggtcaggtgacgcgactatgcgacttcaacaatgaggataacctgattacagcagttagctggcacggtgaaggccggcaggtggccattggcacccagtccgggtacgtgaccatttgggatgccgagaaccaaaagcagataaaccgactggaagagcactcggcgcgtgtaacggcgctagcttggtgcggcaaccgattggccagtggctcccgcgaccgctcaattttgcagcgggatatccgcaatccgccgacgcacataacccgctgcttgcgcggacacaagctagaggtgtgtggcctacagtggtcgcccagcaatcgatacttggccagcggtggcagcgacaaccgcctgttggtttggaccgacgattggccggagcccatttacgccttcgacgagcacaaggcggtggtcaaggcgctgggctggtcgccacataagtccggtcttctggccagtggcggtgggtccgccgatcgctgcttgcgcttttggaacgtcctcaccgggaagctggtgaagtgcatcaacaccggcgcccagatcagcaacctggcctgggccagggattcccgagagctggttaccacccacggacacgcgcagccacaggtcattgcctggcgctatccctcgctgaagcagatggccaggctgtccgggcacacacagcgggtactccacctgtcagtgagtccggataacgagtccatagtgactggcggcgcagatgagacgcttcgcttctggaccgtttttaccaaacagaaaatatccaaagagccaaactccgtgctccgtttgtttaaaggcataagatgaggacaaaattgcgacgtattctttgtgctacgataaattatatttgttaccatctaaagtcttatatggtttcttaatttaagatcgtggttttcgtcttatgcatttcaggatggacagaatgctgcttcgctcacgctggccgagcagtacattggagccttcaagaagctggccaagacgaataacaccatgatcttgccctcgaatcccggggatgttaatggcttcgtggcccaggccctggcggtgtacaaccacgtttccaactctaaccaggccaccaagtcatcggaaaacgtgaagggtgtgggcgcctgcctgaacgcaaagagtgttgagtacaaggagttgcaggaggataaaagcagtgtgaaaatgaatattgaataggaatgaataaacggttgttgctattacatttgccccactcatagttgttattatcaaggcgaggatattaaatttttggttcaacaaataaacgcctatttatttacttcggaaggtacttcaacagtcgaacctcgtgcgacagccacaatgcgaaactcagcagaataagcgagcccgactggtgggccgttgccagaggcacgggcacgtagttaagcaaggtggttacgccaagcgtggcctgcgtccaggccatagccaccacggcgttgatggcccagttggcgcgcttgggcaactgcatccttctggtgaccagccacagagcggtggtcagcgttactgtgctaataccaaggatgcggtgattgaactgcaccgtcgtcggattctcggtgatgttcttctgtatgggcgcaaacgtccacatgtcatcgggaatccacttgtcgcccatcttcgggaacgagttgtacacgagtccggcgtctagtccggctacaaaggctccagaaatggcagtcagcaggaccattgccttcgtcaaatgcgtcagccccttgatattaaatgctttcttggcttggatcacgaatgtgttcgtggg

SEQ ID NO: 24875 - DNA, 1369 bp, DROSOPHILA
gaattcggagatgtttcaatcagagtatcagcaacgattgcttccgggcgtcgccgtcggcaaaaaggaggacatcgatctgcgctgcattcccacacgagctggtaaccactggaaccggaactttgtcaatgctccgggagactccaatgtgtacgagagctctgtgtactcatgcctcttgcgcaacgagttcctggacgagaacatcacttccttggagaactgcgagcagaccgcacaggtccatgcccagactgatgattttagggatcggcataaccgtatctttggttttgccagcggttcttcgtcgccagtacgcacaccattcgccaacatcagcgagagcagccagcggctgctcagcatcttcaagagacccatgcgccgactgccacgtcgcccgtacaagatactcgatgcgccggagctgcaagacgacttctacctgaaccttattgactggtcgtcgaaaaacaccctggccgttggtctcgggtgctcggtttatctctggagtgccgtcagtggtcaggtgacgcgactatgcgacttcaacaatgaggataacctgattacagcagttagctggcacggtgaaggccggcaggtggccattggcacccagtccgggtacgtgaccatttgggatgccgagaaccaaaagcagataaaccgactggaagagcactcggcgcgtgtaacggcgctagcttggtgcggcaaccgattggccagtggctcccgcgaccgctcaattttgcagcgggatatccgcaatccgccgacgcacataacccgctgcttgcgcggacacaagctagaggtgtgtggcctacagtggtcgcccagcaatcgatacttggccagcggtggcagcgacaaccgcctgttggtttggaccgacgattggccggagcccatttacgccttcgacgagcacaaggcggtggtcaaggcgctgggctggtcgccacataagtccggtcttctggccagtggcggtgggtccgccgatcgctgcttgcgcttttggaacgtcctcaccgggaagctggtgaagtgcatcaacaccggcgcccagatcagcaacctggcctgggccagggattcccgagagctggttaccacccacggacacgcgcagccacaggtcattgcctggcgctatccctcgctgaagcagatggccaggctgtccgggcacacacagcgggtactccacctgtcagtgagtccggataacgagtccatagtgactggcggcgcagatgagacgcttcgcttctggaccgtttttaccaaacagaaaatatccaaagagccaaactccgtgctccgtttgtttaaaggcataagatgagga

SEQ ID NO: 24876 - protein, 451 aa, DROSOPHILA
MFQSEYQQRLLPGVAVGKKEDIDLRCIPTRAGNHWNRNFVNAPGDSNVYESSVYSCLLRNEFLDENITSLENCEQTAQVHAQTDDFRDRHNRIFGFASGSSSPVRTPFANISESSQRLLSIFKRPMRRLPRRPYKILDAPELQDDFYLNLIDWSSKNTLAVGLGCSVYLWSAVSGQVTRLCDFNNEDNLITAVSWHGEGRQVAIGTQSGYVTIWDAENQKQINRLEEHSARVTALAWCGNRLASGSRDRSILQRDIRNPPTHITRCLRGHKLEVCGLQWSPSNRYLASGGSDNRLLVWTDDWPEPIYAFDEHKAVVKALGWSPHKSGLLASGGGSADRCLRFWNVLTGKLVKCINTGAQISNLAWARDSRELVTTHGHAQPQVIAWRYPSLKQMARLSGHTQRVLHLSVSPDNESIVTGGADETLRFWTVFTKQKISKEPNSVLRLFKGIR

SEQ ID NO: 24877 - DNA, 2964 bp, DROSOPHILA
tcggcatcagatcaggttacctgatctccaaaatttgtccaatgccaatgactacttcactcatgaggcggggaaaagcgtaagaaaaacagacaatgccagccaattatctgcgataacacaaatatttctgtaacaaccagttcttgggctgagttttcagtttcagtttcgatttcgtcagttggccagaaattagcacgtaacttcggctttaagcccaccccacaaaataagaaaaaaaaaacgaaaaaaaaaactaaaacccattggcactaagtcataaaaataacaatgaacaagacacaagacacggcccaaaaaatgtacaacaatttttattatatctttacttgtttttggcttttgttttgtggctgtcatgctcattgagcacgctttttgcttttgctggcattctgccctggtagccgggcttcactgtgctgattgtgcgtgcccctacttacctaacgatttgttgacattaggtcttaaaatttattagttcttattgtcaatggcagctggtatatgtaggttttatgtacttcgatttttgggcggcaagctctgggcgtggccaatggggattttggttgcccaattcccccctccgctcgatcacaaatcgaatcgtatcgtttgaatgtcgtaacaattcgacaagcctcaattaaaagtgttcaccccatttgaaattatttacataccagccattaacgaaaaaccgatttgttttcccagtttccaaattaatttatatttcttaaatattaaagccaaaatgtttgaaatattaacgagtcaccgcagcatcagtccaataataatttattcatcaccttgctcgtccaaggtcgaatgtgttggtggtccagaaagttggaaaaggtgaaaagttcttttgggaaaagtggatgggcaactactgctgactcagctgattggctaggaattcccgagcccgaatatctctacaatctggtcgatattaggtctacttttcaccagagacggccatggcagtgaggaagtagaagcccgaccaacttaagtagttcaccggttcaccgctgccttcgcttatctgttcctcaaagaatttggcaccaaatttggccataaaggccaagatggccatgccgcccaggttccagctgctctcattgatcgccagatatgccagcgaggtgatgttacccaaaatcgttagagtcttcagcgtgtcaagggggcctccttcgctctcatcaccgctttcgcctttgaaaaatgttagaatcacgctaacggccagcggtacaatgaagagtccatggcccagggcaatattgttgctctcggcggctaaatacaattccacattgaccagcggcagcggtatgatctccataatcgatgttgtcgtttcggcgattttcttggcattatcatcgccggtcaaaccgctggccaaaccgaagagtccatgacagaaaccgaaaacacaggctgtaaaggcgtaaggatgttcactgggtccaatcttgtagaagccaaagccagcggctccgcagagaacaacattgagcacacagctcacggccgagttgtcagacatcctgataatatgtgttatatattatattctcccgaaaatcgtactaacaaatgggtcttgcttcgatgctagaatatgctaaacggtatcgtaattcgtaattaatctatttcatttatatgagcactaattgttgctactaacttacatttagcaatctagcttgatacgcgaaacaacgctttcttgctttgtgcgtattgctggttcggtttgaatatacttttcaacgcaattttatcgaaatgtaacttaaaaaaaagaaaaaacttgtaaagtgacagagaaaaatttacaatttgaatttgttctggttttacgaatagagtgagtgcttcagtttgactcgagagaatgtgtcgaccgaaacgttgaacgagctgtgtgataatgctctacacggagctctgacaaatctggagagcgcaaagtaaaaggcaatgcctgctgccagtttaaaaacaaatcgtcattatattttatttaaaggaaattactcaaatttaaacaatacattgataatggattgtgccgttatgtgcgagaatatctttgtgtaaaatggttagaatgcaaagcaatagaatttcgcatatgtgcaacttaaggataatcaacgaaaaatgttttgtttcaaagttggccttgaaaaacctctttgttgttgcaaattacaaaaaaaaatatatatatatttttttttttagtgcatatatttcatattattacatatttaatatacacatttaataatgtttttggatcagtcaaagaaaaaccagtggaataacatactgcaagagtatgaaagacaagtggaggagcagaagcaggaaatctcgccggcagaggttaaaaataaattactgacccccaattggtattggtatcgttatatagacgaacagatcgttccgctaccgttgagccgtagtttggtacaggtcgccgaacccgagttatcatcgcccatctccaatacgtcaaaactttgtatttcggaaagcagtggtcttattgtcgccagtacgtcgagcagcgagagaatcacatgtcctccgccaccgttaatgttacccaagacagttgatgccgatttcgcagacattttggacatttcacgacaaagacgccatcgaaggatatgcacgtcctttagcatcaatgatattccacttcaaattgattgccctaaggtggatcccatcttacgagccggcggcacttttcgtgactatgagattatctggaaaccgatgagttccaagttggacgaatcgtgtgccgagaacattttaagcagatgcacaagacggatgagtaagttccgcaacaacctcagctacaattaatcgattaat

SEQ ID NO: 24878 - DNA, 894 bp, DROSOPHILA
gacacattctctcgagtcaaactgaagcactcactctattcgtaaaaccagaacaaattcaaattgtaaatttttctctgtcactttacaagttttttcttttttttaagttacatttcgataaaattgcgttgaaaagtatattcaaaccgaaccagcaatacgcacaaagcaagaaagcgttgtttcgcgtatcaagctagattgctaaatcatattctagcatcgaagcaagacccatttgttagtacgattttcgggagaatataatatataacacatattatcaggatgtctgacaactcggccgtgagctgtgtgctcaatgttgttctctgcggagccgctggctttggcttctacaagattggacccagtgaacatccttacgcctttacagcctgtgttttcggtttctgtcatggactcttcggtttggccagcggtttgaccggcgatgataatgccaagaaaatcgccgaaacgacaacatcgattatggagatcataccgctgccgctggtcaatgtggaattgtatttagccgccgagagcaacaatattgccctgggccatggactcttcattgtaccgctggccgttagcgtgattctaacatttttcaaaggcgaaagcggtgatgagagcgaaggaggcccccttgacacgctgaagactctaacgattttgggtaacatcacctcgctggcatatctggcgatcaatgagagcagctggaacctgggcggcatggccatcttggcctttatggccaaatttggtgccaaattctttgaggaacagataagcgaaggcagcggtgaaccggtgaactacttaagttggtcgggcttctacttcctcactgccatggccgtctctggtgaaaagtag

SEQ ID NO: 24879 - protein, 200 aa, DROSOPHILA
MSDNSAVSCVLNVVLCGAAGFGFYKIGPSEHPYAFTACVFGFCHGLFGLASGLTGDDNAKKIAETTTSIMEIIPLPLVNVELYLAAESNNIALGHGLFIVPLAVSVILTFFKGESGDESEGGPLDTLKTLTILGNITSLAYLAINESSWNLGGMAILAFMAKFGAKFFEEQISEGSGEPVNYLSWSGFYFLTAMAVSGEK

SEQ ID NO: 24880 - DNA, 3110 bp, DROSOPHILA
cgatgtgaatgaagtgaccactttgctggaacaagacatgctgtgtgttaatagtgaggatgagattttcttcgccgtctttcactggttgaattactcctggacggaacgcaagaagcacgcggtcaaggtgatgcaaaaagtacgttttggactcctgtcaccctggttgcgtcgatccatttgtaatatgcccgaaaacgatcgcatcggcgaaattggccaattaccggaggtaatgagcggttgattggttttgggaagacgaaacaattcgattgatatttgaaagttgcattttcttctataaatctggattattaattgtcttacagatttgctccttgatttgggagggtacacttttgtgtcaggcgatcattgccattggacagccggaatatcgaaggtcgagactggttcgtcgcatgttaagggacttcgagcacaaaaggatcacggaacggtcttgggtgttctgcgagggagttccgcatcatcatgataagaaatgtgcacgatatcgagagttgacatttgaaagctttaagagattcctccaccgtctgcacaccaattcggatatctttatggagagcctgaaggctgtgcccaataagatcactaacacttaccgctgctgcatagacgccaacttttgtccatcatacaaacgaacctgtcccatggcgccattctataggacgcatttggatcttgacaattggaaatatcgcaattaaataataaaattcaattttatagtgcttacagtttgcaaaaatttgaattcaatgtatttaaattaaaagatataacaatatactgtttaatagatgatgcgtcatctatgtattgtatatctccaagttgcagttttctaaaagttttaaatgtatacactattttattgccaaaaaaagtgattagccatgctcgttgccaaagtcgttaaaacttatggatctaacttcctggccaaaaggtttatcataatagctcattggactacgatctgaatgctggacgcgtcaccaaccgcagagtccgtggtgtgcacgctaaagctatcatctatgctctcattaaatccggcaaactggcgatcatcgtcattcgatccttgattcggattgtaattgctattgtcctgggtatgctgatcaatcatccgtacgttttcatcggtgtagttcaaaatgcaacgacctaagcgacggagatataacttctggtcgagatacattttcagcaatcccttaattccgatataggcaataccaccgagtatggtgcgctgcagtgcatcgtccagcctaccgaagaacacatttcccaccgttgtggcaaaagttggtagaaaaaatgctccgcaaatgagacgagagatgtagaagggttcggtgatggacggattatgttggattggtggcaaactgatcgaactgctcgaactgacgctcaagtcatccaagtcacccaagtcacccaagtccctcgatgcaccttccgactgattggtcctgtggaaaaagggcaatttgcgcggaatgtatatatatatgctgcgcatggccttcaagacggcatctttccatcgcaccagccggaataggatcaatcccaccggtatgaagggtaaacccactagcaggatgactttattctccatcaactgcattgcgcgatcttgacccaccacctggatgatagtgaatgctccgtatgtaagggcaatccagtatatacagcataagaacattccgagcaccaaaaatgggcaaattcgcctaactgcataatccagcttctctagcaccctggcaatgggattcatttggggaaagaccattatatactcagtttggcattgttggcaaatcaccgtttgccggcgatcacccagctgcttctcgtcgatccagcgatatagacaactctggtggacccatttagtgtcaccgcggcactggcacggctgcacccaatgggcatgtggattatcttcgctagttgcgaagcatatccaacagatgcgctctccatcagcattcgacagctcggagtgttgcgataagggattcgatccgccgctgccacgcatctccatatgatctaaattatgaatatcaaagacaagaatttttctactactgatctatttgtacctgacatacaacgcggctgaaagtatatctcctgatttgaatccattgaagctaaaaacaataccaccgaaacggaattgaaagatagtccaaagaatgcagttaacgagcaaggacaacgaattttggagcaacaataaaagctgtacacaagctgagttgactgtgacgaatgagtgtgtgaattaagtggcaaaggcaattcgattgggatgaaaaatgtttcgaaatatatacgaaaatttgacaaaaataaatatatatattctctgatagtaaagtgtccaaagattgcaaattttactttttggtaccatttctggtactttttggctcatttctacgcatacagtgacagcacacgtattgttcatgcattgccactatggggcatttggcctgttttttttttacaataatgtgtttttcacaagtatgcaaatttgaagtattttagtattaatacattggaaatacgttaaactgtgttatgatatagcccgcataagttaatttaacaatgctctgttataataacagctgttaaagtcggctgttgcgagcaaaatttagcttaactttcaaagtgttaaaatttaaaaagaagaagaaggagagtataatttgaaatggataatcaatctttaggttcttattatgtgttgttattaatatattgtttattgtgtgcgcctatttctaacaatttgtacatttagcaagtggtgtcaacatgcagttgtttgaaaaaattttcaaatttgaatagagctacaacaattttttcagtaagtgtttatatccatgttgtagtgtgttcaattcctaactcatatcaggtagtctctatgtgcgttttttgcggttttttgagaaatttcattttttagggagcaatatctcgatttccaatgctgccctgctggaagtggaaggaaaatt

SEQ ID NO: 24881 - DNA, 1110 bp, DROSOPHILA
atggagatgcgtggcagcggcggatcgaatcccttatcgcaacactccgagctgtcgaatgctgatggagagcgcatctgttggatatgcttcgcaactagcgaagataatccacatgcccattgggtgcagccgtgccagtgccgcggtgacactaaatgggtccaccagagttgtctatatcgctggatcgacgagaagcagctgggtgatcgccggcaaacggtgatttgccaacaatgccaaactgagtatataatggtctttccccaaatgaatcccattgccagggtgctagagaagctggattatgcagttaggcgaatttgcccatttttggtgctcggaatgttcttatgctgtatatactggattgcccttacatacggagcattcactatcatccaggtggtgggtcaagatcgcgcaatgcagttgatggagaataaagtcatcctgctagtgggtttacccttcataccggtgggattgatcctattccggctggtgcgatggaaagatgccgtcttgaaggccatgcgcagcatatatatatacattccgcgcaaattgccctttttccacaggaccaatcagtcggaaggtgcatcgagggacttgggtgacttgggtgacttggatgacttgagcgtcagttcgagcagttcgatcagtttgccaccaatccaacataatccgtccatcaccgaacccttctacatctctcgtctcatttgcggagcattttttctaccaacttttgccacaacggtgggaaatgtgttcttcggtaggctggacgatgcactgcagcgcaccatactcggtggtattgcctatatcggaattaagggattgctgaaaatgtatctcgaccagaagttatatctccgtcgcttaggtcgttgcattttgaactacaccgatgaaaacgtacggatgattgatcagcatacccaggacaatagcaattacaatccgaatcaaggatcgaatgacgatgatcgccagtttgccggatttaatgagagcatagatgatagctttagcgtgcacaccacggactctgcggttggtgacgcgtccagcattcagatcgtagtccaatga

SEQ ID NO: 24882 - protein, 369 aa, DROSOPHILA
MEMRGSGGSNPLSQHSELSNADGERICWICFATSEDNPHAHWVQPCQCRGDTKWVHQSCLYRWIDEKQLGDRRQTVICQQCQTEYIMVFPQMNPIARVLEKLDYAVRRICPFLVLGMFLCCIYWIALTYGAFTIIQVVGQDRAMQLMENKVILLVGLPFIPVGLILFRLVRWKDAVLKAMRSIYIYIPRKLPFFHRTNQSEGASRDLGDLGDLDDLSVSSSSSISLPPIQHNPSITEPFYISRLICGAFFLPTFATTVGNVFFGRLDDALQRTILGGIAYIGIKGLLKMYLDQKLYLRRLGRCILNYTDENVRMIDQHTQDNSNYNPNQGSNDDDRQFAGFNESIDDSFSVHTTDSAVGDASSIQIVVQ

SEQ ID NO: 24883 - DNA, 4757 bp, DROSOPHILA
gcaaggcggagcactcggcccagctgcagagaatcaaaaaactaattgccgacgaacgggtttccatcgatgatgctcttaagttggtggcactttatgcattgcgatacgagcgacacgccaactgcgacacatctggactgctgcaaataatcaaaacgcgcggtggacgagcggctatagtgccatcgttgattgagtatgctggaacccatgtacgacaaggagatctcttcaatatggtgcggataacggacgccgtaaagctgacacggaatttgattaagggccttaagggtgtggaaaatgtcttcacacagcacactcctctcctgaaggaaactttggaggacgtgtttaagggccgcgagctggatcccctcttcccggccatcaattcagagcttgtgccatttcgacgaccaccgcaggaggttgtcgtgttcattattggcggtgccacgtacgaggaagccttagcggtgcaccagttaaacaacgccggctataaagtcattcttggcggcaccaccatccataactcgcagagttttatccaagaggtcgtggccgccactagtggcattcagtttaagcacaccaaatccatgatcaagtactgttccacggataacatttaaagtctattttgactagatagccccaattatattgttaactatttattaactaaatatgaatgtgcattatgtattaaggtattccatgcattgtaccaattcaaatccattggactatttaaccttttaagcgtaaccatgtaaacatatttattgttattctcgagggtaacaccaggcaacgccttggacaaaatgtattatatacaactatgtgtgtacaaaattactaaactctcgttgtccttgcaataattccaccccgtttcggcaaaaagttccttggcaactcccaggcaacgtttcgtttggctcaaacaagaatctgatttttcattggaggagtatcattgaccatcatgtccagcacatatttcaatgatatctggcaccaatcccagcatgaatgcgagcttctatccacgattgactatgagaggcagcaccaggatgtggagacgacggtggccaccatgaatgcagcggtcggatccgtcgccgccgatgcggatgccaaggccttgctgcagtccagtctgtacgagttctatctgcgctacatatgtctgagcaatcgtttggaggatgtctatgataatgtgggtatacgactttcttaaacaaaagtgggatatatataaggagatgatatatcctttgactctggtttacttctcatctttcatcatagatgattcagcctcagaagcgccagttggtgcgtaaattactagacgcctgtctgggtcgagtggtggagctgaagcacgatctcgtaaatatcgacttgatggaatttagctacaacgacgaggtggtggaacgcctgcgcctgacgcccatggaaacggagctgaggataccacgctactttctgcgcgagcgtcagcaggagctagagtttcgaaagaagaccatgcatgagatcctaacgaagctgggttggcttgaggagcacgagctggaggagacggttaccaccgagatcgaagccattaggatgcttcaaatgcacgagcgagcgcgacaaggacgcttgcgtgcccacttcatgaaggagattcgcatcctaaaggagaagggcaagtcggaggagcgcaccgaaaaggagcgcagtgactctggtcttttggctgccatgaagattcagaagatgtggcgtggccacacagcccgacggataacgcggcgccgcaaaatggaggagatgatcctaatcggaatgctgccaccaccgccggctgtggttaaggaacgagccgagaagctggagaagctgcaacacaacgagaagcgctaccaggcgcaagcgttttacggcaaagagtttgaggagcgacagaacgcactaaaggaggagattcgggccaagcacggagccagcatgaaggaggacattgccgatgagattcgggcttgggtaaaggactgctacgacaagactggcaagctgccggactttccatccgaggatcagggcggctcattgcatattttcagcagacctggaactgagagcgagcacagccgttcgtcggcccgctcctccaaggagtcgcgaaagaccaaggataagtccaagtcacccgctcgcagtggtgacctcaacgtcaacgaaaaccaagacgaggaagttagcttccagccggcaccgtccgtttgcctgccagacatccgtgcggagatcgatctgtgagtaaagatatataataaattgatccaaatttaatctttttacaacttcaggtttaacgatacctggcgtgataaggatgaaaccggtgtgctgagccaagcggcctatgaggacatgatctacagcgacaagtaccaggaggtggagctagaatttcggcgcgccgtcgacgatgtgatgcgccaggagatcgagctgctccaaacggccgtcggcaagaaggtgaagaagagcagcaaaaaaactcggcgatccggcaagaagagcaaaaagaagaaggagaaggatctaacgccggatcgcactacggagtcgctgtacgaggagctggtcacgaatggcataatccggaaatacccggagctaaggctaaagcaattcctgggcgataaggcgttgactgccaggattggcactaatccctcaccgggcgacattcgccagattctcacggagtactgcatccttccactgggatctgatgccatacataactgtactccactgatacgttccatcctgttagctggccccaaaggatctgggaagaaggcactgctccacgccatttgcacggaggtgggtgccgtgctctttgatctgactcctgccaatattgttggcaagtatcctggcaaatcgggactgataatgctaatccatctggtactgaaagtgtcgcgactgctccagcctgcggtgatattcatgggcgatgcggagcggcccttcatgaagaaaattccaaagacggatcgcacagatcccaagcgactgaagaaggatctgcccaagttgataaagaacattgcgcccgaggatcgcgtcgttttcattggcacttccaatctgccctgggaggcggatcaaaagctattgcaatccgtctacaatcggttcatctatattccacgaccggattacggcgccatgtcacatgcctggaaaacattgttacagtgcgtaaatgtgggggattcatttgcaaaataatctactgatttggtttgcaccccgacagcgattactctggtggcatttccaatctggacaccagcgccatggccaaaatatcagatggctataccattgggtccatcgatgcgtgcctcaaggaggtgatgacctgcaagcggaaactccagctgcgcacccaaccattgaccaatgccgaactgatcaatgttctgtggtaagtagatttggctatgaaattagttagttgttagtttccatgcctttcagctcacgagatcccgtctaccgcgaagaggaggaagctttcgagtcctggtggtcgaagaccccgctcggccgccgtcgtcagcggtttttggagctggaggaggagcgattactggaggagcaggcgcaggcggccaagcagggaaatggtaacaagaaaaagggtcttaattaaaaggtaatcactggacttcttatatttaagcctaatttgtaaggaaacatctttggattgctaatggtaaccattcattcaacgctatggcttgctttacaatcttgcttttattagcaaactacaatttatatgttcatatatatgagctaatatggaacagattacatttttgatacctaataaagtcaatatatattttccactacattccaattgaaagatcagcatgcataaatatttatgattcagttaaagactggcaatatcctatttcaacgagtaggtaaaatccttgttgccgcactttaggtgcacctcattgaccgccaggcagagtttgtcctgatcatcaaggagctcttttaactccgtgagcttttcgttaagcagtgtctcctggtcgccaacgcaccaaagaaggctgacgtggaacgaggccggatcatagaactgttgcagccggtagtcgagcatcacttggtcgatgggctgcagaatggcagtcatcttctccacaaatgcagcgtccaggggcgcagcaatgaaggtcctggttcgctcctcattcgtgtagatccgcagcccctgcaaagtggcggcgaatctaaaagaggattggtcatcaggatgggagatactagatttaacttggttaaacatctcaccccgcagagctgttgagggcgctttgcaaggatcgggagaattcatcgatctgatggtactgcagcaccactgttcgactcaggctcagatggagcgactcgttcggctgcagttccaagtgtggctccagacgagcaatggcctccgtttggaactcctccagctggtcaacacatgctgttgccggcacatagacgtaagtggcccagtttccccgttcatgcttgaaactacgcatgcggccgccatgttccgcgggatcatccaccacatcctcgacgaactcctcgggcttgggcttcttggggcccagcagggtggctgctttggg

SEQ ID NO: 24884 - DNA, 2454 bp, DROSOPHILA
atgtccagcacatatttcaatgatatctggcaccaatcccagcatgaatgcgagcttctatccacgattgactatgagaggcagcaccaggatgtggagacgacggtggccaccatgaatgcagcggtcggatccgtcgccgccgatgcggatgccaaggccttgctgcagtccagtctgtacgagttctatctgcgctacatatgtctgagcaatcgtttggaggatgtctatgataatatgattcagcctcagaagcgccagttggtgcgtaaattactagacgcctgtctgggtcgagtggtggagctgaagcacgatctcgtaaatatcgacttgatggaatttagctacaacgacgaggtggtggaacgcctgcgcctgacgcccatggaaacggagctgaggataccacgctactttctgcgcgagcgtcagcaggagctagagtttcgaaagaagaccatgcatgagatcctaacgaagctgggttggcttgaggagcacgagctggaggagacggttaccaccgagatcgaagccattaggatgcttcaaatgcacgagcgagcgcgacaaggacgcttgcgtgcccacttcatgaaggagattcgcatcctaaaggagaagggcaagtcggaggagcgcaccgaaaaggagcgcagtgactctggtcttttggctgccatgaagattcagaagatgtggcgtggccacacagcccgacggataacgcggcgccgcaaaatggaggagatgatcctaatcggaatgctgccaccaccgccggctgtggttaaggaacgagccgagaagctggagaagctgcaacacaacgagaagcgctaccaggcgcaagcgttttacggcaaagagtttgaggagcgacagaacgcactaaaggaggagattcgggccaagcacggagccagcatgaaggaggacattgccgatgagattcgggcttgggtaaaggactgctacgacaagactggcaagctgccggactttccatccgaggatcagggcggctcattgcatattttcagcagacctggaactgagagcgagcacagccgttcgtcggcccgctcctccaaggagtcgcgaaagaccaaggataagtccaagtcacccgctcgcagtggtgacctcaacgtcaacgaaaaccaagacgaggaagttagcttccagccggcaccgtccgtttgcctgccagacatccgtgcggagatcgatctgtttaacgatacctggcgtgataaggatgaaaccggtgtgctgagccaagcggcctatgaggacatgatctacagcgacaagtaccaggaggtggagctagaatttcggcgcgccgtcgacgatgtgatgcgccaggagatcgagctgctccaaacggccgtcggcaagaagagcaaaaagaagaaggagaaggatctaacgccggatcgcactacggagtcgctgtacgaggagctggtcacgaatggcataatccggaaatacccggagctaaggctaaagcaattcctgggcgataaggcgttgactgccaggattggcactaatccctcaccgggcgacattcgccagattctcacggagtactgcatccttccactgggatctgatgccatacataactgtactccactgatacgttccatcctgttagctggccccaaaggatctgggaagaaggcactgctccacgccatttgcacggaggtgggtgccgtgctctttgatctgactcctgccaatattgttggcaagtatcctggcaaatcgggactgataatgctaatccatctggtactgaaagtgtcgcgactgctccagcctgcggtgatattcatgggcgatgcggagcggcccttcatgaagaaaattccaaagacggatcgcacagatcccaagcgactgaagaaggatctgcccaagttgataaagaacattgcgcccgaggatcgcgtcgttttcattggcacttccaatctgccctgggaggcggatcaaaagctattgcaatccgtctacaatcggttcatctatattccacgaccggattacggcgccatgtcacatgcctggaaaacattgttacacgattactctggtggcatttccaatctggacaccagcgccatggccaaaatatcagatggctataccattgggtccatcgatgcgtgcctcaaggaggtgatgacctgcaagcggaaactccagctgcgcacccaaccattgaccaatgccgaactgatcaatgttctgtgctcacgagatcccgtctaccgcgaagaggaggaagctttcgagtcctggtggtcgaagaccccgctcggccgccgtcgtcagcggtttttggagctggaggaggagcgattactggaggagcaggcgcaggcggccaagcagggaaatggtaacaagaaaaagggtcttaattaa

SEQ ID NO: 24885 - protein, 817 aa, DROSOPHILA
MSSTYFNDIWHQSQHECELLSTIDYERQHQDVETTVATMNAAVGSVAADADAKALLQSSLYEFYLRYICLSNRLEDVYDNMIQPQKRQLVRKLLDACLGRVVELKHDLVNIDLMEFSYNDEVVERLRLTPMETELRIPRYFLRERQQELEFRKKTMHEILTKLGWLEEHELEETVTTEIEAIRMLQMHERARQGRLRAHFMKEIRILKEKGKSEERTEKERSDSGLLAAMKIQKMWRGHTARRITRRRKMEEMILIGMLPPPPAVVKERAEKLEKLQHNEKRYQAQAFYGKEFEERQNALKEEIRAKHGASMKEDIADEIRAWVKDCYDKTGKLPDFPSEDQGGSLHIFSRPGTESEHSRSSARSSKESRKTKDKSKSPARSGDLNVNENQDEEVSFQPAPSVCLPDIRAEIDLFNDTWRDKDETGVLSQAAYEDMIYSDKYQEVELEFRRAVDDVMRQEIELLQTAVGKKSKKKKEKDLTPDRTTESLYEELVTNGIIRKYPELRLKQFLGDKALTARIGTNPSPGDIRQILTEYCILPLGSDAIHNCTPLIRSILLAGPKGSGKKALLHAICTEVGAVLFDLTPANIVGKYPGKSGLIMLIHLVLKVSRLLQPAVIFMGDAERPFMKKIPKTDRTDPKRLKKDLPKLIKNIAPEDRVVFIGTSNLPWEADQKLLQSVYNRFIYIPRPDYGAMSHAWKTLLHDYSGGISNLDTSAMAKISDGYTIGSIDACLKEVMTCKRKLQLRTQPLTNAELINVLCSRDPVYREEEEAFESWWSKTPLGRRRQRFLELEEERLLEEQAQAAKQGNGNKKKGLN

SEQ ID NO: 24886 - DNA, 5592 bp, DROSOPHILA
ttacatgcctacgtatgtatgcttgccagtatatataactattacaatgaatcatacaatatatgcgtactttgcaaggtattaattatgtattatgaaaccaatgcgatcctatgcaaaacgttatccattatatatactcgtatgtatgtatgtatgcacgattttgcgtttttgtacataaaaatatattgtttatttatgccatatttatttatgctgagctgcacgcagcgtaataatcatggagtggccaaccatcggccatttgcttgtttgtacattttgaaagcatcgcgaaatcggactttctccgaatacatgtcacatttatattgtatagtttaaaatgttctggcttcgtcctgcatcatctcatatgtactttgttgtaggaaacattttggaaattatatataaaaaatacatgtcgtacaacacactacaagatgatttaaaaaaaaaacataacgaataagcttttagcttgtgttcgtatagttctgatgtcttttctctggttggttttatgttctaaatgcttaacgggtaagcgtactataaattaatagcatttgcagcatacttgcgttaatagttgcgctacttttagtaatagacgcgttttactaggcctaatacaaatagcgctgacctaaggctgtattgcaaaccattttccatattgtgtgctcctgtgtgtcttaattatcaaaatctcgtttattttaagcacttagaactaaacaaaagtgtgtatcattactaaagaaaaaaacaatacattatatacagccaaaccagcgcgaagtggttcgatttcgccttacacatactacacgaaatatacaataagtcttagatgtgtcttgtatacatgtcgatgatcataatgggatttggtttcggggaattagtgatgtatacgtagcgctttggcttgtcacgcgtaggtggtgcccacatgtgtctacttgtagttcctgccacttgttgtccctcagctgtgcagctgaagccatgacgccatcgccatcgccaccaggagcagccagttgaccaggtgaacttgtgcggcactggcgccagtttcgccacatttacctgcgtttttggatattcagagagttatgtttctgcatttcagttagttcgcgcaattactcacccaaaactgataggttggcctccaaatggtgatcgggcggcttctgagtgccgcgatagcaggcatcgcccactaccaacttggcagccgtgccctccgtgggtcgatatgtcagacacactccgtgcttgctgcccttgtggcgcgctatgatgtagaaggtgctgttctcgctccaagatccgtggcaggagtactctggacataggcaagggaagaatgtcataaatttcccttcatcattcatattaaagcattacaaaggtgtaaaatcaattttatctgtagtaaaagaacttctaagataaattattactaatttctaagtgctctcagatcaatgagtaaaattgcgagctactcaaacaaaaactatacaaatgaatctaatgattcttgagaacacaccgtgaacacagcatgaccaaaatcgtttaaagttattcagaactaattgaaaattgaatatatgtactagacttcaactgaatcgtaacgataaggaatctatcaaatgctacatgtccaaagtgtcaacatagattactcccgcagtaaggtgacattcactcaccctcttcaccatccacgctgcacagcggactaacgtctatcaagttctccgccgtacagcccacccagagctgccgctgggcattgtagttgggcacacagccgggaacatcacgtctattccgcgtggccacgaaacccacgcttgtatcgctactgttgaccttttccaggaccaacgcctcctgctgctgctgctgatgctcctgcggatccttcggtgcgttgcggcgactgcgaacgggcaggcctcgggtattggcatgccaggagccgcgctccatgcgctccgcgtttcggaagctcaacgaactgtgtctgtaaccatggaaatagattgagaaaagtcagaggtggcgccacacacaaagcacataccctttatgtccgaaatttcccgagtcagtgccctcgtggtggtgatgtccatggcccagatgcgattttccgttgtgattgcgcttgtggcgcgtggccaggtatggcggtccgatggcgccacgtagcgagtatatgccctccatgggacaaatggccaggtccggattgcttgctaaagagcgacataaacaagcgtttgagagaggagacccaatggaggtggcaggcgattcagtgcagcttacccagcaaggtaatgtaggccatcttattgatgtcaaagtgatccggtgcacaggcgtcctccaggcgaatggcaggcttaccggtctgtatctcgatgacgaacgtgtcccggcggtagaacatcatgcacatgaatcccgattggctgccggcggacaaggggagcggttattgaattctctggctgggtattttcaatttggggccacttaccacccggtggtgtagtgcaccacggccatcatttctgtcggcgtctgtttatttatttgctcgcacagcgcacgtgtctccatatagccgttgggcttaataatgtgcacggacccgtcactgcaaagtggaagttcgggttcgggttcagtttcggtttcgattttggatgacaacttggccgcaggcctgattgctactcacttggaatgataattgtagacggcattgcccatgagggcatgccagtggcggggtcccttgaaccacgccgggaaatcgcagcgctcggcgatgggcggttttcgcagcgacatgatacgtgagccgacctgtgggcggcagttagttggattaggaactgggcgtggtcgttgaacactcggaatacgagtgccgcttatgaagatttcatttcaatattcaaaattaagtatctagttctcaaactggccgtaagcgaattaaaaaaaatatatatattgaacggcgttgcttaataaacaatcgcttaaaagaaaattaaattaaagaacaaaatctatttataagttttgttaaaagccgttctgcttttttcacaatacatacaataggttgtgaagagtctacaaaagtttctaactttgcaaaatattattcattccattagaatttcaaaatgtatagatgcttttgaaagacgaaactatgcgaacatctaacttatttcttcgagtgcagttaagtgaaatggcagaggaacagggtgaggcactttcgcagtgggagtgggggatctggatgggtgtggaaaatgcttacctcggcactgtctaagccattgcaagtggcgtcgccggattgggccagcttatattcggcatccttggagctgagcatactgggtccgcctgcaaagggaacgagttgggtacgggtattagggcccgaacaaaagttcatcctgtttgcccgggggctggctgggatgcttcttacccatcagcgaggagattttctcgtagacaaagcagcgatagcgctcctcgttcgaaatggcatgatggtgcgagacgagaccgaccaagtagcgtgagttgccgtccttccaggttgccaggcaagtcagctcctcgactgcaggagcaccagcaccgaaaagaaaggaagcaagaaggaaggaaggaaggatgttcgtcttgagctcaggccgcgtacagaaaggcgatgagtcattggcgcctgcggaggaggcagtacttacccgtactctcggtgccctggacatcgggacaggcctggaagctcaacaggaggcggctctcctccgtgcagctctcaatgttggacaccggcgacttgcactccccatgcccgcgattgtacgtgaagatgaagggtcctgcaaaagatatggatgtagatcccccttggcaaagtccctgaagtgccccaagttcctgtcggggcttgggcagcctactcacccttgagcggacacttgaccggctcggcgctctcccggaaaagcgagtagagcagggcatcgcccggaatctggtcgcagagattctgtaaagtctcacggcccttgcaaaagtctgggggacatgattattttaaaagcacaaataaaaattcaattaatgcaaatcgcaaattagatggtcgttgaacacagaacacatagaagtaggaaaaatagtagtagtagtagtagttatagaagtggtggtggtagtagtagcagtattagtagtagaaagcagtaaggtttttagtgggagcagagtaggtaagtagtaaattgtactaagtaatagcaaaacattaaagtaagggcatggttgaaaggaaatcaagtctacaaagggctaggaatgtggcaattatgttttatatatatttttattttttggttttgcttttttttttcaacttttcgttgagtgccgcactggaagctgccctgctgctgggctattggaatgttggactgttgggctgttgggatgttgggatttctcatgcggggccatcgccaagcatgccatttaaattgcacagaaatttgtttaattaagtggccgctgatgctgatggtccgggagaaaattgcgcaaataaatgacgaaatggagctttaaatcagcaaaaatgtcgcaagtcgagcgttgctgtgttgcctttgctgtgcggaatggcgaaggcaaaggcaacttgccaccgcggtcatgcccccagcgtggagcttccagtgcggcaccgagtggagaaacaacaacaatttctgtggaaatgtgtaaaaagcagcggtaagtacaatacataagtaagataagtatgtaagttccagaaaaatacaacaaaaatgtataggagacaacaaagaaagaaagaggcaaacaaaccaaaggcagtataaggaacaacaaaccaaagacttatgacgttcacagaaataacttaaagacaagagtttttcattttcagcggcgcttccttgggctgtggaactgcactgcccaacttctgtattgtaaactcaactgaaaggcacgacacgttcataaaaaataaccgaaaagcaaaaacacacacttggttcatcttgttcttccggctctgaaaccagaagcacgggatctggatgggttttggattgagattgagattgggattggaatggggttgggttgggttggttattgtggtgggggcaggtggaacagaggcaattcgggtcgtaaaataatgttagtgcctggtagggccgtatataaggtagttgttgctagagcaagcataacatttgaatcaactaaataataataatattaacaaacatttactcatgatgaataaattgggtaatcggtggtttatggtttctttatggcaaacgcgagagatatatgtggcatatatatgtatatggcatatacatgttcttttggtaaagggtcctctctttttcgttttctttttactggtaagagttgtagagttgtgggtgtaaagttaattgt

SEQ ID NO: 24887 - DNA, 1713 bp, DROSOPHILA
atgagaaatcccaacatcccaacagcccaacagtccaacattccaatagcccagcagcagggcagcttccagtgcggcactcaacgaaaaattccgggcgatgccctgctctactcgcttttccgggagagcgccgagccggtcaagtgtccgctcaagggacccttcatcttcacgtacaatcgcgggcatggggagtgcaagtcgccggtgtccaacattgagagctgcacggaggagagccgcctcctgttgagcttccaggcctgtcccgatgtccagggcaccgagagtacggtcgaggagctgacttgcctggcaacctggaaggacggcaactcacgctacttggtcggtctcgtctcgcaccatcatgccatttcgaacgaggagcgctatcgctgctttgtctacgagaaaatctcctcgctgatgggcggacccagtatgctcagctccaaggatgccgaatataagctggcccaatccggcgacgccacttgcaatggcttagacagtgccgaggtcggctcacgtatcatgtcgctgcgaaaaccgcccatcgccgagcgctgcgatttcccggcgtggttcaagggaccccgccactggcatgccctcatgggcaatgccgtctacaattatcattccaatgacgggtccgtgcacattattaagcccaacggctatatggagacacgtgcgctgtgcgagcaaataaataaacagacgccgacagaaatgatggccgtggtgcactacaccaccgggtgccaatcgggattcatgtgcatgatgttctaccgccgggacacgttcgtcatcgagatacagaccggtaagcctgccattcgcctggaggacgcctgtgcaccggatcactttgacatcaataagatggcctacattaccttgctggcaagcaatccggacctggccatttgtcccatggagggcatatactcgctacgtggcgccatcggaccgccatacctggccacgcgccacaagcgcaatcacaacggaaaatcgcatctgggccatggacatcaccaccacgagggcactgactcgggaaatttcggacataaaggacacagttcgttgagcttccgaaacgcggagcgcatggagcgcggctcctggcatgccaatacccgaggcctgcccgttcgcagtcgccgcaacgcaccgaaggatccgcaggagcatcagcagcagcagcaggaggcgttggtcctggaaaaggtcaacagtagcgatacaagcgtgggtttcgtggccacgcggaatagacgtgatgttcccggctgtgtgcccaactacaatgcccagcggcagctctgggtgggctgtacggcggagaacttgatagacgttagtccgctgtgcagcgtggatggtgaagaggagtactcctgccacggatcttggagcgagaacagcaccttctacatcatagcgcgccacaagggcagcaagcacggagtgtgtctgacatatcgacccacggagggcacggctgccaagttggtagtgggcgatgcctgctatcgcggcactcagaagccgcccgatcaccatttggaggccaacctatcagttttgggtaaatgtggcgaaactggcgccagtgccgcacaagttcacctggtcaactggctgctcctggtggcgatggcgatggcgtcatggcttcagctgcacagctga

SEQ ID NO: 24888 - protein, 570 aa, DROSOPHILA
MRNPNIPTAQQSNIPIAQQQGSFQCGTQRKIPGDALLYSLFRESAEPVKCPLKGPFIFTYNRGHGECKSPVSNIESCTEESRLLLSFQACPDVQGTESTVEELTCLATWKDGNSRYLVGLVSHHHAISNEERYRCFVYEKISSLMGGPSMLSSKDAEYKLAQSGDATCNGLDSAEVGSRIMSLRKPPIAERCDFPAWFKGPRHWHALMGNAVYNYHSNDGSVHIIKPNGYMETRALCEQINKQTPTEMMAVVHYTTGCQSGFMCMMFYRRDTFVIEIQTGKPAIRLEDACAPDHFDINKMAYITLLASNPDLAICPMEGIYSLRGAIGPPYLATRHKRNHNGKSHLGHGHHHHEGTDSGNFGHKGHSSLSFRNAERMERGSWHANTRGLPVRSRRNAPKDPQEHQQQQQEALVLEKVNSSDTSVGFVATRNRRDVPGCVPNYNAQRQLWVGCTAENLIDVSPLCSVDGEEEYSCHGSWSENSTFYIIARHKGSKHGVCLTYRPTEGTAAKLVVGDACYRGTQKPPDHHLEANLSVLGKCGETGASAAQVHLVNWLLLVAMAMASWLQLHS

SEQ ID NO: 24889 - DNA, 3386 bp, DROSOPHILA
gccgactgtcgccagcaacactatcactgttttgcaccacatcatgtgaacgatcccgcaccactttttggactgactcttccaactccgatggttgtccgaactcggttaaagttaagtactaaatgccggcaagaaagtgctatttatttattgcatctaaatcgtgcgtgtcggagcgggacggcttgttactgaaattggtttgctggaacgttttcattggcccaaatcaggccaatcagggatgtctacgtattctttttcaccggccagggctgatttcgataagcaatcgcatgctgccctgtcgctatcgattgcttgagctggaattagaaacactaaagtgaccgtttgctaattaaattaaattataaaatatataaaattaatatattctggcatacaattaatcacttgcagcaggctaagctaagaaaacataaaattactccaataacaattcttctactacttaacaattgtagtagttacaggaagaacagttgtgcttccagaacattcctaagctttttaacggcttaagggttttgaaaattttaactcacacttacatcacatgttaacaattaagttttcacccgataaagttcatagtatttaaaaagttagaatgttaattatacattataatacaaatcaaaaacaaataaaggaattccaaaactttgcacctgtatttcgttaattttaggaacttttttatctataagtgctaacttttacatttgactttattacattaaaaaattacaattttcgctggaaatgtattatattaataaaaaagataaatagccagaaatagaaaagtgaaattaaattaattaaaacaaaaaagctttggtatttataccaatagaccttctaaggtattttttaagacctagctttgtggcagatacggtaagttcgtgtcgagcccacgtgttgagccaatcttatcaaacgccgattcgaatgcggcattaaacaaatggattcccttaacaacggatggttcagcgaactgcaggccgatctctggcccggtcagtcattctccctgaaagtcaaggaggtcatccacaaggagaagtcccggttccaagacatccagatcgttgaaacgtaagataaataatagataaacaaatacttggacacacaaccccatttgtttacatccgaaattcctcagtctagactgaagtttgaagatagatgtcaaaataaattagcttagattgagattaaaaaactaaattaaaatcattataaacacgcaagtcacacaaatccgaaatttttaacagcttaagctgttgagattttaaggactaacctacaatagcctaatcccatatgtatcctacattgaaggtccctaaatcatagattgtagaaatcgaaaattttccactggttgttcaaacacaaattgcccagccagcattttcggaccctttggttttcgtgtgtttattcttgatctgcaccaacagccttatcgatggagtcatctagggccaaaaacgacagacagaatactgatagcaagtcagctcgtctttcaggtttgagttcctccagtcgaacattgggtacacttgcgccgctgaaaaaatcaataattcgataattctattacagcgaaacctatggacggtgcctaattctggacggaatcattcagtgcacggccagggatgagttctcgtaccaggagatgatatctttcctgccgctctgcgcccatcccaatcccaaaaaggtcctgatcgtgggcggtggcgatggcggcgttgctcgcgaggtggtaaagcatccactggtcgaggaagtgcatcaggtggaaatcgacgaccgtgtcgtcgagctgtccaagcaatatctcccagcgatggcctgtggtttcgccaacgagaagttgaagcttaccattggcgatggattcgactatatgaagaaacacaagaacgaatttgatgtcatcatcaccgacagctcggatcccattggtccggcagtgagcctgtttcaggaaagctactacgagctaatgaaacacgcgctgaaggatgacggaatcgtgtgctcccagggcggtagcttctggctggacctggactacatcaagaagaccatgtccggctgcaaggagcactttgctaaggtggcctatgccgtcacctccgttccgtcctatccctgcggccacattggcttcgtcatgggctccctgaacaaaaaccaggacttcgctactcccaagcttggaaagtccgaaatcgattctatagacctaaggtactactcctccgaggttcactccgccgcctttgccttgcctcgatgggtgcagaagcacttttacgaatgaccaggttgcggaaagattcgtgtgtatctgtttgttaaaaataaatatgataataatatgacttgtttatcatcgcttcttaaattcttggatattttcaacaaatgctgactcttgcaatgattcatttttagtcgaatttttgtagcctgagtattttccttccaatccgactaccatctttcagttattttactgttgaaaatagaacaaattgtaatgtttattacgtaatgatatatacagttggctctatttaatttttgtatttgtaagtggatgctgggttaacataatgagacttattgcaatattttacacgaccgaatgttactctcatttatatatcgcatatattgcaaaactttgaaaggaagcgtttcttatatgcaaaaatgaccttaactgcatgtgaataattaactaaaaactgatattcaatttcaataacttaatagaaattaaatcttcaacctgtttaatgactaattaaatattgttatagttaggaaacgcaattgatacataattacaaaattagatgtaaaatatgtacaatcatttaatattggtttttattttctcgcctattctaaagttaattatcatttcttttgtgtcggatagattttggtgtctaatgtgcgtgtttttatgtgtaataaatataatgtatgtgcattgcgattttggtagccgagctccagttttcgaaaaagtcgaatcattttgtgtccaattgagaactatttcacatttttcgaaatagatggataaactaattattgtgtgtgtacgaatactccactcctttgactgggtaaatttgaataaacctataaaaattcctaattcaagtataataattttgtctaaataaatcaatttgtaaatgtgtattccaaaaaaagaatcacgagcagttggaaaaaaattaataataatggttttgaaaaccggagcttgactgtgtataatttgttatgcgattgattttgta

SEQ ID NO: 24890 - DNA, 1058 bp, DROSOPHILA
atggattcccttaacaacggatggttcagcgaactgcaggccgatctctggcccggtcagtcattctccctgaaagtcaaggaggtcatccacaaggagaagtcccggttccaagacatccagatcgttgaaacgtccctaaatcatagattgtagaaatcgaaaattttccactggttgttcaaacacaaattgcccagccagcattttcggaccctttggttttcgtgtgtttattcttgatctgcaccaacagccttatcgatggagtcatctagggccaaaaacgacagacagaatactgatagcaagtcagctcgtctttcagcgaaacctatggacggtgcctaattctggacggaatcattcagtgcacggccagggatgagttctcgtaccaggagatgatatctttcctgccgctctgcgcccatcccaatcccaaaaaggtcctgatcgtgggcggtggcgatggcggcgttgctcgcgaggtggtaaagcatccactggtcgaggaagtgcatcaggtggaaatcgacgaccgtgtcgtcgagctgtccaagcaatatctcccagcgatggcctgtggtttcgccaacgagaagttgaagcttaccattggcgatggattcgactatatgaagaaacacaagaacgaatttgatgtcatcatcaccgacagctcggatcccattggtccggcagtgagcctgtttcaggaaagctactacgagctaatgaaacacgcgctgaaggatgacggaatcgtgtgctcccagggcggtagcttctggctggacctggactacatcaagaagaccatgtccggctgcaaggagcactttgctaaggtggcctatgccgtcacctccgttccgtcctatccctgcggccacattggcttcgtcatgggctccctgaacaaaaaccaggacttcgctactcccaagcttggaaagtccgaaatcgattctatagacctaaggtactactcctccgaggttcactccgccgcctttgccttgcctcgatgggtgcagaagcacttttacgaatga

SEQ ID NO: 24891 - protein, 51 aa, DROSOPHILA
MDSLNNGWFSELQADLWPGQSFSLKVKEVIHKEKSRFQDIQIVETSLNHRL

SEQ ID NO: 24892 - DNA, 6522 bp, DROSOPHILA
gggctatccggagttcggacgcctgctcaatgaaactggtcgaccgatggtatactcctgcagttggcccgcgtatcaggaggatgcaggagaaatgcccgattatgagtcactcaagcagcactgtaatctgtggcgcaactgggacgacatcgaagactcgctcgagtcccttatgcagatcattgactactttgccaagaatcaggacaggattcagccgcatggcggaccaggacattggaacgatccagatatgctgctgctgggaaactacggcttgagctacgatcaaagcaagctgcagatggcgatttgggccattatggcagctcctctaattatgtccaatgatctggctgcagtgcgtcccgagatcaaggctatactccagaatcggttggttaagcttcgatatcttatcttcttggacttattggtaaacttttgttatttgcagtgcggttattgctgtggaccaggatgagctgggcatccaggggcgccgtgttttgtcccgcaaccaaatcgaagtctggaagcgtcccattacgccagtaaccaagagtggacatcactcctatgctgtcgcctttgtcagtcgccgagatgatggcgctccctacaggatccccttcacggtcaaggagctcggattgacgaatcccaagggttataatgtgcaggatctgtacgatgccagcagcaagttgggcgtcttccagtctgagagtcagttcatcacacgcgtcaatcccaatggtaaaatccgttgcaaaacactaactagccctgacttacttcattttcccctcccccaggcgtaactttctacaagtttacagcgttgtaagcccaagatatgcaaatcagccgctgccatcaaatcgaatatgctcttatatacacactatttccacattgtccattgacgttgcatcgatgatctgtgtaataagttaattccgacaataaataccaggtaatcactgaagagtttgactttgttgatttttattgtttattaaacaattgattgtgtgcattacacacaggtataagtattgtacaattataggcatagattgcagtaccgacgctagttaagacttgttccatgatataaataaggtctgactggatgaaagagttaattcgcaagcttgtataaataagaagtgtagtactatatacgcgacaaggacccgaataagagcaaaaaggatagcgacccctcgggatcataccagttataaatagataccatctacagctactgcttacatgggtttggtcgagagagttagagttattgtcaagttgtaggcgaaaccgaaaccaaaccgaaggaaccatagcccggggttagtgcaccccattgctgatggtcggtgtgcgctcgtaggtgcgtctatgcagcgcatccacgtccttcaggtagtaggtgccgggaaacagtgcggagatgctgcccgttggcgtgtagggcgccgcatggttgttcttctcccgcacctccatcagcgcggagaactgctcgggcgcaaccttctcccgtgaattcagcaacggctgcacgtagtccagctgcgagacgaacttttcgaaagcagctgcatcctgggtcacgctgatcgagtacatggaagcagccagtccggatccgtaggagaacaaaccaatgcgctttcccaccagctcctgggctggtccgctaatcaacagagacaccaaaccggagtacaccgagggtgtgtacatattgcccacttggttggccagcagcagcgatttcttggtcttgctggcaaagatgttggcggactgcgtcatgaaggccttctccacatcgcgatcaaagtaggtgctctccagggtagcggtattaaaacgttccaggtcgggaaactgcttcgttcgctcctcctcactgctcagcaggaaatcgttgaagctcaggcgacccacagatttttgcaccaacttgcagaacggtgtgtggaataggatagcatcgaaggtgctcaggctggccggctgcttggaagtatccttctgctgctggtcgaacttcttgcgatacagcctgtagcaggtgtccagagcagaaaggtagcactgaatagagagctttccatctaccgttgggtattcggagctgaggtccggcttgtaaaagtcgtaggcgtgctccatgtgcgttgcgcgtagtccacgatcgaggataagcggcgcatttggacccaccagcatagccacagcacccgcaccaccagttgggcgcgctgcacccttggcgtacacggcgatatcagcacaaacggccaaagccaggcggccgtcccagctagaagattccacccaattgacggcattgaagagcgccgccgtgccgccgtaacaggcgttcgtggtgtcgatgccctcgatgtccgtgttcccgctctcggcgaacagctgcatcagcacggacttcaccgacttcgacttgtccacaatggtctcggtgcccacctccagtcgtccgatctccgagtgcttcacatgttgccgctccagcaggcggctcacaaccgtcaggcagagagagttgacatcctcgcggtccgagcagaagcccatcttggcctggcccaggccaattgtgtacttgcccgcggaggcaccatcgaaggtctccagctccgtttggtccacgtactgggaggggaagagaatctcgatggcgcgtatgccaacgttctcgggccagtgggatgccatgattgtatccggttatctatttaatcctgagctctgtaagagagacaatttgtatacttttagtgggagctttggcatgagagtaaatatttaattcaatatctttgttattaacaactataacaatcactatttgcgtttcgaaattgcttcatgatgttgggagctaaggccttgtttaatttaatttaagcagagttctcgatgtggcccgaattccactgccaattggcattgggaaactttctccccgcgcaatcacggcgtatttataatgcttacaaattggacgagggcagagacaacctgttgcacgctcgagctgcgttggacgtgtgtaagccagtgactttggctgcggctgaagaagtcatcaaagtctgccagccagaggcccccgtcttgggggccaactgatttccctggctgagaaactgagcgtgtagagagagagagagagagggagagagagccgccggagcggagaaagtttcccccgctcaggcgagctccacaaaagagaacactaaaccgctgtgaagtaagccaaaacacacgcatcgcaataaatgtaagccaacaagacaagcccaaagagccaaagggacaggggcgtggatgctgtggctacacgcagagaatttatgattacatttatttacaatagataatcatttcttttaaactttttttgtcagagaacaagctacaaaaatgattactttaacacaataactcttttttcaaaaccgcttcccctgaaacttctctacattttcacacattttaatttcagttaggcgcaaattataattaaatcaaaatgatgatcgaaatattatgatttcctatcgaaatagaatggaattttgctcggtggagcattgtgggacaggctgggagcgtcttcacccataagtgggtcatgcccaccaagcactaagcaccaaccaccactctccctcaatcacacgcgtccatattgtataaccgataagaggtgcgagtgtggcccaaacccgaaaagcggttgacatatttaccgttacgtttagcacctgcgactactggcctattgactatagattttcacttttcggcccggaactttgtggatttgtgaaaaaaggctgggtagcgcgaagctcactcgatcggatctctccgcggactgacggcactggaggcgctgcactggcatatgaatatgaccatgacgacggaattggcagtggagaagcagacacctagccaacgaagccacctagccaccgagcaaacacagaggcgagaataggcgctgtaagtcaatgccaattgctgaaagcgctcggcgaacaaatagcgatcgtgcataattacgggaaatatttatcgcttagatacggccagcgagcacgaaacacaatcgtcggggactaagaagccgccagactatatagatatgcacatcgatagtcgtggccttttgcgatggggtaaagatcaaaggctgtccatcgctgataaggccgaaacaaagcggcttccttaaaaatgccaccgaataagatgtgacactctgtccatttcagtgacaaaaactgggaagtgacttccaatagcttttctccgattaattacttaagacgtgcccttaggaattattaatagaaaattatttataatttgagttctactaattttcctactggtataacttaaattggattatcatcttttctgaacactatcttgaaacgtgatttcaaatcacctgaacacaattggtaattgataaaatattctacagaaatcacttaaagtaagataataacaagactactttaagtagttgtgatattacttgagtcgtacttaagttaattaatacagtttagttaaagtaagtaaaattaacaaataagagaatactttgtcctattgtgcaaaagagtatgaatcattatccaaagtcatgaaactctaatttcaagcaatttaagtgatttaagtcattaattcctcgagtgcctgcgtggaatacagctcacccggtgttcctaagcagcccgtggatttaagaatggaaattgatgcgctgtttatgcggaaaaggagtcatcgaagggaagggaacggggcactgttgtggttttgtgggcttatttttagcacttcggaattgggaaatatttgaataaacatttcctggaactgctgcgcacttggctaattgattgctcttgagtcattcttttctttttcggctgcaggagggtgcggaggtggaggaggaggaggaggaggaggtcaaaggtcgggatgttcccgatagaaatacacgtgtatttgagagccgggagataagcatagtttaggggtcaggattatgaaactgatctatgaggtgacacatatcactggatgttgataatttttaaatctacactattacacacggctggaaaaacactgtgaaacagcttttcccaatttacaataaccaattctaattgcacacatattatgttcctccgacttctggttacatcagcgcccaaactgaccacctgccacgcccacagccctcatccagcgcagcacgaacagtactcgcactcgcaatcaacttacttgctaatattaatggtccagggcgggcgatatgttttaaactaaactaatctggaataaaattaagcaatgaaactgcggcaccttagccgcaggcagtgttggagagcgcgcggcgctggaacagctgctggcggagtcagctgtttggctcgctggctaagcaacactggcgccatcacgtgaatctcgtgggcattgtgaactgtcacttttttcgccagcgcttttctcaccacacaatttcgttcgcatttgtgggtggcggcggtcgatttgcgctgattttttggcaaagaaaaacgcacttgctgttttcaaatagcacaaaaagcacacctgcttcgtttacaatcaaccatattcgctgaaaagtaagtgccaaccgtaagaaatagttaattcggcgggttttccacgtcgccgtgaaaagtgcaaaagttaccccccgccgaaaaaaaagaccgattactacatcgcagtaggtctgctgaccaggaaaagtgcgcaaatctcttgtagattattgaagatagtgagaaaattagtttttgcaatgtggctatgattttttgtcgaagcagtgtgaccctgaaaaaaagagttcgccagtttgttgcgtttcgttcgacggcagattgccgcgaggtctgcggatgtatctggaaatatccagctgatgatcgtgtgggctgggggcggggagtcgggaaaatgtgcgaaaagtgttttggtttttgtgcttaaatgaaaaacccgtgagcagcggaaaattatcgatcgaaaaactgtcatgtgactgtcaacgaacagctgacattgcgagagcaactcaccacagcgagtggtgaaaagagcgcaataggcgctttgaaaattgaaagagaacacaaaattctctttcgctctttgggtaaacaaaaaaagttggaaaatgttgtttaaaaattgaaatacttttcggttattttgccataaggcacgtatttcgctgattaatagatcgtgttgtgcgaaaacaagcaaatacactttgatgcgctgcacgaggattaataaataatcgtattgcgtgcaacaaggaccttgatgaaaaccaagcacatattatacatgatatatatactctacgaaactgtaggc

SEQ ID NO: 24893 - DNA, 1939 bp, DROSOPHILA
ctgactccgccagcagctgttccagcgccgcgcgctctccaacactgcctgcggctaaggtgccgcagtttcattgcttaattttattccagattagtttagtttaaaacatatcgcccgccctggaccattaatattagcaaagctcaggattaaatagataaccggatacaatcatggcatcccactggcccgagaacgttggcatacgcgccatcgagattctcttcccctcccagtacgtggaccaaacggagctggagaccttcgatggtgcctccgcgggcaagtacacaattggcctgggccaggccaagatgggcttctgctcggaccgcgaggatgtcaactctctctgcctgacggttgtgagccgcctgctggagcggcaacatgtgaagcactcggagatcggacgactggaggtgggcaccgagaccattgtggacaagtcgaagtcggtgaagtccgtgctgatgcagctgttcgccgagagcgggaacacggacatcgagggcatcgacaccacgaacgcctgttacggcggcacggcggcgctcttcaatgccgtcaattgggtggaatcttctagctgggacggccgcctggctttggccgtttgtgctgatatcgccgtgtacgccaagggtgcagcgcgcccaactggtggtgcgggtgctgtggctatgctggtgggtccaaatgcgccgcttatcctcgatcgtggactacgcgcaacgcacatggagcacgcctacgacttttacaagccggacctcagctccgaatacccaacggtagatggaaagctctctattcagtgctacctttctgctctggacacctgctacaggctgtatcgcaagaagttcgaccagcagcagaaggatacttccaagcagccggccagcctgagcaccttcgatgctatcctattccacacaccgttctgcaagttggtgcaaaaatctgtgggtcgcctgagcttcaacgatttcctgctgagcagtgaggaggagcgaacgaagcagtttcccgacctggaacgttttaataccgctaccctggagagcacctactttgatcgcgatgtggagaaggccttcatgacgcagtccgccaacatctttgccagcaagaccaagaaatcgctgctgctggccaaccaagtgggcaatatgtacacaccctcggtgtactccggtttggtgtctctgttgattagcggaccagcccaggagctggtgggaaagcgcattggtttgttctcctacggatccggactggctgcttccatgtactcgatcagcgtgacccaggatgcagctgctttcgaaaagttcgtctcgcagctggactacgtgcagccgttgctgaattcacgggagaaggttgcgcccgagcagttctccgcgctgatggaggtgcgggagaagaacaaccatgcggcgccctacacgccaacgggcagcatctccgcactgtttcccggcacctactacctgaaggacgtggatgcgctgcatagacgcacctacgagcgcacaccgaccatcagcaatggggtgcactaaccccgggctatggttccttcggtttggtttcggtttcgcctacaacttgacaataactctaactctctcgaccaaacccatgtaagcagtagctgtagatggtatctatttataactggtatgatcccgaggggtcgctatcctttttgctcttattcgggtccttgtcgcgtatatagtactacacttcttatttatacaagcttgcgaattaactctttcatccagtcagaccttatttatatcatggaacaagtcttaactagcgtcggtactgcaatctatgcctataattgtacaatacttatacctgtgtgtaatgcacacaatcaattgtttaataaacaataaaaatcaacaaagtc

SEQ ID NO: 24894 - protein, 465 aa, DROSOPHILA; identical to SEQ ID NO: 8427

SEQ ID NO: 24895 - DNA, 3742 bp, DROSOPHILA
ccaccgggatgcggggctgtagctccagcttatgaccctcctgcgtaatgtattcctgtagaattttcgagtcggtggtctgcgggtagccaaagtcgagcaattcatccagcagctcgtagatgatcacgaaattgtcccgaatggactcctcctccagctccttgaagtattccacaaagacctgcgcgatcttgtgcagaaagacgaagaccagagcgatattaacgttcttattgcgcggcgtcgtggatacgatataaagattgttcgttttgatgtaggcaaatgtagtctccgccgtctgaaggatcggagtgattaggccctcctcctcgcgctccatcagcaatggcatgaatttgtcgatcacggccatgtcgatgttgtcaccgcggtagttccgcgatatcagcaccttgcccttcacgtccagaacgaaaatggccgacgaagacatgtctcttggttcccagcagctgccacttgtcccaggtgtaaaattcccaattggatcgagtgggaggtcgcttcgatggttctactgctcgcggcaggcgttgcgcgtggaagttggcaactgtcgcgaggtggcgatgagtgggctaggtctatcaatgggctggatttacatattccgtttcgtagactggaaaatgcgaatgaaaactccggaatttcttacgtcgccttttctgctgcttctttttcttattagttggcccaccagtgctgtgaaatgttcacatcaggtgttgggcagtgtggccaggtgagattggtctactgctgattaactagcgaattaagcttaaaggaaatgaaaaatgtgcaaggtgtaacatcttaaggtttctgtttttaaataaataccttttaaattattttcattttcccattggtacctttaaattcaaatcataaatatattggagaatgtaatctagcatcactattgtgccatccggcatttgtggccatccgcagtacggccacactgctagcccagacgctgcttttgtggaattgttaattatttatttcggcgagcatgcaaatgaacccgagcgtcacaatcgagcgcaaacgcgtcgactgcagtgtcctgccaaagggatggcagcgcgacgaggtccgaaagtccggcagcagcgccaataacaacgccagcagcaacaacaacagcagtgccacagccagcagcaacaacaacaataacaaggtggatgttttctactacaggtaaagaagaagagcagaattactatatagactactatatacctaaaatcggaacactgcacgctgtttaatcggataaacgtttataatcactttcactacctttctgttattacatccgcataaccacacacacacacaccatatacaccacacacacgcatacgcctatgtatacacacgcacacgaactaccacctaacccaccaaaaatatccatccaccgccgtgtctgttcagcagtcccacaggaaaaagggcggagggaaagccacaggacattgcaatccctgatttccagcctggcaaaatgccgcactgcgccctgccctcgccctccatttcgctgtaccgctgcagcgccatgccgctgcctatagcaagcgggggcggtaatggggccaccagcggatcggcggccaatgccctcaagcgcaagttcgcccggagtcaaggaggcaatgctgcaggagcagcaggagctgctcctccggcagcgaccgcctcgtcagcagcaacagcgacagcagcatctgcttcaccatcaacggccaatcgccagcagcaacagatcgaactcaggtagagccaagtggatgagcacttgactcttgcatgtcagcgtgtcatgtcttgtttgccaggacgcaaggtctacagcctgcggcaattaaaaagcatcaaatgaaaaaatacccaaagaaacacacaattggcaaaacaattcgtagttgtcttcaaaaacgctgtagctctgtgccacctgagatttatgttccaccatctctgcatgctaaagctttactttacgctttgtctaatgtgctgttcggtgttttagctttttgaaggcgtttctctaatacatttccaatctttaatcccttacagccgagccctgcgcactgatgtctccctggtgcctcccattcgacagactgcctcgatcttcaagcaaccggtgacggtgattcgcaaccataaacaggatcccgccaaagcgaagaatgaacccaagcatggcactcgggagaagccgaaacagctgttctgggagaagcgactggaacgactacgcgcctgccacgacagtggcgaggagctagacgacatctcactgcccaagaccatacgcaccgttggccccaatgtcaacgaacagaccgtcctccagtcggtggccacggccctgcatatgctcaacgccggcgtacacggccagagttctacgaaggctgatttgaccaagaatgccatggcgtttatgaatcctgaacaaccgctaatgcacgcggtgatcatttcggaggacgacatacgcaaacaggaggatcgggtcggagttgcgcggcgaaagctgcaggatgcactcaagacatgagttcaatggttaacccccatgcatctaccaattccattgtaggctctaacatctctatcgtattgacccctattcgaaatctacatttaagactagtgtgtaataaaccaaatccaactccaatcgaggaattctggtttcttattggacatcgagaaagcttcgcttgtcttttccatgacaacagggctctgttatccaattttattacgctcagatgactttaaaatgctattttatacaagacagtttaaaaacgaattcgaactataatacataaaccgaattttcatacttagtcgatttgtttggcaaatccttggaacgaagcgttatctacgacgaggggatcattacctgacgaaattttcggtccaaagatttatggccaagtaaatcgatctccttcagtgtttaggtaaacctttaaagctggacagtttttgtgcttcatccccacattgtattttaaaatatatatactatacacatagatatcgttgcagagatgcgattagtctaggccctcctccatctcgtcatcctcgtaatctatgccatcgtagtccgtcgaagagcgtgtcgttagctgcaaggatgaatcaatcggaatttgcaattaactgagaattttgcacgtgctcaagctgaggctgtctacaagagtgtctggagccaacagaagacattgaaccagaactatcgaataagctccatcaagtcaagagtaaagaactacaaatttcagccaaaaatacccacctggttgtaaatcccacgccatgccgcaaacgctcccatggccaagacggctcccacgccggctactattttggtgttcagctcggagtctaggaacttgcgctccgaggccgtcagactggcctccgtgccactgggtgtctttgtgagcttgacggaactgtatccctcgatgcggaatatgtccttcgtgatgcggttgataaagttcactaggttttggcagcccttaatgtgattctgcagtggattgttaggcagtgcgatcttaaagatgatggcaagatagctgtagacaatggcatcaaactcgctgtaggtgtcgccaaagaaccacaccttgcgacccaatttccg

SEQ ID NO: 24896 - DNA, 1115 bp, DROSOPHILA
ctagcccagacgctgcttttgtggaattgttaattatttatttcggcgagcatgcaaatgaacccgagcgtcacaatcgagcgcaaacgcgtcgactgcagtgtcctgccaaagggatggcagcgcgacgaggtccgaaagtccggcagcagcgccaataacaacgccagcagcaacaacaacagcagtgccacagccagcagcaacaacaacaataacaaggtggatgttttctactacagtcccacaggaaaaagggcggagggaaagccacaggacattgcaatccctgatttccagcctggcaaaatgccgcactgcgccctgccctcgccctccatttcgctgtaccgctgcagcgccatgccgctgcctatagcaagcgggggcggtaatggggccaccagcggatcggcggccaatgccctcaagcgcaagttcgcccggagtcaaggaggcaatgctgcaggagcagcaggagctgctcctccggcagcgaccgcctcccgagccctgcgcactgatgtctccctggtgcctcccattcgacagactgcctcgatcttcaagcaaccggtgacggtgattcgcaaccataaacaggatcccgccaaagcgaagaatgaacccaagcatggcactcgggagaagccgaaacagctgttctgggagaagcgactggaacgactacgcgcctgccacgacagtggcgaggagctagacgacatctcactgcccaagaccatacgcaccgttggccccaatgtcaacgaacagaccgtcctccagtcggtggccacggccctgcatatgctcaacgccggcgtacacggccagagttctacgaaggctgatttgaccaagaatgccatggcgtttatgaatcctgaacaaccgctaatgcacgcggtgatcatttcggaggacgacatacgcaaacaggaggatcgggtcggagttgcgcggcgaaagctgcaggatgcactcaagacatgagttcaatggttaacccccatgcatctaccaattccattgtaggctctaacatctctatcgtattgacccctattcgaaatctacatttaagactagtgtgtaataaaccaaatccaact

SEQ ID NO: 24897 - protein, 314 aa, DROSOPHILA
MQMNPSVTIERKRVDCSVLPKGWQRDEVRKSGSSANNNASSNNNSSATASSNNNNNKVDVFYYSPTGKRAEGKPQDIAIPDFQPGKMPHCALPSPSISLYRCSAMPLPIASGGGNGATSGSAANALKRKFARSQGGNAAGAAGAAPPAATASRALRTDVSLVPPIRQTASIFKQPVTVIRNHKQDPAKAKNEPKHGTREKPKQLFWEKRLERLRACHDSGEELDDISLPKTIRTVGPNVNEQTVLQSVATALHMLNAGVHGQSSTKADLTKNAMAFMNPEQPLMHAVIISEDDIRKQEDRVGVARRKLQDALKT

SEQ ID NO: 24898 - DNA, 10546 bp, DROSOPHILA
ctaagttttttttaattgtatgtgaaccagaattaaaaattgaaatagttgcttacaattctattctgataaactagactctgcattaaaatcatctagaaaagtcctgccctctgttattaatacctaaatatcaacaatctactccttggttttcgccaacaagaagagatacggttcccgtatcttttcacttcgtaactagcaacacttttgaactcgtactttaattttgaaaaatttgattcgctgtacgtaatccgtaaataacctagcttttcctatttaatttaacccaaatatgagtttaattaaatgttccaaatgtaattgatgtaaatgtatcagaaattgttaaagaaattgtgcttagaatcacaattctaatcacttaaaagcctctgtatgcattttctgtggtggcttgttagctaaacaaaagtttattattggcgccaatttcaaaaagtctccagtgtgcccaataaacacacaattttacatcttacattcatgctcatttctacacgcctcttttattttacacagcctagcggcaaaaataggaactataaacgtgctgccagatcgaaagaaaattaactttagttttgtgcgacatctggtgttaagattctaaaaggctcacaacggcttctatgggacggtagcgaaaccagcttggttgtatagaaatatacattttacaacacagcaccgtgtatgttattgaacactaaaacttttggcgctaactcattaaaaaattcaaattcatacgttaattcatggcgtcttgttctttgtacagataaaaaaagtacacataattttcgatcaaatttttttttttttttaactttgttttctatagcatttttatatgaaattatatgcaactagtggtgaaaaactggaaaaatcaaaagtcacgccatctaacattcaagacacaaaaacatatttatttaaatttgttgtaacttaaagctcgagttaactagttcttatacatgtcacagagcaccttttccatgggcgtgttcccaatagtgcgctgaaaatagatggactcaatcttgtgggagctgatcatgcgcagcaacggcagcatgagaaggagtcgtccgaatctggctatctgggcggtgaactgcgtctttgtgtgctgcgacagcatcacctgttcgttaagtaaaatttcaatgaagcttttattgcttttgaaaagtgcagtatatttacgtgcgcctgatcctgaagattctctatctgcgccggatctttaagtccgcgcgtttccggccggaagagaactatcgccttgaggcacgcgaattcagcggggtccaccagcaccgccttgtatttgcagaagatctcgtggagcgttcgcacatccgccgccagctagcagaaatttgtggtcatatatataatatacatattagacggagtcctgtgtagacttacctcctcctttgttatgcaagtgtcgccattggcattgttctctagattattgcagtgctccgccaccgagaagagggcgcagccggtgggatccaggggaatgcaccattggattgcgttcagcaggaacagctccgaccaggactcctccagcaaaattacctgcacacaggggatatttcgttatgttttgagtaaatgaccctggctgctattgatcggtttttatattaatctcacctgatcccgaaaggaaagtcttgcaaagctgggcaggttcttggcccacttgacggccatgaagagcagccgggcacttgtctcgtaaactgtttcgtgttgatgggtgtacagattgggcgacatgaactgcggcataatgaaactcgaatccgatctgctgactgcatgcggctcctcgttgtcgttggttacatctatggagtcgtctgtcaaaaaaatgggataaatacatacgatgtttaaatatgtttatataatagattaatattttatatgtataagatattgactccgttttaaacagaataaataagcatatatatttctaaactgatattttatatcttctatcaaaattgattttatttatttgtataattataaatatacccaccatcattgtcattttccatggtgggactggaagagctgacggaggagacactgccgccggcgatgtttatctccttggcgttttccggcgccggtgagctcgggtcgatggagtggttgctgctcgagttggtcgagtgggagacattgccactggtggccatctccatgccgtaggccttttccttgggcgagtggtgcacgccggctgcgttgaacatgggaaagctgccggcgcccatgtggttcgcagccaattgcattgaggaggtgaggtggttgtggtgcagcaatcgtcccgtcggcaaactgcccagtgctgctcggggatcaaacagaaatcaaggtggaccataagtaacatacgttcccaactatcagcctggggggcagcaactactcacagggcggcggcaggagtccggagccgtagcagggcggagacagtagcacgggtggtctgcaaattggagttgcccgcagatttcgggcggttagatggacttatgcaaatgacaggccaagcacaacaactgcactcgaaaaaattgcatgcaactttttttttttaaagagataccaataaaatcttaaagtggtcgacatttctttattctttcgttggacaaaaagtttggtattagaaaagaacatagcacaagtactaatagtagtcttcaagccttggcttatcttccagtttatgtttttcataatttttccgagtgcagcggtagagatagacttacccgaaaaccccgacggccacggcggcctctcgcagcgcccgtccgtgctccatctcccgcagagtctccggccgtatagtggccgtgttgcggggctgtcgctcattttgcacggctgtaattggaaaacaaatgcaactagcatgagcactcggcatctagttgtttaggaattgggagtgggactggaagtggaagtgggagtgggactgggaggtgtccgtaatgaggaaatgtcacactgacaaaatcgctccgagcactcgtttgagcacaggtatcgcaggatggcaggacgaaaagcggccgcgtgtgcccggcctttcctcatcagcatacggaatggtatggaatctccggctggggaacaaggccatccatccattgatggcaaattggttttgtggtcacgtgccgctcacgcccacaaattgtttcgctatttgtttatgcaatttcaccgcacaatgaggccgggccacaaaagctacttcgccgctaatggcgtatccgcaaactgtggctattttccatacggctcgcataatttacggctaaattaaaggatccacaatagagtcgggaaagtgtgtgaaccgccccaagggaggaagactatatttatcaaatggcaaacttacgagactagaatgcaaagtgaaaggtgtgaaagtttctcgccgattatgtttatctttataatgtcatgttcgattaagtagatataaatatatataataatattaacagattagtggcagtagttgaatggatatattagaatggtatgaaaagaacaacttccttataaatacccagtgactcgttaagtacaaccaggtaagtacaattggcttatattgattttataagcctgaatctgactgacgactgccgattgtctatttgctttccagacatcgaaacaatgaagaaaactttcagtcaaaatgaacaattggtgttcagtggagtggcagcggcaaagctgcataaaatctgtcaaagacaacacgagcagcaggtagcaaatcaattgggtgagcaatatgtaaataaggagcacccgcaacccgaagtgagccaccctaaaatgaggatgctcctggcatgggtttaccgacgtgggaaagggttaaagggcgcactgatcggggccacgtgttcccggggcttttaaggtcctgttaaagaccaattaaacgtgcttcagttcattagagcgagctgagttgtgatgcgaagcgatatgataaagcagttggtaatacgcaccgtccttgttcattcccatttgaaggcacttcttgagcctgcaggcctggcattgattccgatgagctttgtccaccacacagcgtcccgttcccgcctggcagctgaaatggtaaacagaatcgattaaaatagtgccaggacataatcaggttatcctgatgagcagctaacaagatttctagtgtcaaaaattgcaacatttgttgatttcaatggcgaacacaaaacctcagactcaggccaaccgagcggaaatccagccacaaaagcacttctgtatctgctagatacaggacctgttcctctcttccgtttcatcgacctctcgccctttgttctgtcctggtggaactttaatcaaatcagggctgagtgccatccctcccactcgaaatccatcgaaatccatgcaaccatttttagcccagtcatcgcctgcccttttgcacactaagcctgcgccaaaattcaaagatggccaacgctcctagaaatctctagccgtccatttcgtttccattttatgtgcttcgtggcgccttggtaggaaatcacttagcgaaatgtatccttgagatacagcccttgtctacgtgtgtatataaaattgaggtattttgtgtatgcaaatgttaaattttcgtaaacaaatcaagtagattggatatgtgtgaatgggcagctcattcctttggcattccaagttttgtgtctctataaaaataatcacataatattgccattgccccaaccatcaaacatccaggaatagaccatgaacgcatttgtgtatactaaaactggaaaataaaggacagactttggctttcatattctctacaaatgatatacttttaagttaaattgtcacataaaatacatttttaaagtaaatgaaaaatataagggcattttttcttagccaatgaacaacaaatgaataaaatccataaattccgtaggctattcctacaaccataacaaatcgaatatatttctagcatgtccttggaaaattcctttgaccacattcgaaagttctgattggaagcaattgattataattgaaaacggcttaatggggccaccggagacaaggatataaaaaggaccaagggccagattgactctgtcgcccatcgggaaacaagtcacgtcggtgaaaatatacactagacctgttatcccttttccatgtctggagtgtatccctcgttcactcattcccgtgcagggggagaatgttgctctatttcatcccgtagagccgcacagaaccgcccccattttttgactttgttgcgattcggcttagtcgatggacgaagatgtcgggagggcggatggatgcgggtgctgggccacatttggccaagtgttttgcgcttaagccctccatatcaatctcatgggaccaggacacggatatagagatttcgacatttgtgatttaccgagcccgctggaaagccgcagagcaaagcatgcattactgtatcataactttatgtttttgctggcattgattccgtcgttttggattatgggatttttctctctgatttaatgataattgaaaacgctcgacaaactttgattcgcgcttttgcttctcttctcttctttttttttttttttgtcagattttggaaaattcccacgtcaaaagaaaaagttttaaacgaattcactttaaattcaattacattttaagctgcaatccagagagaggggagcgaaagtaaagtggcattcgcacatgatgccattctgggcacaaagtcaacgcgagggcaaatatgcgcattcaaaagttgacgctcaaatcccaaagatttgaataattgtaatgaatttgccggagctccgtaatccgccagacgagcctccgggcacagcggcccacacccatcccggcaccacccacttttgggcaaatgttgcaacatttaatggaaatgaaatggtaatgactggatttgggagcatagttagggctacactgaaataaaactggcaccacacatttaaaattcacaaaatgggagtgtttgcaggggagtatcaatatatgtattaatggtttaaattactctttatgcctatatggcataattactttactctctatatgacgtgttaaggaagtcctttttgttatttatagtttttatttctaatttgaggtccgcaaaatatctttctgtgtgcactcaccgataaatgagtttccgccgcacgctgcgtttgaagaatccggagcagccattgcaggctaggattccgtagtgctttcccgagctggtgtcgccgcacaccacgcagatgaggcccaggttctgacccttaatccgggtcatcgatgaaccctccgccgccgacgagtggttcatggagttggctgccgcttgggctgccgccgccgcagcagctgcagcggcactgtgattccagctcagcaatcgaccattgggcacgtttggggcggcgggatgagggggcggtggctgtgtgggcggggccacgcccgttgatgtaggtggaggcgcctgtccgtgcatcggcgccggcggcggagtgtagcaatgccgctgcggactgtggagttctaaagttatgaagcagattagtgaatggtatctaagagaatcgaaattgtatctttttgttatctgggaagttactacggctttattaagatcatacagttgggtttattagctcgtatatagatcttaaaatcaacgaattgtgcaagtggttaaagcttagttggcgtttaaatattaataaatattcaaaattgtttataaaacgggaaaaatagtatacataatgtttagctaatactagcagaatgtagaaatgtaatgtataattctatacaatttccgcactgtagcttaacatttttaaacttaacgcgtaatgattgtcctttagctattcttttcatcggcatattaaatgattaatctcgttccagcataagacatttaaaattttcgaccagacttaagaccagttttcccggtggtaatgggtggtgcaataaaaaatcacttatgcagttcatataaattaaatcccaatttgtcagttgtaccggattgcggatgcaaaggacctgccgatcttatccctgcgtggcgacattgacgccctgtaatccgcaaatatatttacacattcaattagggtgccattaagccaaacggctctcgaccagagcgtgccgagcaatctgtgcgccaaatttgcctcgggggacgattgttttgccatcacaccctaatttgattgtagtttccttactgattttttgatgcacttaaccctcgacgttccaaggacgaggctgaggacacatttgtaacactcgccacttggctgtgcgctcgaccatttgggttcgtggttctggtttgcgtttgggtttgggttttgctcctgcttggcattggaatggaaagacaaagtcaggcggccattcagccgggaccaactggcaggactgcggtccaaagccggaggattagcgtcatatgcttgcattttccggggcaccggggcatctttgttaattttatgggctcgttgaaattcactttggcgcacacaaaagtgttaagggcgccgggatggctgtgttatgaatttctgacatttttggcggcctgactcggagtctaattcaatttggtgattatcgcaaattgaatttgcctggccattcgtgcatgccatcagcaagttgggcatcgatttgatttgagtgtctccgcagacaactggttcctgcaaattggtaattaaaattgccaatgtgatttccgagcagagcgatcagaatccgcttgtttcttttcatgttttagtctgggcattttacaattgatccagtcatttcaacatataaaaagttatacttcttaacattatatttaaattggtcacacagctataaaatagattttctattcaaatcgctaaacttataattgacgtataagaattcgcttaaaaaaggagtcatatctgaatatcataaaatgaattgttaaagttttttttttgctaggaactcaatccttaaaatgtgtgttagttttcgatataacattattatttcggcactaattacaactcacatttgaaacaattttttccgtcgggtaattagaatgaaaaagcttaaatttaatttatattacgatgccagtcgttttttgtaatctttgctttcacatcctttccgtttttttctttaacatatcactttttttattttcctatcttatccgtcctaattaatcgtgggtgtaagaaacgtaattatatttcacgcacaatttcccaacaaacgtgatattgtcctttttaaaatttgttggtaaaggaatttttagccaccattagggccatcttgtatatttatttttttatgtatttaagtaaggaaaccacacctttgtgtttacagcttaataaatatatttcatcaccatactcatgtttttattaacacactaatttaccttgagaagatggtcgtgtttcggaggaattttcttccttattcattttgttgagctttggcggactgcgattaaagatcacacctcgttgaaaagtttattaacaattgacactatttgtaagaatttctaaaacaccacttttaaatggcacttttcgggttcatcgcagtaggctccatattaatttgcaatcgtggagaggcgacggcaagtggacggtcctctgattcccgctgatgaaaccgaaccaatccgatccgacggcgctgcgagtgtgccgcgatgatgatgttaacgtctcgatgtacgatttcagattccggatttcagatttatcataaaagcgtgacaggagctaaacactgatgtgtccactccagcagtcggccaaccagccaacgggccaaccccggactagggggaaaaaaccatatcgcaggatataatccgcggtcgctgagtgggcagagaagtccttgccgcgcgcgtgtgtgtgtgaggacaaaaagcacggcatacactgcacacacacacacataggagcaggaagagcagagagcatcgagcagcgagcaaggagcagcgagcgaaggataaccgcacaccacccacccaccaacggagacttttagtggcaactctggtggcgcatttgcttgttggcttgctttgattcgttccttcttgatgctgcggcaggagcttgtcctcgctgttagtgttagtgtgttggtgtgcggccctgcgagtgtgggtaagccaagccgcaatcgcaatctccaataaacacccggctctgcgctctctgcgcacacacacaagcacacataccaaggcactcgaaagagcagagaacgcccggtcgccatcatgactcaaaaaagctgagcgacggcggggagcggaaacggaagtgggcgggagagcggaagtggagcagagcaatggtggcgccccaccaatacaaccatgaaacgaatgacgcagctgcgcggctggcgctcgtataatcgtcttgggttttgacattttgtttttgttttataataccctttgtgatgtcggcgctttcgagcttgcgtcgtcctgcccctcgatcctttcgctaacagtttggcccccctcttgaccctctgccaacgacgtcactcttggcctcgtattctaaccgccccctaaaagccccaacttccacccagaaattgccgccacccagtaaactgtaattgaattgaagaagaaaatgtttctgctggtgtctgtgggtgtacttggatctaaatcaagaatatttaagtgcacatataaccaaaagagttttaaattatatatatattataatatacatatattatcctaatattataatttgtttgtttttaaatatttttctaatttgatgggtgattttatttaactttaatatcacaatcatgtttcatttaccttcctgattttattgcaacaattatatatttatatatttagatatagatatttagattattatttgtacaagaaattaaagtaagaaccaaggcttgtattaaattaagttttaacgaattttaagaagcctcatagaaccagtcattcaagtttgtgaactgttcgagaaaatatgctgaagacagaatatatatgctcagaagtgggtttttatattttaaaaagtataaccttaaaatatttataatgtcaaacttaatgtaatgtgtaaagatgttctatctaatggtctacgtagtcttatttatgcatacacatttttatttactctctatacattataattttatggataagagagccagagctagaggtggtcccgggtccactaatccaataatcgataaatgctgctcgcag

SEQ ID NO: 24899 - DNA, 1599 bp, DROSOPHILA
atggcgaccgggcgttctctgctctttcgagtgccttggtatgtgtgcttgtgtgtgtgcgcagagagcgcagagccgggtgtttattggagattgcgattgcggcttggcttacccacactcgcagggccgcacaccaacacactaacactaacagcgaggacaagctcctgccgcagcatcaagaaggaacgaatcaaagcaagccaacaagcaaatgcgccaccagagttgccactaaaagtctccgttgacgttaacatcatcatcgcggcacactcgcagcgccgtcggatcggattggttcggtttcatcagcgggaatcagaggaccgtccacttgccgtcgcctctccacgattgcaaattaatatggagcctactgcgatgaacccgaaaaaactccacagtccgcagcggcattgctacactccgccgccggcgccgatgcacggacaggcgcctccacctacatcaacgggcgtggccccgcccacacagccaccgccccctcatcccgccgccccaaacgtgcccaatggtcgattgctgagctggaatcacagtgccgctgcagctgctgcggcggcggcagcccaagcggcagccaactccatgaaccactcgtcggcggcggagggttcatcgatgacccggattaagggtcagaacctgggcctcatctgcgtggtgtgcggcgacaccagctcgggaaagcactacggaatcctagcctgcaatggctgctccggattcttcaaacgcagcgtgcggcggaaactcatttatcgctgccaggcgggaacgggacgctgtgtggtggacaaagctcatcggaatcaatgccaggcctgcaggctcaagaagtgccttcaaatgggaatgaacaaggacgacgactccatagatgtaaccaacgacaacgaggagccgcatgcagtcagcagatcggattcgagtttcattatgccgcagttcatgtcgcccaatctgtacacccatcaacacgaaacagtttacgagacaagtgcccggctgctcttcatggccgtcaagtgggccaagaacctgcccagctttgcaagactttcctttcgggatcaggtaattttgctggaggagtcctggtcggagctgttcctgctgaacgcaatccaatggtgcattcccctggatcccaccggctgcgccctcttctcggtggcggagcactgcaataatctagagaacaatgccaatggcgacacttgcataacaaaggaggagctggcggcggatgtgcgaacgctccacgagatcttctgcaaatacaaggcggtgctggtggaccccgctgaattcgcgtgcctcaaggcgatagttctcttccggccggaaacgcgcggacttaaagatccggcgcagatagagaatcttcaggatcaggcgcaccacacaaagacgcagttcaccgcccagatagccagattcggacgactccttctcatgctgccgttgctgcgcatgatcagctcccacaagattgagtccatctattttcagcgcactattgggaacacgcccatggaaaaggtgctctgtgacatgtataagaactag

SEQ ID NO: 24900 - protein, 532 aa, DROSOPHILA
MATGRSLLFRVPWYVCLCVCAESAEPGVYWRLRLRLGLPTLAGPHTNTLTLTARTSSCRSIKKERIKASQQANAPPELPLKVSVDVNIIIAAHSQRRRIGLVRFHQRESEDRPLAVASPRLQINMEPTAMNPKKLHSPQRHCYTPPPAPMHGQAPPPTSTGVAPPTQPPPPHPAAPNVPNGRLLSWNHSAAAAAAAAAAQAAANSMNHSSAAEGSSMTRIKGQNLGLICVVCGDTSSGKHYGILACNGCSGFFKRSVRRKLIYRCQAGTGRCVVDKAHRNQCQACRLKKCLQMGMNKDDDSIDVTNDNEEPHAVSRSDSSFIMPQFMSPNLYTHQHETVYETSARLLFMAVKWAKNLPSFARLSFRDQVILLEESWSELFLLNAIQWCIPLDPTGCALFSVAEHCNNLENNANGDTCITKEELAADVRTLHEIFCKYKAVLVDPAEFACLKAIVLFRPETRGLKDPAQIENLQDQAHHTKTQFTAQIARFGRLLLMLPLLRMISSHKIESIYFQRTIGNTPMEKVLCDMYKN

SEQ ID NO: 24901 - DNA, 6225 bp, DROSOPHILA
agcacattcgttttcctctttaaataaggagaatccacttaaagaaatctgataatcgctgcatattgtgctatttattttatgttaaaaaagtatattcgcaagagcataaaaacaatctgatcgggttaatcttaactttttcgctgctccattctcattgattactacagcacaaaaaaaaagtggggaaagcgtggaatcctaactagaagaacggaagatagaataatggataaaaaacaaaggggcagggcagcaaaaacttaaatcattggcaaatacctttttacgatgcggattttaatcaaagtttttgccaccgctgtcagtttcttttttttacttaaaatggtaataaaaaaaaaaggggaaacgacgataaataaacattttaaaataattgctaacggcgtgttgttgcgctttagtgaacttattagtctaccctcgcaccggccaatttccacaattgattagtttaaaattgcattttttggacatttaaatgggaatctaattgattgccatttttattgagagcacttaacactatacaatggcaggttttgtatttaagctatatattcctcgtttatacagtgtcaaattaattattgattttataagcagctaagaaaatgattgtttaatttggaccgattgatcatcgaggacttaaaatggacttaaaataattggatattagcaactttgaaaagatcccgtttactcccaaaacttcagaatcaacccacgaacttctttaagccagtgtgaccccacccgctctttagctctctttcgctccatctcgcttccgcacatcgattggcgaaagcttcgctcgcactcgatatcagctcacaacttcgcttgcaagctcgccgcggaaagctcgcgatcacacgggtcgaaatcgaaatcgaatcgcggtagagagcttttcgaagtgcgagcgtcgacgttttatttctgcggctcagtcggttttagttcgttctgttggagaaaagcagcaatcacacgttcgcaaggtgaacgcgaagacacagcaaagtaagcccttcccccccaccaacacacacacccacccaaagcaaataagtaacaataaataatggaatggctggaagacggttctgggcgatttaaacaattagcgaaagaaagcggcattgaaatccgtcttgaattcgccccgaaaaagtgacgaagcagcgatcaaagcgcagagcgaaaacacgcacacagactgcaagtgtgttagataataagtgcagcacaagtccacacttgagtaaaataatccctaaaaaagccgaatatcaattagttttccaaggagcttgaaaaagtgcggtatgaaaacgtgaaaatttgcgcgtggaaaattattttgccttgtcagctgacccccttccccgtgttcgctccatccctgtcgcaccgcgggtcttgtgatcgccgccgctcttgcgctcgcttgctctcccatttcgaaactcgaaacagaagtgggagttattcgtattccgataatgaaaaaccaatatggagaacgagcgacgtaaaaaaggcggcccaaagatttttaccatttcccttacccacttttttttcatttgtcagctgacggcaatgacagtagtcttgtgatcaacgtcaaaagcaattgtcaaatattcgaactcgaatggagagcgagagagccagagcggagagttgctctcccactccaccctctcttgtttttctttgctgataattatgaaaacccgcatattttgaaaaacatgcatttcagttacattcctccgttgaatttgtcaacctgtggttgttttttcacagctcttattttatttatttagcgattagtttgacaaattgctctcttcgaactttcaaagctctgtcacgtgaaacgaaagctctgcttttaaagttttacgcagcataatcaaagagggggagttaaaaaaaaaataattaaatcaatcgaaattattagctgctaacctacaactttataacctataatcgaaaaatttgggagctgtgggctctacaaaaacttaacctgtaaatgtagcagatacacctgccccttgtcagctgacagagggctgagcaagaaattagtgataagaaaatgttcacctttatcttcgcccttttgcagccagcatttaacaattttcctcttctattttccctccattgcagtcgaaaaaacagaataaagcaaaatgtccaaccttaagcgtttcgatgatgaggagcgtgagtccaaatatggacgtgtcttcgctgtctccggtcctggtaagcacctaactatactgactaaccataactcatgctatctaaaagttaataaaaataagttaataatacctgtgaactggaaaccttactttgatgattagtctagaacttacacttctgtgtgaaataatggcaactttagaaatgtgtccacctatttgtgattaatattcaaacaactcaaacattttggtttcattattcaaaattaaatgtgaataattttaataattaattaattgtttctttaaacttttttctataattctaacaaaaacatcatcaagtatcattaataataaaaaattttaaaagaaaatgttcaatggaacctatcttcgtttgctgagttataaaaacttcttgaatgaaatgtagcccccctaacccgaccaaccgcttcattccagtcgtcaccgccgaggccatgtctggatcagctatgtacgagttggtccgcgtcggctactacgagctggtgggcgagatcatccgtctggagggtgacatggccaccatccaggtgtacgaggagacctctggcgtaactgtcggagatccggtgctgcgtaccggcaagcctctttccgtggagctgggacccggtatcatgggcagcatctttgacggtatccagcgtcccctgaaggacattaacgagctgaccgaatccatctacatccccaagggtgtgaacgtgcccagtttgtcccgcgtggccagctgggagttcaaccccctgaacgtcaaggtcggctcccacatcaccggaggtgacctgtacggtctggtgcatgagaacactctggtcaagcacaagatgattgtgaacccccgcgccaagggaacagtgcgctacatcgccccctccggcaactacaaggtcgacgatgtcgtcctggagaccgagttcgatggagagatcaccaagcacaccatgttgcaggtgtggccagtgcgtcagccacgtcccgtgaccgagaagctgcccgccaaccaccccctgctcaccggacagcgtgtgctcgactcgctcttcccctgtgtccagggcggtaccaccgccattcccggagctttcggttgcggcaagactgtgatctcgcaggtgagagtcccacaaattgagaatttaaggagcgatgcctcgtgtagcctccatacactcaagtttcataaaaatacaatccctaataaatcatttacttgcttgcaggctctgtccaagtactccaactccgatgtcatcatctacgtcggttgcggtgagcgtggtaacgagatgtctgaggtactgcgtgacttccccgagctgtccgtggagatcgacggtgtcaccgagtccatcatgaagcgtaccgcccttgtggccaacacctccaacatgcctgtggctgctcgtgaggcctccatctacactggtatcaccttgtccgaatacttccgtgatatgggttacaacgtgtccatgatggctgattccacctcccgttgggctgaggctcttcgtgaaatttctggtcgtctcgctgagatgcctgccgattccggctacccagcctacttgggagcccgtctggcctccttctacgagcgtgccggtcgcgttaagtgcttgggtaaccccgagcgcgagggatccgtgtccattgtcggagctgtgtctcctcctggtggtgacttctccgatcccgtgacctccgccactctgggtatcgtgcaggtgttctggggtctcgacaagaagttggcccagcgcaagcacttcccctcgatcaactggctcatctcctactcgaagtacatgcgtgctctggatgacttctatgacaagaacttccccgaattcgtgccgctgcgtaccaaggtcaaggagatcctgcaggaggaggaggatctgtctgagatcgtgcaactggtcggcaaggcctctctggccgaaaccgacaagatcacgctggaggtggccaagctgctgaaggacgatttcctgcagcagaactcctactcctcgtacgatcgcttctgccccttctacaagaccgtgggcatgttgaggaacatcatcgacttctacgacatggcccgtcactccgtggagtctacggctcagtctgagaacaagatcacctggaacgtgattcgtgaggcaatgggcaacattatgtaccagctgtcatccatgaagttcaaggtgggttaacacgcaaatttatccattgcctagacactgggtgaccacatttttcaatccatttcaggaccccgttaaggatggtgaggccaagatcaaggctgacttcgagcagctgcacgaggacctgcagcaggccttcagaaatctggaggactagagaccgcgctggccctacttttacactctaatcttatatttgttatatagttaacgtttaaaaatgaaagcagtcaaaaaccatccgaaaaagcctaatcaaacaccaacaattccgtgctgcattcgatgaaaaacaaaagtccaacaaataccacaacttcttggtgcctgcgagagatgtaaacattccggcctgcggttaatactttcccctaaccacgccccctccgccccttgaagggcaactctaggcaacagcaactacaacgtcctgctatgtacttccatttacaacaacaacaccaacatacacttgaataaaagtacacggacactggcgcacacacaacacatacataaaagacacaaatacaaatgcatgcataaatagtattattgtttaatgaatggaaattcttgtttatttgtgaaaaaagtcatgttttctccctgtttgtttgttaaatttatgtaaatatttaaagtatgaaatattaaatgtacgaataaagtgcaacaacaaatacatttaatgtaattgaaagtgaatttcactggcagcagaatggatattaaaaatgtgtcaactcgataaaaagataataagttaaaatatttttttgaattttaaaccttcattatataaacatacttgactatatgaaagctaagaaaatgggaatatattgaaaagcataatctaaaatcctatatcattctcagtcatcaccttagtctttccataaacttctgccccatttattttatttatttgacaatattagtaaaaattgtaccaagtgaaaaaattgtatatatttaaaccaaatggaaaagaagtcctgggttgcaccgcttacctcgttcaccaacagtaacgcaagtaacgaagacagagcccgcaactcgggatcgttaaaccaagatggggagccaaggtccgtgcctcacccaacggttccggctaagaagtgcacatgtccaacctgcgcttgccaacgtaatgaccataaatccaatccggtaccccctccccctcaatcacgcaagcctgtagccgagccggaaagtccccatgatacagtcaatgacgaggacagtttgaaggacttgagacgttcgacggaccaatcccacaagagcgctcacatcgccttggagaagaatgaggactcgggttttgtgatcgagcaggtggttgatacgcacaaatattcgtcggatgaagaagaggaggaggcgacgatgggtcgcattttcggagtctccggtccggtggtcaatgccgaggagatggccggcgcagccatgtacgagctggttcgcgttggacactcccagcttgttggtgagatcattcgactggagggtgatatggccaccattcaggtttacgaggatacttcgggtgtgagcgtgggtgatcccgtctaccagacgggaaagccgctctccgtggaattgggacccggcatcatgggcagcattttcgatggtatccagcgaccattgaggtccatcagtgaactaaccaactc

SEQ ID NO: 24902 - DNA, 2445 bp, DROSOPHILA
ttctgttggagaaaagcagcaatcacacgttcgcaagtcgaaaaaacagaataaagcaaaatgtccaaccttaagcgtttcgatgatgaggagcgtgagtccaaatatggacgtgtcttcgctgtctccggtcctgtcgtcaccgccgaggccatgtctggatcagctatgtacgagttggtccgcgtcggctactacgagctggtgggcgagatcatccgtctggagggtgacatggccaccatccaggtgtacgaggagacctctggcgtaactgtcggagatccggtgctgcgtaccggcaagcctctttccgtggagctgggacccggtatcatgggcagcatctttgacggtatccagcgtcccctgaaggacattaacgagctgaccgaatccatctacatccccaagggtgtgaacgtgcccagtttgtcccgcgtggccagctgggagttcaaccccctgaacgtcaaggtcggctcccacatcaccggaggtgacctgtacggtctggtgcatgagaacactctggtcaagcacaagatgattgtgaacccccgcgccaagggaacagtgcgctacatcgccccctccggcaactacaaggtcgacgatgtcgtcctggagaccgagttcgatggagagatcaccaagcacaccatgttgcaggtgtggccagtgcgtcagccacgtcccgtgaccgagaagctgcccgccaaccaccccctgctcaccggacagcgtgtgctcgactcgctcttcccctgtgtccagggcggtaccaccgccattcccggagctttcggttgcggcaagactgtgatctcgcaggctctgtccaagtactccaactccgatgtcatcatctacgtcggttgcggtgagcgtggtaacgagatgtctgaggtactgcgtgacttccccgagctgtccgtggagatcgacggtgtcaccgagtccatcatgaagcgtaccgcccttgtggccaacacctccaacatgcctgtggctgctcgtgaggcctccatctacactggtatcaccttgtccgaatacttccgtgatatgggttacaacgtgtccatgatggctgattccacctcccgttgggctgaggctcttcgtgaaatttctggtcgtctcgctgagatgcctgccgattccggctacccagcctacttgggagcccgtctggcctccttctacgagcgtgccggtcgcgttaagtgcttgggtaaccccgagcgcgagggatccgtgtccattgtcggagctgtgtctcctcctggtggtgacttctccgatcccgtgacctccgccactctgggtatcgtgcaggtgttctggggtctcgacaagaagttggcccagcgcaagcacttcccctcgatcaactggctcatctcctactcgaagtacatgcgtgctctggatgacttctatgacaagaacttccccgaattcgtgccgctgcgtaccaaggtcaaggagatcctgcaggaggaggaggatctgtctgagatcgtgcaactggtcggcaaggcctctctggccgaaaccgacaagatcacgctggaggtggccaagctgctgaaggacgatttcctgcagcagaactcctactcctcgtacgatcgcttctgccccttctacaagaccgtgggcatgttgaggaacatcatcgacttctacgacatggcccgtcactccgtggagtctacggctcagtctgagaacaagatcacctggaacgtgattcgtgaggcaatgggcaacattatgtaccagctgtcatccatgaagttcaaggaccccgttaaggatggtgaggccaagatcaaggctgacttcgagcagctgcacgaggacctgcagcaggccttcagaaatctggaggactagagaccgcgctggccctacttttacactctaatcttatatttgttatatagttaacgtttaaaaatgaaagcagtcaaaaaccatccgaaaaagcctaatcaaacaccaacaattccgtgctgcattcgatgaaaaacaaaagtccaacaaataccacaacttcttggtgcctgcgagagatgtaaacattccggcctgcggttaatactttcccctaaccacgccccctccgccccttgaagggcaactctaggcaacagcaactacaacgtcctgctatgtacttccatttacaacaacaacaccaacatacacttgaataaaagtacacggacactggcgcacacacaacacatacataaaagacacaaatacaaatgcatgcataaatagtattattgtttaatgaatggaaattcttgtttatttgtgaaaaaagtcatgttttctccctgtttgtttgttaaatttatgtaaatatttaaagtatgaaatattaaatgtacgaataaagtgcaacaacaaatacatttaatgtaa

SEQ ID NO: 24903 - protein, 614 aa, DROSOPHILA; identical to SEQ ID NO: 7230

SEQ ID NO: 24904 - DNA, 3892 bp, DROSOPHILA
aagcgcctactgcgatcagcctcgattttgttgtcgaactcagcctccttttcaccggatgaactggtggccgcatctgaagtcgtctcgttctggcagagttcagaatatatgtatagaagtccttagacaaagcctgctgtatattaacttaccgagttctcttcggttgcctccacggcagctgtatctgttttggacatatttgcaatgccggcgtctgtctctaaatgaacttaatttttccacaaatttcccctcgccaatcaagcgtgctgcacactggtgtcgtttaatgtgaactgaaaatcgagtgtgcaacctgttagttatactttcagtatataaataaaaggcaatttacacaaaacaatgtttgtttcgcttaaacaaattgtaaataattacatgcgattttttttaatgaatggtgggaaatctgcgcgtgctatcgctagattatgcgatgaatgcgcgaagttggctgcggcagcgacggtggcggcaaacaaatcgagaatacgaactatcgatagttttgatggattactatgaatggcagcactggccgtgtgccgttattattagttttagacaaagccgttattctgattaatcaaataggttatctttttaaattgtttgcgtttgtttaaaaattattgcctaatgtttaagtttgagatgatggaatatagcaggaatcgaaaagtctaatggggtctcataatattttagaaataagccctgtggtggaaactgaatctaaatatgacaatatgtactacatcgttttagacttgaatggctgccccaaactatatgaacaaagacaaaatctgttaaattacttagacaacccccatattaaagtatttaatagatatatcgcaagaaaccccccgaaaaagaacatttaaaatggtgctaggtgtggccaaggtcagcgcagatagaaaaactaccacccggcttatggaaaacctgtttttgcctgaagcccaatacggtcacacaaccactccatcacctcgtttcgtttgaaaaaaaaaccatccaaaatgagtaaatacgactcaaagtacctcgaggagaagctcaaacgggaactgcagacggagtacgtgagtgttacggacgaatcagacggctgtggcggcaagttcagcgccgtaatcgtatcgccagccttcagcggcaagacccttctccagaagcatagattagttaactcaacgcttgccgaagaactgaaagaaatccatgcattctcccagaaatcctacacacccgaagagtgggagaaagtgaaagcccaatagtagtaccgaataaaaaaaaaccaacaacacacatacatatacacgagcgatacaacaacagcaaacactagccgcaaaaacctgttgttcgttttgctgatggttgcgctttccgatcgaagagacgaacaagccgaaaaacgccagtcgcacaaagaaagtgaaagggaaagcacaggaatcggcagccagaaataggagttaccgaataaacaacgcaaatgatccactaaatgcataagttacataaagaaatacagccataaaagtttaactacttgtcgcaggtcgtccactcgaaaggcattagcattacaattcgaaacagctgataaaccgataaagccatagccaaacggaatacagaacacacaatacacggagatcatcaagaacaatgctcaagttccaggtccattctccgggcaaggtcatactccatggcgaacacgccgtggtctatcatcgtcccgccctcgccgccgtagtgggtttgggcactactctgagatttcggcagctggaggacagccaggtggcaagttttcaactggaggcccttaactgcacactggagatccagttgccggagttcaatggatttttggctgaatttaggagtaaatacccatcagatagcacggccaatctgttggaagccgtccgcgcagaggtgtccaaacaacttgaacgatccggaggcaatgcaccgaagcagcacacccagcgggcattcatctccatatactatttgctggccggcgctgtactctccgcacccggcgacaagaaactgacgctgcaaaccggtttccaggtgcaggtagacagccagctaaccgtgggtgcgggtttgggcagttccgcctctttcggagcagctttggccacgacatttctcattttggccggacactttgatagagacagctacttgtcggaggcaaaccaggcgttgatctcgtcctgggcttatgaatcggagcgtgttaatcatggcacgccctcgggtctggacaacactgtatgcacctacggcggaatgttgcggtatgtcaagggccagggcttccagtcgctgaagatccagaaaccactaaacatcctgctggtggacagtcgtgtgagtcgcagcaccgccgacattgtggccaaggttcgtcatctgggagatgcctttccgcagctcatcgaggccatttggcaggcttgcgaggagcttgttgccgccgccgttccactctacgaaagctttggcaacgcccaagacgatagctcgaaattcgagcaacttgaacgcctgttccagatcaacaatgatctgttgaaggctatcggagtgtcgcacccgaaactggagcaaatcttcaccatcgcttttaagcgtggcttcttttcaaagctgacgggcgccggcgcaggtggctatgtcatcgttctgcttccagagaactacgagtgcaacgaggtctactggaagcttaaagaggagctcgaatcggcgggttttggtgttcatgttacgactgccggcggcgagggattgcgcgttagttcgctggatgactgatgcggtttcgttttgtattgctattgtatgtattcgtggttttgttataaattaaagaataaagatttatacatgtattttgtacggcaatctgtttgtttatcgttgacttctgtcccgagatttgtagacaattccacgattcttcatgtcacgtaaggtagactgcggcagtgttccggatacagaaatggcatagataccacgagtaaagcgggctaaaggaaaatgatttcaaatatatcagtaatacccttttggaacggaagtcattcaggccttacacaatctttgccacttggccacccaggagtcggtgggcgtagttagggcaataattccgtcaaagttgttgctagtgtgatcatagacattgtccttgttgtttttcattcgcaggaactcctcgcagttttcacagccatcagtctcaaattgatcaaaactctgcgggcgataaatgatttcaatgaaaatgtgtgtcgagtctgggcaaaatataacccaccttcactagggagcaaacgaggcaggcgcgaagtcctcgcagatccttgggtatcgcgtcaaaggccatatttacttatcaattatgggtttaaaactaaaaatacaaaatccgtgcaaaaccaagccacgacactgacagagtgaccgtactctaaaattttcttgaatctacgatatcgatgggcgccggttacacccgacaaaaattgtcaaaagaattttcacgaagctaacctttgtattaaaacgtgttttaaaagtgtatatttccttagcagctatatgaattttaaacaaagttcaacggcttgggcagtggcttattctttttttgcttgtaataatcctctagaatttcaaaatagatcaaaaccagtcccaagtgaattcctggattggctcctgaaaagttaaatgcaattttgtaatcctgaattggaagtatgggcagagagacctcgtccaaacgaaagttacgcgcaatcaaatg

SEQ ID NO: 24905 - DNA, 1892 bp, DROSOPHILA
cccaatacggtcacacaaccactccatcacctcgtttcgtttgaaaaaaaaaccatccaaaatgagtaaatacgactcaaagtacctcgaggagaagctcaaacgggaactgcagacggagtacgtgagtgttacggacgaatcagacggctgtggcggcaagttcagcgccgtaatcgtatcgccagccttcagcggcaagacccttctccagaagcatagattagttaactcaacgcttgccgaagaactgaaagaaatccatgcattctcccagaaatcctacacacccgaagagtgggagaaagtgaaagcccaatagtagtaccgaataaaaaaaaaccaacaacacacatacatatacacgagcgatacaacaacagcaaacactagccgcaaaaacctgttgttcgttttgctgatggttgcgctttccgatcgaagagacgaacaagccgaaaaacgccagtcgcacaaagaaagtgaaagggaaagcacaggaatcggcagccagaaataggagttaccgaataaacaacgcaaatgatccactaaatgcataagttacataaagaaatacagccataaaagtttaactacttgtcgcaggtcgtccactcgaaaggcattagcattacaattcgaaacagctgataaaccgataaagccatagccaaacggaatacagaacacacaatacacggagatcatcaagaacaatgctcaagttccaggtccattctccgggcaaggtcatactccatggcgaacacgccgtggtctatcatcgtcccgccctcgccgccgtagtgggtttgggcactactctgagatttcggcagctggaggacagccaggtggcaagttttcaactggaggcccttaactgcacactggagatccagttgccggagttcaatggatttttggctgaatttaggagtaaatacccatcagatagcacggccaatctgttggaagccgtccgcgcagaggtgtccaaacaacttgaacgatccggaggcaatgcaccgaagcagcacacccagcgggcattcatctccatatactatttgctggccggcgctgtactctccgcacccggcgacaagaaactgacgctgcaaaccggtttccaggtgcaggtagacagccagctaaccgtgggtgcgggtttgggcagttccgcctctttcggagcagctttggccacgacatttctcattttggccggacactttgatagagacagctacttgtcggaggcaaaccaggcgttgatctcgtcctgggcttatgaatcggagcgtgttaatcatggcacgccctcgggtctggacaacactgtatgcacctacggcggaatgttgcggtatgtcaagggccagggcttccagtcgctgaagatccagaaaccactaaacatcctgctggtggacagtcgtgtgagtcgcagcaccgccgacattgtggccaaggttcgtcatctgggagatgcctttccgcagctcatcgaggccatttggcaggcttgcgaggagcttgttgccgccgccgttccactctacgaaagctttggcaacgcccaagacgatagctcgaaattcgagcaacttgaacgcctgttccagatcaacaatgatctgttgaaggctatcggagtgtcgcacccgaaactggagcaaatcttcaccatcgcttttaagcgtggcttcttttcaaagctgacgggcgccggcgcaggtggctatgtcatcgttctgcttccagagaactacgagtgcaacgaggtctactggaagcttaaagaggagctcgaatcggcgggttttggtgttcatgttacgactgccggcggcgagggattgcgcgttagttcgctggatgactga

SEQ ID NO: 24906 - protein, 390 aa, DROSOPHILA
MLKFQVHSPGKVILHGEHAVVYHRPALAAVVGLGTTLRFRQLEDSQVASFQLEALNCTLEIQLPEFNGFLAEFRSKYPSDSTANLLEAVRAEVSKQLERSGGNAPKQHTQRAFISIYYLLAGAVLSAPGDKKLTLQTGFQVQVDSQLTVGAGLGSSASFGAALATTFLILAGHFDRDSYLSEANQALISSWAYESERVNHGTPSGLDNTVCTYGGMLRYVKGQGFQSLKIQKPLNILLVDSRVSRSTADIVAKVRHLGDAFPQLIEAIWQACEELVAAAVPLYESFGNAQDDSSKFEQLERLFQINNDLLKAIGVSHPKLEQIFTIAFKRGFFSKLTGAGAGGYVIVLLPENYECNEVYWKLKEELESAGFGVHVTTAGGEGLRVSSLDD

SEQ ID NO: 24907 - DNA, 5988 bp, DROSOPHILA
aaaaaacaaaggggcagggcagcaaaaacttaaatcattggcaaatacctttttacgatgcggattttaatcaaagtttttgccaccgctgtcagtttcttttttttacttaaaatggtaataaaaaaaaaaggggaaacgacgataaataaacattttaaaataattgctaacggcgtgttgttgcgctttagtgaacttattagtctaccctcgcaccggccaatttccacaattgattagtttaaaattgcattttttggacatttaaatgggaatctaattgattgccatttttattgagagcacttaacactatacaatggcaggttttgtatttaagctatatattcctcgtttatacagtgtcaaattaattattgattttataagcagctaagaaaatgattgtttaatttggaccgattgatcatcgaggacttaaaatggacttaaaataattggatattagcaactttgaaaagatcccgtttactcccaaaacttcagaatcaacccacgaacttctttaagccagtgtgaccccacccgctctttagctctctttcgctccatctcgcttccgcacatcgattggcgaaagcttcgctcgcactcgatatcagctcacaacttcgcttgcaagctcgccgcggaaagctcgcgatcacacgggtcgaaatcgaaatcgaatcgcggtagagagcttttcgaagtgcgagcgtcgacgttttatttctgcggctcagtcggttttagttcgttctgttggagaaaagcagcaatcacacgttcgcaaggtgaacgcgaagacacagcaaagtaagcccttcccccccaccaacacacacacccacccaaagcaaataagtaacaataaataatggaatggctggaagacggttctgggcgatttaaacaattagcgaaagaaagcggcattgaaatccgtcttgaattcgccccgaaaaagtgacgaagcagcgatcaaagcgcagagcgaaaacacgcacacagactgcaagtgtgttagataataagtgcagcacaagtccacacttgagtaaaataatccctaaaaaagccgaatatcaattagttttccaaggagcttgaaaaagtgcggtatgaaaacgtgaaaatttgcgcgtggaaaattattttgccttgtcagctgacccccttccccgtgttcgctccatccctgtcgcaccgcgggtcttgtgatcgccgccgctcttgcgctcgcttgctctcccatttcgaaactcgaaacagaagtgggagttattcgtattccgataatgaaaaaccaatatggagaacgagcgacgtaaaaaaggcggcccaaagatttttaccatttcccttacccacttttttttcatttgtcagctgacggcaatgacagtagtcttgtgatcaacgtcaaaagcaattgtcaaatattcgaactcgaatggagagcgagagagccagagcggagagttgctctcccactccaccctctcttgtttttctttgctgataattatgaaaacccgcatattttgaaaaacatgcatttcagttacattcctccgttgaatttgtcaacctgtggttgttttttcacagctcttattttatttatttagcgattagtttgacaaattgctctcttcgaactttcaaagctctgtcacgtgaaacgaaagctctgcttttaaagttttacgcagcataatcaaagagggggagttaaaaaaaaaataattaaatcaatcgaaattattagctgctaacctacaactttataacctataatcgaaaaatttgggagctgtgggctctacaaaaacttaacctgtaaatgtagcagatacacctgccccttgtcagctgacagagggctgagcaagaaattagtgataagaaaatgttcacctttatcttcgcccttttgcagccagcatttaacaattttcctcttctattttccctccattgcagtcgaaaaaacagaataaagcaaaatgtccaaccttaagcgtttcgatgatgaggagcgtgagtccaaatatggacgtgtcttcgctgtctccggtcctggtaagcacctaactatactgactaaccataactcatgctatctaaaagttaataaaaataagttaataatacctgtgaactggaaaccttactttgatgattagtctagaacttacacttctgtgtgaaataatggcaactttagaaatgtgtccacctatttgtgattaatattcaaacaactcaaacattttggtttcattattcaaaattaaatgtgaataattttaataattaattaattgtttctttaaacttttttctataattctaacaaaaacatcatcaagtatcattaataataaaaaattttaaaagaaaatgttcaatggaacctatcttcgtttgctgagttataaaaacttcttgaatgaaatgtagcccccctaacccgaccaaccgcttcattccagtcgtcaccgccgaggccatgtctggatcagctatgtacgagttggtccgcgtcggctactacgagctggtgggcgagatcatccgtctggagggtgacatggccaccatccaggtgtacgaggagacctctggcgtaactgtcggagatccggtgctgcgtaccggcaagcctctttccgtggagctgggacccggtatcatgggcagcatctttgacggtatccagcgtcccctgaaggacattaacgagctgaccgaatccatctacatccccaagggtgtgaacgtgcccagtttgtcccgcgtggccagctgggagttcaaccccctgaacgtcaaggtcggctcccacatcaccggaggtgacctgtacggtctggtgcatgagaacactctggtcaagcacaagatgattgtgaacccccgcgccaagggaacagtgcgctacatcgccccctccggcaactacaaggtcgacgatgtcgtcctggagaccgagttcgatggagagatcaccaagcacaccatgttgcaggtgtggccagtgcgtcagccacgtcccgtgaccgagaagctgcccgccaaccaccccctgctcaccggacagcgtgtgctcgactcgctcttcccctgtgtccagggcggtaccaccgccattcccggagctttcggttgcggcaagactgtgatctcgcaggtgagagtcccacaaattgagaatttaaggagcgatgcctcgtgtagcctccatacactcaagtttcataaaaatacaatccctaataaatcatttacttgcttgcaggctctgtccaagtactccaactccgatgtcatcatctacgtcggttgcggtgagcgtggtaacgagatgtctgaggtactgcgtgacttccccgagctgtccgtggagatcgacggtgtcaccgagtccatcatgaagcgtaccgcccttgtggccaacacctccaacatgcctgtggctgctcgtgaggcctccatctacactggtatcaccttgtccgaatacttccgtgatatgggttacaacgtgtccatgatggctgattccacctcccgttgggctgaggctcttcgtgaaatttctggtcgtctcgctgagatgcctgccgattccggctacccagcctacttgggagcccgtctggcctccttctacgagcgtgccggtcgcgttaagtgcttgggtaaccccgagcgcgagggatccgtgtccattgtcggagctgtgtctcctcctggtggtgacttctccgatcccgtgacctccgccactctgggtatcgtgcaggtgttctggggtctcgacaagaagttggcccagcgcaagcacttcccctcgatcaactggctcatctcctactcgaagtacatgcgtgctctggatgacttctatgacaagaacttccccgaattcgtgccgctgcgtaccaaggtcaaggagatcctgcaggaggaggaggatctgtctgagatcgtgcaactggtcggcaaggcctctctggccgaaaccgacaagatcacgctggaggtggccaagctgctgaaggacgatttcctgcagcagaactcctactcctcgtacgatcgcttctgccccttctacaagaccgtgggcatgttgaggaacatcatcgacttctacgacatggcccgtcactccgtggagtctacggctcagtctgagaacaagatcacctggaacgtgattcgtgaggcaatgggcaacattatgtaccagctgtcatccatgaagttcaaggtgggttaacacgcaaatttatccattgcctagacactgggtgaccacatttttcaatccatttcaggaccccgttaaggatggtgaggccaagatcaaggctgacttcgagcagctgcacgaggacctgcagcaggccttcagaaatctggaggactagagaccgcgctggccctacttttacactctaatcttatatttgttatatagttaacgtttaaaaatgaaagcagtcaaaaaccatccgaaaaagcctaatcaaacaccaacaattccgtgctgcattcgatgaaaaacaaaagtccaacaaataccacaacttcttggtgcctgcgagagatgtaaacattccggcctgcggttaatactttcccctaaccacgccccctccgccccttgaagggcaactctaggcaacagcaactacaacgtcctgctatgtacttccatttacaacaacaacaccaacatacacttgaataaaagtacacggacactggcgcacacacaacacatacataaaagacacaaatacaaatgcatgcataaatagtattattgtttaatgaatggaaattcttgtttatttgtgaaaaaagtcatgttttctccctgtttgtttgttaaatttatgtaaatatttaaagtatgaaatattaaatgtacgaataaagtgcaacaacaaatacatttaatgtaattgaaagtgaatttcactggcagcagaatggatattaaaaatgtgtcaactcgataaaaagataataagttaaaatatttttttgaattttaaaccttcattatataaacatacttgactatatgaaagctaagaaaatgggaatatattgaaaagcataatctaaaatcctatatcattctcagtcatcaccttagtctttccataaacttctgccccatttattttatttatttgacaatattagtaaaaattgtaccaagtgaaaaaattgtatatatttaaaccaaatggaaaagaagtcctgggttgcaccgcttacctcgttcaccaacagtaacgcaagtaacgaagacagagcccgcaactcgggatcgttaaaccaagatggggagccaaggtccgtgcctcacccaacggttccggctaagaagtgcacatgtccaacctgcgcttgccaacgtaatgaccataaatccaatccggtaccccctccccctcaatcacgcaagcctgtagccgagccggaaagtccccatgatacagtcaatgacgaggacagtttgaaggacttgagacgttcgacggaccaatcccacaagagcgctcacatcgccttggagaagaatgaggactcgggttttgtgatcgagcaggtggttgatacgcacaaatattcgtcggatgaagaagaggaggaggcgacgatgggtcgcattttcggagtctccggtccggtggtcaatgccgaggagatggccggcgcagccatgtacgagctggttcgcgttggacactcccagcttgttggtgagatcattcgactggagggtgatatggccaccattcaggtttacgaggatacttcgggtgtgagcgtgggtgatcccgtctaccagacgggaaagccgctctccgtggaattgggacccggcatcatgggcagcattttcgatggtatccagcgaccattgaggtccatcagtgaactaaccaactc

SEQ ID NO: 24908 - DNA, 2533 bp, DROSOPHILA
cgaaaacacgcacacagactgcaagtgtgttagataataagtgcagcacaagtccacacttgagtaaaataatccctaaaaaagccgaatatcaattagttttccaaggagcttgaaaaagtgcgtcgaaaaaacagaataaagcaaaatgtccaaccttaagcgtttcgatgatgaggagcgtgagtccaaatatggacgtgtcttcgctgtctccggtcctgtcgtcaccgccgaggccatgtctggatcagctatgtacgagttggtccgcgtcggctactacgagctggtgggcgagatcatccgtctggagggtgacatggccaccatccaggtgtacgaggagacctctggcgtaactgtcggagatccggtgctgcgtaccggcaagcctctttccgtggagctgggacccggtatcatgggcagcatctttgacggtatccagcgtcccctgaaggacattaacgagctgaccgaatccatctacatccccaagggtgtgaacgtgcccagtttgtcccgcgtggccagctgggagttcaaccccctgaacgtcaaggtcggctcccacatcaccggaggtgacctgtacggtctggtgcatgagaacactctggtcaagcacaagatgattgtgaacccccgcgccaagggaacagtgcgctacatcgccccctccggcaactacaaggtcgacgatgtcgtcctggagaccgagttcgatggagagatcaccaagcacaccatgttgcaggtgtggccagtgcgtcagccacgtcccgtgaccgagaagctgcccgccaaccaccccctgctcaccggacagcgtgtgctcgactcgctcttcccctgtgtccagggcggtaccaccgccattcccggagctttcggttgcggcaagactgtgatctcgcaggctctgtccaagtactccaactccgatgtcatcatctacgtcggttgcggtgagcgtggtaacgagatgtctgaggtactgcgtgacttccccgagctgtccgtggagatcgacggtgtcaccgagtccatcatgaagcgtaccgcccttgtggccaacacctccaacatgcctgtggctgctcgtgaggcctccatctacactggtatcaccttgtccgaatacttccgtgatatgggttacaacgtgtccatgatggctgattccacctcccgttgggctgaggctcttcgtgaaatttctggtcgtctcgctgagatgcctgccgattccggctacccagcctacttgggagcccgtctggcctccttctacgagcgtgccggtcgcgttaagtgcttgggtaaccccgagcgcgagggatccgtgtccattgtcggagctgtgtctcctcctggtggtgacttctccgatcccgtgacctccgccactctgggtatcgtgcaggtgttctggggtctcgacaagaagttggcccagcgcaagcacttcccctcgatcaactggctcatctcctactcgaagtacatgcgtgctctggatgacttctatgacaagaacttccccgaattcgtgccgctgcgtaccaaggtcaaggagatcctgcaggaggaggaggatctgtctgagatcgtgcaactggtcggcaaggcctctctggccgaaaccgacaagatcacgctggaggtggccaagctgctgaaggacgatttcctgcagcagaactcctactcctcgtacgatcgcttctgccccttctacaagaccgtgggcatgttgaggaacatcatcgacttctacgacatggcccgtcactccgtggagtctacggctcagtctgagaacaagatcacctggaacgtgattcgtgaggcaatgggcaacattatgtaccagctgtcatccatgaagttcaaggaccccgttaaggatggtgaggccaagatcaaggctgacttcgagcagctgcacgaggacctgcagcaggccttcagaaatctggaggactagagaccgcgctggccctacttttacactctaatcttatatttgttatatagttaacgtttaaaaatgaaagcagtcaaaaaccatccgaaaaagcctaatcaaacaccaacaattccgtgctgcattcgatgaaaaacaaaagtccaacaaataccacaacttcttggtgcctgcgagagatgtaaacattccggcctgcggttaatactttcccctaaccacgccccctccgccccttgaagggcaactctaggcaacagcaactacaacgtcctgctatgtacttccatttacaacaacaacaccaacatacacttgaataaaagtacacggacactggcgcacacacaacacatacataaaagacacaaatacaaatgcatgcataaatagtattattgtttaatgaatggaaattcttgtttatttgtgaaaaaagtcatgttttctccctgtttgtttgttaaatttatgtaaatatttaaagtatgaaatattaaatgtacgaataaagtgcaacaacaaatacatttaatgtaa

SEQ ID NO: 24909 - protein, 614 aa, DROSOPHILA; identical to SEQ ID NO: 7230

SEQ ID NO: 24910 - DNA, 29555 bp, DROSOPHILA
tatcattcattagaggtaaaatagttttcggctattaagtaactataatgaaacttatcggaatgctgagtaaatttcaattattattatgtagtgaagtactaaagtgcgtattttaaatattgtttcagttgttatgtagttatgttctttataagttgtttataccaaatttgtttccaatattgcttaattttaatcttttaaaataattgaaaattttaacaagttcttgcttgacgcctatgaaatattagatagctgtaatattaaaataaccgtgtaacatttatttttagcttataatctttttctttttacgttttaaattaatggtttacgaagttttggtggtaattacggaaaactctagagaaataacttgatacttatggaaagccttaagtgaagatcagaacaggcctgtttggtgtagaaaagttacagaaaccgcctgaaagtatgcaacaacttccgaggattgactctagtttcgtggagtatctgtttgagcttatgttctcgtggattcattctcttgttatcaactaactaccaattgactgacagctgcttatcgaagggctgagagttgggggccagctgtttgacttattcgcgggcgaaactttaattgtttgagttgtggccacggaggccaacacttaaatgacggaaaagtgagtgaaaaacttggaaaatcaacataattatgacttgcgcattttttccctttacgagggacattaaaatgcttttaaaatgcaaaagtttttcctcaaatttcccggagtttgtaaactgaaactcaaaccgccgcccagaccgctgagaattctatgcgttactcttcacttggggcttatcgctctcgattctgttctgttattgtcgataatattgctgctatatttgcgacgctaattgacaccactcgccgtggccgagtgggaaagctctccgcggcgatggctcagtgctcgacgcagctccatgcgagccaagcgggaatcgctcgcttcgatatcggctacaccgcgaaaaaaaaaacgaatacacaaacattttaattgttcgaattcgtcaacataaagtgtatataattgtaaaacaattccagatcttcaaatattttccaattctgcaaaagcgcttaaaatatataatcatcatttctttttatgagtgttttttaaacgattcaaaaacttttcccactgtgtacgcacgtagttcgtcgagagattagatagtcgcgtgagtaatttttggagcatgtggataccccccgaattgcagagcaagtgcatctggagctgaccatgtacttcgagaccaattgggtgtttgtgagtagaccagccctgcatgggtaattgtagttaattggctctggtacggcggagaactgcattttgttgggttttcggggtctaaccggtctggtgattcgcttgacatatctgtgtttgctgtttctgttgctgttgtgatgtctccgccgttttgttgtcgttttgtgttaatcagcagctgttgactgtcaagcggagagcgagttctcaatcggaatacgcgcgcttcagtgatgccaatatagctggcatatagttggaaaaaatgcgagtaattcttattactatattcaatggaaccaaaaactataaaatgcgttgttctgataacgcacagtttgttaacaggttatttattaagcaattttcatcattgtattgtcacttcttttcgcacttttttatgacacttaaatgcttcacaatacagttgcaataataatttacaatggctttgtgtggacaaaaaacatttattgtcagaactaaaagcgtatccatgtaggggattgagcactagcaattatttaatacacaggcaacaattggtagattgttttatttttgaaccgttacattaaatacacccttggatggattgtggacacatctggcgctgagccagtgagcaaacttttgaggggggtgatccaaaaaagtcaatttcgcacttcttttgagacccagccatgcaaaagcagaccttggcaaattcgctgaatgcccccaatgccacaccatcacttcgctccttggatgtatcaccacggcgacgtcttgtggccctttttgtcgagaacgagtgtggcacttcatcagccatggcaacagccgctgcaacagcagcatcagcataagctcctggagtctctgcggcagcttcaccatcaattttccactttggaaacccgtaagtcaagagcaggtgaaacactaaaggaccaccgcccaactcccagcgctcaccacccaacacccatcacccctttttgttattcgcccagcttgcattatgcacgagcggatgagatgacggcgcttgatgtgggtattaagtgctgtttatgttgcacaacttttatcggtttcgataagacaggtggcccggcaaattgcatcctgcggctgaacattatcgagctgtggtttaatcccctaactgcgagtgcatcaatttttatgctcgattccggatggcgaacttaattggataaccgcatgttgaggccttcagtttcacaactgcattgtttctccgatttcctctgggagtttctgaacagcatattggcaaattagtttagcaatttccgtccagtgaaccacgttaaccaacaaaggtttaaaactatttgccctactcccacacatatggaaaatcattgctgcaccacaccgatgtgttaaacaaaagttaattaatgaagttgccgctgcaggactgatatttattttttttatacatcattctttcggtcgtgcatggctattagccatggctcagtcgttttgttctaccctgaccgtttaattaatttgaaatatgccacatttcggtccacatcaaccgaactgtgttttatgcccacacaaaacttttgtggctcttggcttgcgctggaggaaaagcttttattttaatagacgctgcatgaaacggtcccgaagagatgcccacatgcattcacatacatataaatgcgagcatacatataacatatatgtatgtataggtatgtatgtacgtactatatggttatgcgttatatgcccaaaggcttcgttcggctgtagatgagcataacattcttaatgcttcgctccactttttgcggctttacgtccctcgcttctattggtggctaaaagtttaattggttttcctctcgcccggagaaaatgttcgggcgcatccgtgggaactcgtagttatgagctgttaaagttttccctttcatttttattccgtttgcgaccaagtgtcagaaagcagtcggcagcacacattttaaactatttattactgaatatatttcaaattattccactgcttaaagaaataatggtcgagagtcattaaagtttaaatccaattacagataacaataatatcgtaaagatttttttattcaatttctttaaaatgaatcaccaatttgtttgttaatgaattggggcagctttccattagtgagtaatcacgatttatgacagtgcatctgggtgcatgcacttcactcttttctcgtgctgaccacttttaaatgcataaactaatttattaacactgatttttttgctattaactattcaccaagtttatgatgaaactgtgaacgtgctttgtggccattttggggcttagtccgtgctcctccattttggttttgtggcaaatatcatgaatttcatgaggcagccagtgcggtgagtgtgggtgtctgagcttatagtgccacctgtggccaccacctgcaattgccacttgccagtgtagaagtggatgctgtttcaactgcctgctcagtgcaaccagcagttgcgacagacagagtctgtgttttaccttaagctgtggttttggcatgttaaatgccagcaagaagcgtcaggtgcttttgaatagttacttctagtgcaattcactacagtcagtcggtgcatactttcaggatgagtagctgtaaccctccacaataatacttaaaaatagatttatgctggttattaacattaaattctaacattacaaccatagtttaaatcaaagcggtctggtagtaagtcaacgtagtgcgtcccccccacaaaaatgaaatgcccgttgcaacggagaagagcgattcattttatgtcacaactaattttaaaacataatatttttcttctactttcaactttgctttgcccaacacaaaccccaaacactgacacgccaatcttttcgtaactcaaaaaaaaaaaaaaaaaacaccaacgaaaacgtgaccctgtccaaatgtattttccaccttgatttggatttaatttcgttctgcgacacaatgaacaatccttgttatacattttaattattgtgctgcgatctgttaattaatctttttttgtgttttcacactctattctcccacccaccacaccacacatgaaacaacacccaaatcaaaaaaaaaatctattttaaaaacaacaatgaataatacgaaaaccacgaattgttgttcaaatatttaatgcaccatttcgtgtatctgtgtgtgtgcgtgcgttttcaaaattgcacaaataaaaaaaaaatattaaatgcgaatattgaatcatcgaaaacaacgattaccacgaccttcaaacgatgaccataaacaaatctgcaatgtgtttgtgacatgtaaacgctaaaacaacatgactattgttaaatgtaaatgtcaatacccacgtacactcacaaaacacaaaaccaaattgaaaccgaaacaatactgaaaccaaactatacgaaacccttaaagataccatggggactgaaaaaaatctgttggggtctgataaatataaccgtgcccagggtaagcaatctacattccactttaatttctatatcatttaatcgctttcgttgtacgttcacccacaattgctgttgttgattttgttttggaaattaataaacctacttgttgcattcgtattagcctactaatgtgcacctaacccataatctaagaaaatgtattttaaaacaagctagatcctgagctttaattagcagccgcgtttcatttagctgccaaaggtaattaattaagtgtactatttcaggaaatccatttactagattgagcttacagaatagacactcgatggtcgatagatttcactggcaatttcgctaattaaatggcatttgatttggaccatcatttatttagaaaatcgatttaatgaagcattaaaatttcagccagggcgaaagtgccagtgacaccaatcacaggtcttggccaaatgacaatttggcagtccacaaaagggcttttggcagtgagattttaggttgtaaagcgaatctttaagtttttagctaataaactcgaattcgctccatacttttgggtgcgatggcaaatgcaatgaaaaagcttttagacctgcaaatgaaactaggtggattacctctagctgggcttatcttatttaagagcgatctgccacccccacttccacagccgcatccactccgaaacggagatgcctttcgcagattggcctttcatactcagctcggttcaaccaaatcgcgggctgcatgtgcgtgtcagtcgagattcacctgtcgtccgattcggttgggtatgcaaatactgttgcagctgccgccgctcgcgaaacgcagcgaattcaattaattagagcacattagcggaaaatagcgtagaaagcggcaatagcatggtggttaccgactccccgctcgcccctcacaaatatgtgcgtcgaatttccaaggacttttccacagttcgcagatacagcaatacgccggctgtagtcgtcggttcgtttcgagcctccacatccgccttcattgcggccgaatcggcagcccatttgcccacttgtagctccccgactaccaggactccagtttccacgccgcgaggcattcgacggcgccagcggatgaggaaacgctcctccgtctcctcgacgctatcgaaggtccttatactcaatgtgcgtgatttgctgaaggcgcacgccggcagtgaacccctaaaggaggtaggccattcaccactttaagtggtaacctctgctaagtgaaggtaaccataccaactgcccgctaaccactgggaatcccaggagctgtttgctccctctgtgaattgatggctgggttgacgctgggtgttgccctaaagtttgccactttggctttgtttgctgcgataacaccaaagttgcagttggccaaagttttgattcggaattggaatcaattgtgcgaatgccagaggattgaagtcggcatgaaaacgtgactggatttggttcacataagccgatcaaagtgcactaagcactgccaatcatatttatagggctttgtggtagcaaataggtattgatagcaaagaggaaaaatatttagacctggcgcgaaattgttggtaaaagacgactttatcggaataaaatacaacttacatgtacttcagtttaaaattcttagaaatcagtattagttaaatatgtttaaagctaacagttctgttgagaaagtatatcattttactttgaaaaggattgaaattgcaaacaatttgtttggttgcttagttaaatagtaaaagtgggttagttcaacagttgcaaatgtaaatgtaaatatataaattaacaatacaaaaacccacgacaaccgccccatccacattgtaaatattttattctgcaaatgcgtatcttaatttgttacatttgttggttgtcaattaacaatttatttatctatatttgttttcgaattagtactgtttaaatagtgattgtattgtgtcgacgttgtttatcctgaaataataatagatatctattgaacaaatttgtacctcaattgttttttgttatttattttaagtgatttaactgtaattattgagaccttctttactttcaatccaaagtaaactcaacttttgttcgataaatattaatatttatatgtatattgcataattttgcactcttagtcctcgatatcagtcattctttgtgactctttcgctgacctgtatacttatcgaatcttttgttcacttcaagttattttccatttgctcctctagccgtattatcagtgtataaagtgtaactatgagcattaaacgcggcgatgttaaaattgtaaaaataatattttaactgatttcccttctgttcaatctagcaccagccgcgtagttggatcgagacaaatttccagaagcgcgagtgcatcaaattcataccatgcccaaaggacgatacaaagtaagtggcacataatttaatttatttgcatttcaattcatcctctgataggcagcagagggttgcgaaaaggggggggatgggggcgaaaacgaagggagttgggggtcgaagtccaagacgaaagctgttgacccagtttcgcatatcaaaatgctcaacgagatgcagtgaatcgctactggcccagttcctagatcgctgtgtatttagtttcgtttttgggcgttagcatttattgtttattatgacagccgctgtcccaagaaccagcaattgagataaatgtgccataaacccgaccgcggacccgccgcttcagatacagatgcagatacagatatagctacacactcagttgctgtttctgattcggattcacgttctggtgaaagttttccgcacggccagcactgcactggcgggacaagcgatgggtttatggcccccttgactttacatgactgggagccctgttatcagcacctggcttgccaaatatttgcccgccggtctacacttttcctcccgcgttttcacgacaaccggtagctgtcactcccgaaagcatctcaactagtagttctgcccggcgagttgaaattctgccgtagtttgcaactcaaacttggctaattaaaattaattcgccaagattgttgtttatcaggctttgaacttttacaaggtaaaattttatttataaataggaatttgctcggaaatttaatcagtacgactggatcttttggtttacaagtaattaagagctcattacataaatttcgatgaaaaattcatacatatagccaaactttatgaaacacaataattaaaacttgtttatttctttgcgagtaggttcaaagttgaacatgtgtaatctaaataaacaaattaaataaagcgctctttctgaattcgattacattagacatatgtatgtatattgacggtactttggcaaccgcaagattttaaatttgaaatttccactgtatctcttgttggaaaaagttatcctattatggcatgtctaccgcatatcactcacggcaagtggaatgagccacagacacgtgtcgattaatttggttatttaattccattcaaaccgattcaaaccgagacgcagcctgtgttcggggatctaattgaaatgcattatttagcaaacaactttaagcacctgacaagaacatcagctggcaaacagcaaacagacagacagtcggtcggtcggtgggttggatcgggtcagacaggttattggctgcctcttcggttgggtctgccacacatatgtatgtattttttggggctacgaagtcaacactcacgcacacggggggcgtaaataacgctttatgcttcacgtgggcatcgcaaacaaagtgacaggttaaggctgatgcgtgtattattctcgggggggcgtggcactatggctgttgtttgccgaatatcgtttacacccacatatcctgacagtcagtcaacacactcgatggccatgattatgtgggccaggaggcacctgcagatagatttcttgcaacttaaggtggaacgtaaaaaatagtgccttcctcatttgttaaagggaagtctacgacatatatcaatttttaaatttttcttaaattaaataatcatttttaaaaagtataaaaagaaattcatagaagtttcttattaattccatgggaattggaggcaaacatttttgtgttattacatttttggtaaattagaaattttggcgaagtagagtgatgttataaaaggtccatgctgcatttaacccttaaaatgtggatgttatttaataataaagcgatattcatttgggtgaattttctatttgcagatgctgctgtggccaggcccagatcacgcatcagacgatacctggcatcgagagtgggtcgcccggagacctctggctgcccaccaagcacacccgcccacagcccacagatgcctatggaaccatcgagttccagggcggcgctcatcccacaaaggcacaggtaggaccttcccatccggggcaatctctgttagtgtgctctttaataacttttgcccgccttttccagtacgttcgcctgtcgttcgacacgcggccggaactactggtgcagctattcaccaaggaatggaatctggaattgccaaaacttttgatcaccgtgcagggcggcaaggccaactttgatttgcaggccaagctgaaaaaggtgaggaaaatggcgggtggcgggtgttggggtaaactttcggtcccaaaacagagccaattgcaaaacgaaagtggaagaagggtcgtgtgtcacacactaattgaatggccgtggcctcctgaaagcgaaactggaaactgatttctattcgattcgcaggagatacgcaaaggactgctgaaggcggcgaagaccactggagcctggatattcaccggcggcaccaacaccggtaagcattccgtttcatttaagttttatgaaaggacactacccggttttatggccaacgattacgggcgggccaacttaaataagcacaaagaaaaatgagcaaggaaaacaaacaaacaaacagccaaccaaatgggggccggaaaaacttaaagaggaaaatgaggcgagccgagtgcggatgagcgaccccagtcgaaaattaaataaataaaatcccaaacggaaatcacgcagccagtgattgtacacacttcaactgcttgccagtcaacatattgtgctacccagtggccctttgctcggggtatatcgggattgcagggtagagtgggtgtgagagtgggtgcaattggtagcccaaataaattggattatcaagtcagcaagggtgggcatactaagtacattggggtagcgccggaaaattgacctaatatgcactggctgctggttccctttttatggatttaaccttgattcgattcctgaaaaagtaccctataaaatgtgtatattcgtaatgaaatcgttcgatataaatgtaattaaatcggtggaaaacgcgatgagtttcatgacgtttgagaaaaactgtgacattttttcaaagctcaatatctgcaaacgttgtatttgaatatgtttttattttattttcttcattcggcatgcaaaaaaatagtccgacttttttttttttgatacaacaatagtgaacaaataaagaaaagcaatgcttcttattttgtttggatagaagcgcatactaaagtcgcatcgagatgctgtatactttattacatttttcattcgaatgcttttcgtcctttttttgtcgtccgggttttgtgctcgagctgttattaagttttagacacgcccctcaactaagttataaaatactgaaactggaaaggtcgcgtgggcgggcgagactatcgcaatcctccgtgggggcaaacttgtttacgcacttgctcaacgtggccattgttgtacttcctccgcttctcggcaaacaggcgtcaccaagcaagtgggcgatgccctgctcctggagggtcagcagcggacaggacgagtggtcagcatcggcatcgctccctggggcatcgtggagcgcaatcacgagctgctgggccacaaccgcgaagtgccctgccacagcattagttcgcccaggtgagtacgtggggcgatggagttaatgcatattttatggacccaatcagggcaacaagttaaatgggcctgggcctgctttaaaaatgcatgagtattagctgttgccattcccagtgctattaagtcgactaacctgttgcaatcgttgcaatcaccttttcgttcctttcagatccaaattggccgtgctgaacaatcggcatgcgtactttctgctggtcgacaatggcacccaggccaagtatggcgccgaattgatcctgcggcgcaaactggagaaattcatatccaacctgaagcttcatccatgtaagtcgaggacaaaagccacaatatgacagctcgacagcacaaaaggccaatcaggccacagattgaagctccttgtcatcggaggccattgagagccatttctcttcatggccaatgccgcgggctaagctccgaatggccgggatttcaatctgatgtggcgagctgctgttggtagttactattgcactcgagaaaatactaaagatatgctttttacgtattttgaatagatcggttcaaaacattaaaatagagagttgagtcaatgtttttagtgcgaaaggaattggctagaagggagcgtcaggtatttcaaaagtcaaatttttgattaatttcttgcggaatgagccaaaagtttggttgcttgtccttctaatagcatagattatgattattaaatacaagagacgaaatttgagacgaaatttgagtatttaaaggatagttattatgcgctaatacttatggttagtctcgtctattatattggcataaaccttgatgtaaccagtttcctaagacatttttaaaatttacttatacttctagcaaagaatcactggctaaaaacaaacggtatacagaaattcgtttcattttgctcgacttaagctttcgatcatctttcgaacacatttacttcgaggaaaactagttcattctaatttgaatcaattaatttaaattatactataatttttagtttagtcgaaggataatttgtagtgcacaaaacgttttccttccttctagtgaacagatataattttattcgtatctcgacatacaatctttcgattttgtttacaaacacacatttccgttgagtgtactgacaccaggtgacgagtctcaatcgacctgttgaatcctcaatagcggcctgcaccctgtgaatcagactaatccccgttgcatgtccccaatggatagcccgactcaaatctttacctcttgtgccattctcccgtagtcacacattccagtacgcccgtcgtctgcctggtgatcgagggcggcaccaacacgatacgtgcggtgctcgagtacgtgacggattcgccgccggttccggtggtcgtatgtgacggatccgggcgtgccgccgacctgctggcctttgtccacaagtaagtagatgtgaatgcagatagtcggggtgcttagctttaagatacgagcatgtgcgccacttgtccggaattaaagcctgtgccgaagcaacttaatgagaaaccgcagtttgtgtaaacttaattaagaacatgtcggcgtgtcctttcaaccagcgaacgcctgttggcacgcgacatttggcaaattatttaaatttactcaacgccaccaccttcaccacacacacacacaaagggtctggggcacatccaatcctccggcgaacctttttgtctgccacatttaattttgttgtttaattagtctgaataattgggcacactcttgtgttgggacaatgctgtatctgacaacatttatatgcagatatgcttcggatggcgaggagcagccggtactggagtccatgcgggactatctcatcgggaccatacagaagacctttgaagtgggactggaccaatccgagaagctctaccaggagttgctgcagtgcacacggaacaagaatctggtgagcagagtgggcaattatttaagtatgtatgttaataaagtcatgcgaagttccctcagagtgcaaatctcgtaattaatagtaaagttgtgtgggaaaacgatgtcattaaatgattaggtaattaacaataagctaatggcatttctttgtccccatttcttgctacattttaatttcattaaagttccggtggaaaggaattaaatgcgctgtaaataaggggccccaatgagtttaagagacacttgaaaagtttataaaaagtatgctacaggtggaacatgtgcataatgtattctgtctaactttcccctgaagtgcaataataactcattaaatatttatatgtacatttccatgtcccagtgtagttacacctgcagcaggtgaagaaagtcgccccaggtgatttttccatggttttatttataggtatgagcccatcaattaaaatcgcataacccaaaggggctttgctcaattaagttgcccaaagatgattgaggcttcaaataaaccggggtgtgagggtaacttttcaatcacttgagacttttactcgcagcgatttaaatttttaattaatgctcgcagacccgttgaaataattaggctgcgaaattcaattgaacgtgtaatgaattttaaatcaccgcgagcagcagcagacagtttcctgcgagtgccagtatttttgtgggccaaaagagaccggcatttcgtcaattccgccgcagatgttattacggatttaattggtttttgaatgagcttgacggcaacggtggcaggatctagtatgtccttgccccgggggccaggcctaagcaaacaaattatgttcgacgggagctacattaatagatactttgcgttttttacgtatatatgtatacatttttttattttcaatttcttcgctagattaccgtctttcgcatacaggaaaagcccgagggcgaggcgcaggaactggatcagaccatcctaacggccctcttcaagtcacagcatctaagtccgccggagcaattgagtctcgccctgacgtggaatcgggtggacatagcgcgcagtgagatattcgtctacgggcaggaatggccaaatggtgggtgatgacctggtggtaaccaggggagggggggatgcctccaaccattttgcgctcgttcgaaacttacaatgtctttgcaggcgccctggacgaggccatgatgcaggcgctggagcacgatagaatcgattttgtcaaattactcctggagaatggcgtttcgatgaagaaatttttgacaataccgcgcctcgaggagctctacaataccaaacacggtccggccaacacgctggggtgagttgagcagacgacccttcatgctgaccacatacccaaatattttcctttcggcctatgtaaatttcaacattgtcctcgtgtccttctcccactccgcccacagctacatcctgcgcgatgtccgaccgcacatacccaagggctacatttacacgctccacgacatcggcttggtgatcaataaactaatgggcggcgcatatcggtgagtgcagagctatagctttttcagctgttactttttccacaagcggaaataaatgggggaaagttgtgcttgaggggaaattgataagccgctttaaaaatccacaaaaataaatggctcctgtagcaacttgagatatttctaattactctttttgcgtgtgctgcgtgtgcaaagtttcagcaataatttaaattttcttgaaatctatcactttattttcataacattttgtattttttaagagaaatgaaaaagtgtcatataaacgaagatattttttttgaaatcattgattggcaaaaaatctttaagcgtaggttgagttgattttcccattccatttaacttcggatcatttaattaagttaaaaaaatatttgcaattaataaaccacggaaaacacctcgccagttgttagccacaaagctgttgtgtttccattttaacgaaaaaggaaagcatttaccgcaatttgcctgaccaaaagtggggtaaagtcaatcctgaaggtgttgcggattaaactgaatgtttgagaaatttgttcatgaaagtgtaataagtttgcacatcaagttaccaagagcctcgttgcctggcaggcgacttttggcccgctttgtcatgttgatgctgttggtttgctggcgatgctgcagaaaggaactgaaaggatcagaatcagaaaggagcagggcgccgggtcaaagggaacagaatgccggggcagagcaaagcaccccttaattatgcagcattaatattttgccagcaaggcgaaaacgcggtggctgcttaaattcagttaacgccgctgctccaacgaccacaatgctgtttaatatcgctcacaagttgcggcagaaagtggtttgtggtttcaataaaaaacacgttggttaagcaactgaccgccttccggaatcactcaatttaattaaaaatcgtgcagaaattgttggcctaacaacttgacttgttttggttagactagcctttcagtttcagtataaagatgagaaatttaattaaaattttaaacaaaaagacggagaacatgcttgttcatttctcaattcaactagatcgtacaattctatccaaagaagtattttgtgattttaagtcaattttcattaatattcaatcagtttaaattgctcgtgtccttgccattgtatcccagtatcccaattgcttgttattttcaataaagccgttttgaaatgacctgaaacgcccttatttaccatgcgtatggaatccctacttttatttgaaccataaacaaacaaatttgacactacttgtctttgtagttctccattctgtttgttattctcggccataccagccttccagccttccgtgatttctggcctttgtgctttaatcaaaggacctgccttggccgaaagttatctgacaaatgcccatctaaatggcaaaggctatctaggcaatgagccggcgtcacaactgatgtgtttatattaaattagggttttcagattcggtccttggccttttctcggtcgactggcttacctctggtctggtttttgcctgtttcgggtgactgttgctcgccgttttcaatgtctagacttcggacatttaaatgtattgtcaatgtcgagagcaggctcagaaatttgccaacttgggcgtaattaaatgtgttaaagttttgggatttgattaacataaaattcgaataggctggtcgtgtgctggttgccttcggttcacgggggcaagtcaattgatttgccttttatttgtcataaatattttatcggcatttgtgttgatgtgctgaatttaattgtgcgctcgtaaaaccccgccaggtgcttccgaattgtggcaggcaaaataaattcgttcttgagtgtcctgaccaaaaccaaattacatttacatttcgcgatggaaatctcttgagctgctcgcaaacaaatggcgaacagctgaaaaaaagcattgaaatggagctgttttcattgttattcaagcatccctgcagcagcggatgtccatcagttcgtgggaattttttcaaaagtagatacaattggaaaaatattgaggcaaatcgtcaagaagcattagattaccgccgccggacaagagcaccaacccaatcccaactcgatttccgtactctgcctccccacagatcctattacacgcgccgcaaattccgacccatctacgccaaggttatgaacagctatgcaaatgcctgccgcaagtcgtcgacctaccaataccagcgatatgccggagccaattcactgagcctggtcaccggtctgctgcccttcacctcggaaatggccctcttcgagtttcccttcaacgagttgctggtaagcgggtttcggcacaacactcatccgtcctgttgcacatccagattgctcttttttaagatttgggccgtgctgaccaagcgacagcagatggcgctgctgatgtggacacatggcgaggaggcattggccaaatcactcgtatcctgcaaactgtacaaggccatggcacacgaagcggccgaggacgacttggacacggaaatctacgaggagttacgctcctacgccaaggagttcgagagcaaaggtaagacaatgcataaagaaatcattaaattgatttgattgcaatggaaaactattattgttatctttgttaggcaacaagctgctggactttagttaccgtcaggatgcggagaaggcgcaaagactgctaacctgtgagctacactcctggtcaaatcagagttgcctttctctggctgtggcggccaaccatcgtgccctcctcgctcatccctgtagtcaggttatcctggcggatctgtggatgggtggactgcgaacccgcaagaataccaacttcaaggtatgtcttatagaagtccaatgatcttgtggttgccttacgaatgtatgtatgttacatccaggtcattttgggtttggcgatgccattctacatcaggcagcttgacttcaagtcgaaggaggagttgcaacagatgccgcagactgaggaagagcatctggaaaaccagaacctggacaatgatgactcggatcgttcgcagccggatgccgaggtatttggccttttgttttcaataacccaaagttattttgttcatttcttactaacattcaatttaatttggtttcgttgtctatatgtgccagtcctaaatgtgtgccttatacgtttttagcgtcttcgttaagttattaaattttttctactaaccttacgtctaacctttaccattaaccactgatcaaattatcgttctgctgttcatcaatcctaaatccaaatctgtctgtttatagagcgcccttttaaaagccaaaagatccatttccttgagatataggatgggcgcgggtgctaataatcgcgacaaggtagtaacaatcaaacagatctatgccaaatacatgacttccgtttctttggtgttcaagtcgtctatatctatgtgcatacaaatacacatgtatatgttctctttgctgtctctgctctgtttctgactctatctctgtatctttgtatctgttctggttgccagatcacaaaactatatttattttactttgtttgctgtcgaaaccgaactatctgtctacactatttgtttcttacatacttgttctttggtctgtatcgttatttggtatacatgtatttataaaattggaaattacataagtgaagtgcaggaagtccacagtaattatagaattcccctgcacactacaatgctttaaaagtgtgcatcactttacatattttcccaagattatattcgcaatatcgtactactatggtgccattgaaagggattttaatgcaataaatatttatgtggctcccctgagaaaacacaaaacagcgaaaatcaatattacaagagttgctacactttttctgctccagttattttttgaagttaatgaattttcttctaagggggctttcgaataatgggtggtcactgaaaactttgtatattattgattattttggtttggtatattatttatagaacagccaatcaatcgggaccacaaacacgtgctcttttcatctccttcgatagtttagttcaactcaaagccagaacggcagactccaaaaattgggaactcatataaaattcattaaatttcgcccagttcttaatgtaattatatttctccactaaccatcatttgaatgtgtattttccaaagtgcaagctaataccagttgaaaacagctcgccctcctttaagagtgtctcaaattcaacagatgtaagttaccgaatattgcccgccctcgttacattcgagtagcttttgcctctaatgcttcccataaaagttgaaagtcctctttggtttgaattaagtgcgaatatccattagcagcgtaatgaaaatcattggcaacagccgagagctggcttaaagttaaattaagtaataatcttggcacaaacccattccaagcataatccccaagcactcgttgccaacaaaaccacatcaaatgccaccaggtctatgtcaaattgctaacagaatgaatcgagaggagccacggcacttgtgcaaatattgtttttcagttactcgggcactgcacaagctccggctccattgccacccacttttttttattggaataagctaatcccttaatcacgaaatcaaattaaagtccattgagtgcaagtggaaatgagggggttcatgtatttaatagtagttcgttcgccccccatgtacatacatatctgtggaatgcctgtgtatgtgtgataaagtattttcaataatgtgaacttaaaaactttcctgtaccacaaatcatctttgaaacctgtacctaaaacacacacctctacacttcttcatctgaactcaagtactatgtccaaagatcaccgttcaaatccattagaaagtaaaactaaagactgattttcatatctgataaatgcgaaaaatgtgcgtgaaccgttgcaggctctattggcggatacttactcagtgcgcgatacaaaagtacacgaaaatggcaaagtgagtagctccacaaaacaaccaaccaaccaacacaaaccagcccttcatacaccaccaccttactcgtgttttttcatcaaaatattcgactccgaatgcgataagactgccattttgctcaaccataacattttgtaaacttgaagtgacagcacagaacagaaaaagaaatgccgtttccccttgtttatttttttattttccatttggttattgtagttcgatccctaggcaaagacaccagaaaactctacatatgacaaaatggtatcacccagtcagcacatcagttatactcagacacccatctacatagcgatggttattttgcaattgaaaaccgcacacgccattctaatgtcctagttacttgtatcgtatcaattttacaggttaatctcactgctggagcggaagaacagccctccaaagttagttgaacccggatataatttgttccctcaaagatattttcatttcaatggcatttctgtaactggctttagtagttttgcctcatattattccctttggaatgcgcatttcgtagcttcatttgcgaaaatgtatgcgtagaaaatgtgtgaattcaacaatacaccttttattaaatcctcttcgaatttcctcagtagtacagttgctctatgctactttttgtcagcacatttcgaacaccccgcggctaaaacattttgatttgcataatgcttaacttaattaatttgttctgcatgttgtgtctggaaactaaacacgcgtataaatagcaatagcaaatcgagcctaaaacaccagcaacttaattagacagcaaactaaatcacatttgacacgccgattcaacggggcgtatacgcaattccccaatgtactatatccccacgtggctctctttgaatgttcactgcacattgatgatttaattaagtccgaaaactatcaagcgcctctcggctttcactttcgcccctgctggcccactaataacgtcgatatctatccacaggtctcactcaccgactcagataccgcccaattcagagagttcttcaatctttccgagtacaatgaggtgaaacagcaccagccgctgcgtctgaaaaagaagttctacgagttttacacggcacccataaccaagttctgggcggattcggtaagtggcggaaattactgtcgagctagatcagggtagcttgattcacttccgatgcaagtacactcggcgaaaaaatattaaaaacatataatatatataaattgttaatgccccgagttgtaatttccatttttggctcaataggatgggtataccataggattcaattaattttgattactaaattaccattttgttcgttcatttttccattacagattgcctatatgttctttcttataatgttctctttcactgtgctggtgaagatggaacagatgccgcggtggcaggagtggtattcaatagcatatatcacaacgctgggcttcgaaaaggtgcgcgaaataatatcctccgaaccggtggccattacgtaagtagacccctatacccgcacacctcaatcatttgtgtttaattgcatctggcgatgagtgcaaatgaagctgggcggatttcacagatgtgcgaattttcattactttatgtcttcaatatgtgcctcttacgcttgaattaacgcttcgtcgttgggcgccattaattcgaattcggcgagcaggcataaattctcggtgtgggcgtggaatatgtggaatccgtgcgacggagccgccattatactctttgtcatcggtttggcatttcgattccgggagaatacgatggacattggacgagtcatttactgtgtggacagcatatactggtacctgcgtatcctgaacatccttggcgtgaataaatacctgggtaagtctttagttcggtaaaccaaattacttagagctaaattacgcaataaataaggtttatatacatatgtggcttacaaatctctacacaatcacaattgacccttcagtacaacgatttaatagctatattcaataaataatgcgcataagtagcttttgaaacatgctatgaaatatttcaggacctctggtcactatgatgggcaaaatggtgaaaaacatgatatactttgtggttctcttggctgtcgttttgatgagttttggtgtcagcagacaagcgattctctaccccaacaaacagccgacgtggagtctcatcaaggaggtaagctaaatcgctatatacaacatgtcctgtcgactttttgtaaataaactaattccccgatctgagtgtatgtgcgtttgtcagcctcattaacacacaccggcacactcacacacagaaaaagcgagtgtgtcctttcgacgatttcaattgcagctttaactttaaatatacctaataacgatgcggagtacatacatttacttaatagcaagcaaagcaagtttttggcctgcgttcctcagtagtggtgcaagcaaatcatttttacgtacgagtagttttgtcgattggtgctccattcaacccactttacattaagtagttgactaattaaaattttatcaaaatcaccgaacaaatgccgctcaaattgactgtctcgtattatatactcttctttctttctttctgtcattctgtcatttgtcccctacatttccaactgaaatctgtcactttatcgcctaaccacctttgtcattttaatcgcataattcgcccgttaaatgtttttgaaaattgccaaaatgccaggttattgccggctcaataacggcgcccggatttttaggtgccctggggcacaatacccgttccagctatcatcgtggttatcatacaatgggtgctccaccggtgaccaccactgcagccagcaccaccaccggttccagctccacagttccggcggccacgacatctacaactgcgcccatccacaatgagcattcgaatttgacgagcggcaacttgacaaatgtaacgccatttgtgattgatgaacttggtttgctatatagaaagccgactgtagaatgccctagatgcgtctgccccaaaaaaaaaataaataaataaataaataaaaataatattcagatatatctgctgcacattggtgtggtctatagttgatgttgtgtcttgatggtgatcagtgtgtgccaagtattctatttcaatctgagttttatgtggaccccgttttcctacttttaactccgttggaagttcgactgtgtccctaaaatttgtatatctgtatatcttttgctctctcctctgtctcttgatccctaaagcctacttctgctccgaaatctcgcatcccaactttcccttgtagactcttgcaaaggaaactgctaagtccgtttggaatcgcccacttaagactgtcaaacctaatccgtgttgaatttgcaagggtttggccaggttcggcgagccgagactccactctttctttccggtccaatgcattattttcaatccgtatgttctgcatgctgtacaaactagtatttagcccagatctgtgcctctttaaggtaaatgtgtgtactctgttttcgcttttgaatatttataatgagcccttccttctctttttttaattttggcgttttctgctcgacatcttcaacgttgatttaatttcagtttttagttttgcatgcataatttaggctgcctgcaggagtgtaatgcaaatagtagccctaggtcagcaatgaatgaatgagcaaacccaggcaaacactaaagttctaattaaagagaatttgcctataatcaagctgttatatccaaatgtgattggaagacataaatataaatatttagcatgctgttttcaatttcgaacgaaattagaaatcaaataagttgcatcccaaacacacacacacaaagcacccctcacccccaaaaaccccaaccctaacacaaaaatcgtcaggtgatggctaaaaataaccaaactgtgtttcaatgtgtaatacttgcatttatgttgggcgtcgggcgaaaattgaattacgcccggccattccatgtctcgatggcgatgcccccggttccatcagatggcgctttaatggtcattctaatttatcgttctccaggtcaccttccagccctacttcatgctgtacggagaggtgttcgccggcgatatcgaccctccctgcggcgaggatcccagccagccgggctgcgtcactggtgagtacggccgtggtccagatggcgaactctgaaacatattgatgccacacttttaacaccaactaattggattacaggccattgggtaacgccgataaccatgtccatgtacctcttgattgccaatattctgctgataaatctgctcatcgctgtgttcaacaatatcttcaacgaggtcaactcggtttcgcatcaggtgagtgtgatcgaatctttgaggttttaggatttccatttccatatgccattaatatatactttttactcctaaaatattgtcataattttgtattgtatgatttggtccctttaggtgtggatgttccagcggtttaccgtagtgatggagtaccagcagaagcctgtcctgccgccgcctttcatcgcgctgtgccacttctactccctgctcaagtactgtgtgcggaaggcgaaaggtgagcccgggatgagcaagtttagctttgttccctgtgagtctatcgtgtctgatgctttgtgagccgagcagcaataatgtacaaatatctaacttttctccctgcgtgcctgccccaactgtcgactgtgtgtgcttctgtaactaactgcattacgtatacgccacctgctcttttgtattgaaatcaaccttgccacttggcgacaacaataacaacacctcctaattgggttatggggaaacgatttgcctcacttttgattccattgtgcatttctattgccccgggcgctgttgttattgttcattctcggttttcgcttgtatcctctaactcgcttgtaacatgtgtccacttgatcggcaatccgcaggattggaggtgcagcgggacaatggtctcaaactgttcctggagaaggacgacctggaacggctgtacgactttgaggaggagtgcgtcgagggattcttccacgaacaggaaatcatcctcaatcagtcgacggacgagcgggttaaaaacaccacagagcgagtggagaccatgtctcagaaaatcgaggacatcaatcagaaggaaaacatacaaacggccaccgttcaggtgcgtagtcatcactaccctcttcccacctgcttcgacatccattccaatgctgtgtttgcatttttatgcaaattttctgtgtgattcgtgttatccgaagtgacatgggttttgacagcacgattttacatttgaattgaagattggacacgtccggatggccatttactgcaggcgttgcagcttttcctagaactaacatacatgctatggaaattaaattcggtttcttaccacttttgttgtgcctttgcagaacatcgagttccgattgcgaaagatggaggaatcctcggagcagatactctcacatttggccgtcatacatcgtttcatgtcgacacacacggctggtgcggatgatttgcgcggttcgacgataaacattccgggagagatgcagcgcatgcgcaccatctcgatttcggacaccgagggcggcagcggaccaggcggaaatggaggaggcggtggtggtggtggagccatcgttccacttggtctgggtgctggtctgaatttgaattcgctccaggtgcgtttgaattacatatcgctgcaataccaagcacactgggacagaaaatgtcattctgaacttgatattcttcgatctaataaatagattgcttcgaataacaacatgctttagcttctaggctctttgacatcagtaatattatatattttgcagactctcttttaattatttttaaaccctaagtgtttttgtgaccgttttgtattattattgtggtggaatttcggttaaccctatttatttgttatttatactttgaaattatatgttaaaaatggttttgtatgaaataaattattgaaccgatgacatcctattttttttcctgtgcatacacttgtgttgaatgtatccaggtcacaacccggcgccgctttaatcgttcgcttaccgaggtccggcctgatgcctacatcttcgacgagggcacgcactttgaggtggtacctctgccggaggaaccggacgaagtggtcaagtcccgtgaggccctcaacgagcaggtggtccgcaaggcgtcgatgcagtcggaggcagactcggacatctacattcccgtgtcgcagcgtccatcgacttgtgagacggtgaagcggactccgtacgtgacggtgcgccaggatacgggtgccagcacggagagcaaggacacccttacgcccatgggcaacaacgatgacgaccagacgctcgtgggaggcgacaactcagatgacgcgacgcctgacatcaactttgagggtaattttctattcgaacagctttcactggaatgaaagtttcctgttctctgtacctgtctaagaagtatggaatcagtataaaagtatcatttttatcgcaaacagctgccagacatcgagcactgcgacagcgcacggtatctctatgccgccgcaactcggaaacgtactccttaaccggggcggacataaaccggtcacacatcagcctcaaccagcttgcctcgttgtcccgccgccagatgagcctcacgcaatccgaaccggacagcgacaaagatgcgccaatagcccagggttctgcacatccgggtaagaatacatcgaaggatgaaaaccataccggcctcagatctgcgctcaaaattcaggctactaatcccgtcactccattccacctaatcaaaaaaaaaaaataaataaagaataccaatccaaaccaaccaatccagcaaaccgatttggccaacgaattagcactaaacccctaaccattgaccataaccgaatgaagtttttatttttgttcgttctctcgcacacatcttttctttgaacctaaccacgaactccgaactctaggtaaatcagtattgcatgcgaaaccctccagaaatatcttgctgaaactgcacagcgagtacacttcgattacggacgagctggagagcgtctgccacatgatagcatcgcctacggtatccctgccaagtaataaaggtaagccaggcccaagggctcgaggagcacatggttacgaatccgaatgagccctagtcatccgtttttgcttaccatcgaggcattcctacatccgtgagcaaagtgtgtaactaaccgggtgaatgcgcaacacccgtatcattgccttgcttccgccgccaccaaagcgaaatgatttccattacatgatttttgtattgaatttgaaaccgtactcacccttatattaactttaactgacagcatctttggaccgccccaaaaccgaaatgtcgcgggctgaggctgcggccttgctggaaaagaagcatctaaaggagtgcgaagagaacgactatatgattctggagggactgatcgagtcccgcggctcaatcgatgccagcgcccagggattcgaggtaatgaaggactgagagatctagctttttacaaaaaattcatgaacttaattccccacagattggtgtatccatagactacagccatcgctacccgctgcgccgagagaccgccgtggagctgtcaccttcgaagccttcggtagatggtgacctgatgggcggtggggaaggtggcggcgccggcggaggcgatagtagcgataccagcggggccggtagctgcggtgccatggtcggtatctcaagtggcttccagttaaagaacgagcgtccctggcagcgtaactcctcgatggagcagcaaacgtatccctcaccgttggtgccaacacgggccaccagtgacttcctcaatccgccgtatgagggccggctgttcaagaagtccagtgagagcctacagaaaaactcaagcacggagacggactactcggcgcatccgtaccgattcattaagcagagctccaacgagacgaacacttcactgacgggctcttataatgtggacactccctcgctgacggcggagccctcgttggacgctggcgactcgcattcggcgacgggaataagcatcagcgttggcgctgtgggcggcactgccacggcgcgttaccagcccatccgtaccgcctcggtaggcgctgccgatggtaggcgtttgcgggaggagagctctagttcgctggatcttagctcctcggggccagtgacgatgcaggcagcgccggcaccgccagtgcgtccgatgctgctaaagaaacagtttagcgtggaccagggtaagccgtctcagacggccgccgaggcagtgcctcagacaccggaggcggcccaggctggtcaggccaaactgatttccacgctcaagccgcagccctttgcgagcaagttgggcatgaatgtgctgaaggagagcagctctagcacggatgagtccgtcggttcgtcagccaaaagtagcaacccggcgctatccataccccagatcagcacccacctggtgcaggacgagatcgccaaactatcgtcgaacatcaagagcagcaccgaatcggaaaaggatccgccgtttaacgagacaatgtgttagcaaagtggaaggccgacgaaaatggatcgtgtgtgtcccacactgtgctcaatgggaaaactagtcataagagtggggtgataaataagttgttgaactagcgttgggatctaggaaacatatatcagagattatgcatatttattcgaggggttggcagttaagtacgtgttaatgattttgacaatacatagttcacaaattctctgtatttttatacaagtatttatttagaaagcctcattgttgttgtacactattaaggcagaagcatagaatatgtgtttttgtttaatgtcaataccaccaaaaatatgcatattgaagcgcctgagttatgcgatgcacatattcacatactcggtacttttacaaactcctagatgtagtcagccatacatattgcaacgttgcaagcaactttcacacagacatatcttaaagcaaccactctactttatccaatcctataatgagcacttacctcagctcaattagaaacctatcgcagctcaatgtactttatgcctgtccctgtcggagttccgtattgtagtctacgaggttcactacgatataagcttcttggcaatgtgtgtattattatatgtgtataacgtcttcttagatagtgaattttacttgcttataagggggaaattcgtgtgcaactgtctttttcggcggcatagatattagtgtacataaatagactaaatgttataggtatgtttaaagattgctaaaattgttcatgtttggccaatgtgtgctagtaacttaaattagatttttaaatattttcaaggattaagaataacaatgcattttaataaaatatttatgattgtacttatttatgttaagaattgtacgttatttttattgaaataaattattaacactttaaaatttaaaatgcatctcatgaactaagaaaactaactgataagattaccaatctccttttatttccatttccttgaccttcaatctacac

SEQ ID NO: 24911 - DNA, 6319 bp, DROSOPHILA
ccaagcgggaatcgctcgcttcgatatcggctacaccgcgaaaaaaaaaacgaatacacaaacattttaattgttcgaattcgtcaacataaagtgtatataattgtaaaacaattccagatcttcaaatattttccaattctgcaaaagcgcttaaaatatataatcatcatttctttttatgagtgttttttaaacgattcaaaaacttttcccactgtgtacgcacgtagttcgtcgagagattagatagtcgcgtgagtaatttttggagcatgtggataccccccgaattgcagagcaagtgcatctggagctgaccatgtacttcgagaccaattgggtgtttcaccagccgcgtagttggatcgagacaaatttccagaagcgcgagtgcatcaaattcataccatgcccaaaggacgatacaaaatgctgctgtggccaggcccagatcacgcatcagacgatacctggcatcgagagtgggtcgcccggagacctctggctgcccaccaagcacacccgcccacagcccacagatgcctatggaaccatcgagttccagggcggcgctcatcccacaaaggcacagtacgttcgcctgtcgttcgacacgcggccggaactactggtgcagctattcaccaaggaatggaatctggaattgccaaaacttttgatcaccgtgcagggcggcaaggccaactttgatttgcaggccaagctgaaaaaggagatacgcaaaggactgctgaaggcggcgaagaccactggagcctggatattcaccggcggcaccaacaccggcgtcaccaagcaagtgggcgatgccctgctcctggagggtcagcagcggacaggacgagtggtcagcatcggcatcgctccctggggcatcgtggagcgcaatcacgagctgctgggccacaaccgcgaagtgccctgccacagcattagttcgcccagatccaaattggccgtgctgaacaatcggcatgcgtactttctgctggtcgacaatggcacccaggccaagtatggcgccgaattgatcctgcggcgcaaactggagaaattcatatccaacctgaagcttcatccattcacacattccagtacgcccgtcgtctgcctggtgatcgagggcggcaccaacacgatacgtgcggtgctcgagtacgtgacggattcgccgccggttccggtggtcgtatgtgacggatccgggcgtgccgccgacctgctggcctttgtccacaaatatgcttcggatggcgaggagcagccggtactggagtccatgcgggactatctcatcgggaccatacagaagacctttgaagtgggactggaccaatccgagaagctctaccaggagttgctgcagtgcacacggaacaagaatctgattaccgtctttcgcatacaggaaaagcccgagggcgaggcgcaggaactggatcagaccatcctaacggccctcttcaagtcacagcatctaagtccgccggagcaattgagtctcgccctgacgtggaatcgggtggacatagcgcgcagtgagatattcgtctacgggcaggaatggccaaatggcgccctggacgaggccatgatgcaggcgctggagcacgatagaatcgattttgtcaaattactcctggagaatggcgtttcgatgaagaaatttttgacaataccgcgcctcgaggagctctacaataccaaacacggtccggccaacacgctgggctacatcctgcgcgatgtccgaccgcacatacccaagggctacatttacacgctccacgacatcggcttggtgatcaataaactaatgggcggcgcatatcgatcctattacacgcgccgcaaattccgacccatctacgccaaggttatgaacagctatgcaaatgcctgccgcaagtcgtcgacctaccaataccagcgatatgccggagccaattcactgagcctggtcaccggtctgctgcccttcacctcggaaatggccctcttcgagtttcccttcaacgagttgctggtaagcgggtttcggcacaacactcatccgtcctgttgcacatccagattgctcttttttaagatttgggccgtgctgaccaagcgacagcagatggcgctgctgatgtggacacatggcgaggaggcattggccaaatcactcgtatcctgcaaactgtacaaggccatggcacacgaagcggccgaggacgacttggacacggaaatctacgaggagttacgctcctacgccaaggagttcgagagcaaaggcaacaagctgctggactttagttaccgtcaggatgcggagaaggcgcaaagactgctaacctgtgagctacactcctggtcaaatcagagttgcctttctctggctgtggcggccaaccatcgtgccctcctcgctcatccctgtagtcaggttatcctggcggatctgtggatgggtggactgcgaacccgcaagaataccaacttcaaggtcattttgggtttggcgatgccattctacatcaggcagcttgacttcaagtcgaaggaggagttgcaacagatgccgcagactgaggaagagcatctggaaaaccagaacctggacaatgatgactcggatcgttcgcagccggatgccgaggtctcactcaccgactcagataccgcccaattcagagagttcttcaatctttccgagtacaatgaggtgaaacagcaccagccgctgcgtctgaaaaagaagttctacgagttttacacggcacccataaccaagttctgggcggattcgattgcctatatgttctttcttataatgttctctttcactgtgctggtgaagatggaacagatgccgcggtggcaggagtggtattcaatagcatatatcacaacgctgggcttcgaaaaggtgcgcgaaataatatcctccgaaccggtggccattacgcataaattctcggtgtgggcgtggaatatgtggaatccgtgcgacggagccgccattatactctttgtcatcggtttggcatttcgattccgggagaatacgatggacattggacgagtcatttactgtgtggacagcatatactggtacctgcgtatcctgaacatccttggcgtgaataaatacctgggacctctggtcactatgatgggcaaaatggtgaaaaacatgatatactttgtggttctcttggctgtcgttttgatgagttttggtgtcagcagacaagcgattctctaccccaacaaacagccgacgtggagtctcatcaaggaggttattgccggctcaataacggcgcccggatttttaggtgccctggggcacaatacccgttccagctatcatcgtggttatcatacaatgggtgctccaccggtgaccaccactgcagccagcaccaccaccggttccagctccacagttccggcggccacgacatctacaactgcgcccatccacaatgagcattcgaatttgacgagcggcaacttgacaaatgtcaccttccagccctacttcatgctgtacggagaggtgttcgccggcgatatcgaccctccctgcggcgaggatcccagccagccgggctgcgtcactggccattgggtaacgccgataaccatgtccatgtacctcttgattgccaatattctgctgataaatctgctcatcgctgtgttcaacaatatcttcaacgaggtcaactcggtttcgcatcaggtgtggatgttccagcggtttaccgtagtgatggagtaccagcagaagcctgtcctgccgccgcctttcatcgcgctgtgccacttctactccctgctcaagtactgtgtgcggaaggcgaaaggattggaggtgcagcgggacaatggtctcaaactgttcctggagaaggacgacctggaacggctgtacgactttgaggaggagtgcgtcgagggattcttccacgaacaggaaatcatcctcaatcagtcgacggacgagcgggttaaaaacaccacagagcgagtggagaccatgtctcagaaaatcgaggacatcaatcagaaggaaaacatacaaacggccaccgttcagaacatcgagttccgattgcgaaagatggaggaatcctcggagcagatactctcacatttggccgtcatacatcgtttcatgtcgacacacacggctggtgcggatgatttgcgcggttcgacgataaacattccgggagagatgcagcgcatgcgcaccatctcgatttcggacaccgagggcggcagcggaccaggcggaaatggaggaggcggtggtggtggtggagccatcgttccacttggtctgggtgctggtctgaatttgaattcgctccaggtcacaacccggcgccgctttaatcgttcgcttaccgaggtccggcctgatgcctacatcttcgacgagggcacgcactttgaggtggtacctctgccggaggaaccggacgaagtggtcaagtcccgtgaggccctcaacgagcaggtggtccgcaaggcgtcgatgcagtcggaggcagactcggacatctacattcccgtgtcgcagcgtccatcgacttgtgagacggtgaagcggactccgtacgtgacggtgcgccaggatacgggtgccagcacggagagcaaggacacccttacgcccatgggcaacaacgatgacgaccagacgctcgtgggaggcgacaactcagatgacgcgacgcctgacatcaactttgaggctgccagacatcgagcactgcgacagcgcacggtatctctatgccgccgcaactcggaaacgtactccttaaccggggcggacataaaccggtcacacatcagcctcaaccagcttgcctcgttgtcccgccgccagatgagcctcacgcaatccgaaccggacagcgacaaagatgcgccaatagcccagggttctgcacatccgggtaaatcagtattgcatgcgaaaccctccagaaatatcttgctgaaactgcacagcgagtacacttcgattacggacgagctggagagcgtctgccacatgatagcatcgcctacggtatccctgccaagtaataaagcatctttggaccgccccaaaaccgaaatgtcgcgggctgaggctgcggccttgctggaaaagaagcatctaaaggagtgcgaagagaacgactatatgattctggagggactgatcgagtcccgcggctcaatcgatgccagcgcccagggattcgagattggtgtatccatagactacagccatcgctacccgctgcgccgagagaccgccgtggagctgtcaccttcgaagccttcggtagatggtgacctgatgggcggtggggaaggtggcggcgccggcggaggcgatagtagcgataccagcggggccggtagctgcggtgccatggtcggtatctcaagtggcttccagttaaagaacgagcgtccctggcagcgtaactcctcgatggagcagcaaacgtatccctcaccgttggtgccaacacgggccaccagtgacttcctcaatccgccgtatgagggccggctgttcaagaagtccagtgagagcctacagaaaaactcaagcacggagacggactactcggcgcatccgtaccgattcattaagcagagctccaacgagacgaacacttcactgacgggctcttataatgtggacactccctcgctgacggcggagccctcgttggacgctggcgactcgcattcggcgacgggaataagcatcagcgttggcgctgtgggcggcactgccacggcgcgttaccagcccatccgtaccgcctcggtaggcgctgccgatggtaggcgtttgcgggaggagagctctagttcgctggatcttagctcctcggggccagtgacgatgcaggcagcgccggcaccgccagtgcgtccgatgctgctaaagaaacagtttagcgtggaccagggtaagccgtctcagacggccgccgaggcagtgcctcagacaccggaggcggcccaggctggtcaggccaaactgatttccacgctcaagccgcagccctttgcgagcaagttgggcatgaatgtgctgaaggagagcagctctagcacggatgagtccgtcggttcgtcagccaaaagtagcaacccggcgctatccataccccagatcagcacccacctggtgcaggacgagatcgccaaactatcgtcgaacatcaagagcagcaccgaatcggaaaaggatccgccgtttaacgagacaatgtgttag

SEQ ID NO: 24912 - protein, 1998 aa, DROSOPHILA
MYFETNWVFHQPRSWIETNFQKRECIKFIPCPKDDTKCCCGQAQITHQTIPGIESGSPGDLWLPTKHTRPQPTDAYGTIEFQGGAHPTKAQYVRLSFDTRPELLVQLFTKEWNLELPKLLITVQGGKANFDLQAKLKKEIRKGLLKAAKTTGAWIFTGGTNTGVTKQVGDALLLEGQQRTGRVVSIGIAPWGIVERNHELLGHNREVPCHSISSPRSKLAVLNNRHAYFLLVDNGTQAKYGAELILRRKLEKFISNLKLHPFTHSSTPVVCLVIEGGTNTIRAVLEYVTDSPPVPVVVCDGSGRAADLLAFVHKYASDGEEQPVLESMRDYLIGTIQKTFEVGLDQSEKLYQELLQCTRNKNLITVFRIQEKPEGEAQELDQTILTALFKSQHLSPPEQLSLALTWNRVDIARSEIFVYGQEWPNGALDEAMMQALEHDRIDFVKLLLENGVSMKKFLTIPRLEELYNTKHGPANTLGYILRDVRPHIPKGYIYTLHDIGLVINKLMGGAYRSYYTRRKFRPIYAKVMNSYANACRKSSTYQYQRYAGANSLSLVTGLLPFTSEMALFEFPFNELLVSGFRHNTHPSCCTSRLLFFKIWAVLTKRQQMALLMWTHGEEALAKSLVSCKLYKAMAHEAAEDDLDTEIYEELRSYAKEFESKGNKLLDFSYRQDAEKAQRLLTCELHSWSNQSCLSLAVAANHRALLAHPCSQVILADLWMGGLRTRKNTNFKVILGLAMPFYIRQLDFKSKEELQQMPQTEEEHLENQNLDNDDSDRSQPDAEVSLTDSDTAQFREFFNLSEYNEVKQHQPLRLKKKFYEFYTAPITKFWADSIAYMFFLIMFSFTVLVKMEQMPRWQEWYSIAYITTLGFEKVREIISSEPVAITHKFSVWAWNMWNPCDGAAIILFVIGLAFRFRENTMDIGRVIYCVDSIYWYLRILNILGVNKYLGPLVTMMGKMVKNMIYFVVLLAVVLMSFGVSRQAILYPNKQPTWSLIKEVIAGSITAPGFLGALGHNTRSSYHRGYHTMGAPPVTTTAASTTTGSSSTVPAATTSTTAPIHNEHSNLTSGNLTNVTFQPYFMLYGEVFAGDIDPPCGEDPSQPGCVTGHWVTPITMSMYLLIANILLINLLIAVFNNIFNEVNSVSHQVWMFQRFTVVMEYQQKPVLPPPFIALCHFYSLLKYCVRKAKGLEVQRDNGLKLFLEKDDLERLYDFEEECVEGFFHEQEIILNQSTDERVKNTTERVETMSQKIEDINQKENIQTATVQNIEFRLRKMEESSEQILSHLAVIHRFMSTHTAGADDLRGSTINIPGEMQRMRTISISDTEGGSGPGGNGGGGGGGGAIVPLGLGAGLNLNSLQVTTRRRFNRSLTEVRPDAYIFDEGTHFEVVPLPEEPDEVVKSREALNEQVVRKASMQSEADSDIYIPVSQRPSTCETVKRTPYVTVRQDTGASTESKDTLTPMGNNDDDQTLVGGDNSDDATPDINFEAARHRALRQRTVSLCRRNSETYSLTGADINRSHISLNQLASLSRRQMSLTQSEPDSDKDAPIAQGSAHPGKSVLHAKPSRNILLKLHSEYTSITDELESVCHMIASPTVSLPSNKASLDRPKTEMSRAEAAALLEKKHLKECEENDYMILEGLIESRGSIDASAQGFEIGVSIDYSHRYPLRRETAVELSPSKPSVDGDLMGGGEGGGAGGGDSSDTSGAGSCGAMVGISSGFQLKNERPWQRNSSMEQQTYPSPLVPTRATSDFLNPPYEGRLFKKSSESLQKNSSTETDYSAHPYRFIKQSSNETNTSLTGSYNVDTPSLTAEPSLDAGDSHSATGISISVGAVGGTATARYQPIRTASVGAADGRRLREESSSSLDLSSSGPVTMQAAPAPPVRPMLLKKQFSVDQGKPSQTAAEAVPQTPEAAQAGQAKLISTLKPQPFASKLGMNVLKESSSSTDESVGSSAKSSNPALSIPQISTHLVQDEIAKLSSNIKSSTESEKDPPFNETMC

SEQ ID NO: 24913 - DNA, 6130 bp, DROSOPHILA
ttcgaacttgaattaacttacagccaaagcccaccatgctgtcccagttgaacggagagcccgtggaaccgtacatgtacattcgccgagtgccactggacgtggttcccgatgacgagaaggaggccgccgcctggatgcaggacttctttgcggaaaaggacaagatcatcgacagcttccacgagaccggcagcttctttaagaattccggagtcaaggaggtgcccgagaaaatctacaagccgcgcctgagcacgctcctcaacttcttgggctgggccacctttgccgtcctgtgcattctgcactacttggtcacctcgctggttgccggcaactggtttggcttcatcacggttctttccattttgggaggatgtaagttgagaaattctagtttcgaggatatgtgcttaactttacaacttgtacttccagtctatagcctcatggaatacgctgtgaatgcttcgaagatcagcaaagcctctgcgtatggagcagctgctgccaagaaatagattttcatacctgagttttataaactctgcaacagttttggaatatacgacctatggactaataactcaactgcactgaccatagaaatattatgtacattgaatatgtacgataaaccattgtagttaactgaataaaataacattttatgcgaaattcacttacaggaactaaatgattcttagaggcaaatatttaatatgtgtttgtacatccaatcgaaaaaatttctcacaaattcacttacaagaactaaaagtttctttgaggcaaatatttaatgtgtttgtacattaaatcgaaaagatttctcagtcttctaccacttatataaacgtcgtagttacaaagtttaaacttcttgtacttttgtttttctaattagaacatgtgttgtatattttagccatttatacaataaatgctataaaattaggttatcgaatttcaaatatagatagtgatgtccaaaacgataactgcttatcgcaatcagctgagagcgcctagtgcgacccttcgtgtaagcagtgcagcaagacattcaacgttttcagccagctggattcagtattccgccgctcgtcacctgcggtcatactgattgcaacttcccaaatttcttacaataatccaatgaaaattaaaaaacatattttcgtacctttaatgcaataatatgtgcattttgaaggtgagtcagtgcagcaccagtgccaaaaattgcattaaaccaagtttgtgcgaaatccacgaagcagagtgaaaagtgaaacgtaacgaaaaaaacgttgagagagattttcgtgtagttcattgtttttcctgggggattacttggtttcaaggacctttcactggcctgtggccctacttttcgaaggtgccattccttgggttggcacaacctataggatactgcccgaaattccctttgttcgcgtctcgaaagaaagcggatgcttgatgacgttgaaagcgagttacgtttgtgtcccccataaaggcagttatgcgtgtgtgtgtgagtggctctctctctctggggtctcaaaaggaatattagcgatcctttgagcacttgaagatccgaaaaagttctccaggaagtgcaactggggtataaaaatatatagttgctatatatacatacagatatacttgcatgcgtgtacaaatgccctcgcacacaaacagcagcagacgagtgtgcgtgtgtgtctgtgtggggggagcacgcgagtgtgtgcgtgtggcgacagctgacgttgggggtaaggcaagaagaagaaaaagacgaaagcgaaactttttactgtgccacttttgatcgttgtaaaaggaaaataagactatcttgagtcacgtcactttcatcgttacatcaattcgataataacgagcatattttatgggatattagatctttacacgatttacccttttatagatcgataatttaagtatttataggtgggctctatacagatcttattgtgatagattccattaagacttatagatgtaggctgccacaagtctgtttcaaatattatacttcattctcagaaaaaactaatgttttccataaagttaaatctgataaggatatacataaattgaattacccatagagcatatgtgtgaacatttgtagcatgatttctttacccaagataagaaacattactcattcatgctatgaaattttaaaggcagtattacttccgccattcctacaatatatatgaatagaatatgtttaacaagcctgattcgggtaatttgttccgatttcaatatcaccaagattccattaaaataagattttccttaccttttggcttattttattttaattggtatttttatgtaatttacgcacagcatgccgattcaggctccctcatggacagattttctgaactgtcccatctgctgcaatgaattcgcggccagccagcgatgtccggtcagtctgggctgcgggcacaccatctgcaagctatgcctgacgaccctctacaaccggcagtgtcccttcgatcaggtgagttgaactccatttaagtattgcgccaaccctaaacgatctgccctaatctcttttctcagaccgtgattgtcagtgacatcgacaatttgcccatcaaccatgccttgctccagttggtcaaggactcggagctcctcgagctggcaccaccaccgcccagtgtgcagaagctggagccggagcaccttaagtgttaccaactgggtcagcggtgcatcgaggagctggctttgcacttgaagtccttcctcaacctgaacggaaatggcaatcttctaactcgacccatgttacggaaactggttactctggtcaactgccagctgatggaggaggagggacgggtgagagcgcttcgagcagccagatccctaggcgaacgcacagtcaccgagctgatcctgcagcaccaaaatccccagcagttgagctcaaatctgtgggctgcagtgcggacaagaggatgccagttccttggacccgccatgcaggaggaggtgctcaaactggtgctgctggccttggaggagggatcagcgctttcgcgcaaagtgctggtcatgttcgtcgtgcagcgactagagccgaagtttccccaggcctccaagacgagtatcggacatgtggtacagctgctctaccgcgccagctgcttcaaggtgtccaagcgggaggcggactcgtcgttgatgcagctcaaagaggaattccgtacgtatgacgccctacgccgggagcacgatgcccaaatcgttcagatagccaccgaggcgggtctgcgaattgcaccggaacaatggtcttccctattgtatggcgacgtgatgcataaaagccacatgcagagcatcatcgataagctgcagacgccaagctcctttgcgcaatcagtccaggaattggtcatcgccttgcagcggaccagcgatcctgcgaagctatccagtttgcatcatcatctgaagtacctggccaatattgatccctgtgcggaggttgccccgtggtcggttttggctgaggccttggatgcagtgcggcattcggtcgttggactggtgaacttccttcagcaccacggagtgcgcaaggcgcaggacggcatcagtggcggtggcagtggtgggacgaccaatagcaatccgaagtacaagatcagcttatgcagggacttgaatgtgcggcgggtgtgtccccgaggttctagctgtacctttgcccattcccaggaggaggtagaacgctatcgtgcacggaatcgaggaaaacatatgaagacaccgttggcgctgcagggacctccagcggtaggcgtaggagccataaagaaaccactaggcgagcaggagggaccgcctctaggtaacatgccacccatgttacctatgtcgcctatgcattatatgggctctcctaggggatatctggatcccagcttgggactttcgccaggtggtggtctcccgccgtcgcatcacagtcccattaccaggctcatagtgccgagccgctacgattcgcgctttagcgggtttggcggtggcacgcccaggattccttcgcccagagaataccaagccaatccggtagcgccaacgcaacgcaatgccaacccaccgaattttagtgtgaacagtaacctgcacaagggctacatgttgcccgccagcggtggagatgtcttccatctggccaatccgtgggagcaagcatacctggcacagcagcaacatcctccacagcatccccaacagcagcagccaccgtccagcaagccgaatcccagccgaccgttgtcgattttacccgcaacagctgatacctcattttttgaaaagaaaccgccgaatagtgttagcatagatctggacagggtcccggaggtcaatgtggatgcagtgcctctgttccggcgatccaacaataaccacaataacaacaatagtaactcccacaataacaacaacaacaatcatggctcatcactgctgttctggaacaatacgggtaaagattcagccaactttgtacgatcagactccatattggatgacgatgcgtccacattcgatgtgcccactggctcctccatgctgagtatctacggcccgatttgccccaagagcagtacgaccggcaactggaacaactttgatctgggatatggcggcttcaagagtgacagaaacgatagcttcaatgccaataaggtacgtgtgctggttttataaggggtgtgtggctatttatcatttatctatatattatctatttatgcaatctaaacagtttttgctcatgggtttggtatataaacctcgatagtgaataacattcattttctagctgatataactttgcaaccagtttaatcttatatttaaatatcttcccgaaaacagcagcaacagccgatgtggggcaggaaaccgcaactgatgtcggaagacagtttcgagggcggcatcgatagtggaatgatgctgcagctggagaagaatctggtggacatcgtcgatcccgatgacagtgggatcaaggtggactaggagctgcagacgggcccactcagccagaggatatttctatataggtgtttatatatagatcgaatgggcgggagagaatatgtataatgcaatcattttacacatcgttagaggtttgtaccgcacagttcaaactttgctagaatttcaaaagtaattgtagttaaatctgatccgagcgatccgttattggatcggagccaaaacaaaaaaatcaattgggttgggtaccgtctattagaatctattaaataattgtctaattagttcattgttcaaattttgtggaaatgtgttactcatgttcgtgttatgtttcagattcggggtttgtgtctagcacacatagcgaaaagtaagagcaaacaaaaataaactcaacctagattgtaaactatgtgtgtagcctagaattcagctcagactcgtagatccgtaggaaaccacaaaagaggcgaatgatcaagagtgatgaggatgcggatgagatatgcaaatgcttgttgagatcgggcaacatccagttttgtatagcagcgaagattttaaagcaattttctgagatgaaatagagatactgtgcactaattaactgaatcatgatcacaagacttcaagatctaggcagaacttatattcttatccaaaatagtgtgtttgtcatcccccctcctgattgtttgtgatcaaattttgattgattgtgtaacgctgtaaacatagatataaatttatatattttttttaattattaactatttcaaaacgctatttttatatatacaaaatcagtagggctgacaaggacctaaaaatcctatcgctctcaaaaacacaatcacacacatacaccaacacgcatacatactgagccacaaggacacgaacgatcatttgtatgtgtgtgaaatgaatgtttatatttcttaaagaaattttaataacgctattgtgcgatgttgttaactattgtactatatattattaaatttattgaaaa

SEQ ID NO: 24914 - DNA, 2680 bp, DROSOPHILA
ataactgcttatcgcaatcagctgagagcgcctagtgcgacccttcgtgtaagcagtgcagcaagacattcaacgttttcagccagctggattcagtattccgccgctcgtcacctgcggtcatactgattgcaacttcccaaatttcttacaataatccaatgaaaattaaaaaacatattttcgtacctttaatgcaataatatgtgcattttgaagcatgccgattcaggctccctcatggacagattttctgaactgtcccatctgctgcaatgaattcgcggccagccagcgatgtccggtcagtctgggctgcgggcacaccatctgcaagctatgcctgacgaccctctacaaccggcagtgtcccttcgatcagaccgtgattgtcagtgacatcgacaatttgcccatcaaccatgccttgctccagttggtcaaggactcggagctcctcgagctggcaccaccaccgcccagtgtgcagaagctggagccggagcaccttaagtgttaccaactgggtcagcggtgcatcgaggagctggctttgcacttgaagtccttcctcaacctgaacggaaatggcaatcttctaactcgacccatgttacggaaactggttactctggtcaactgccagctgatggaggaggagggacgggtgagagcgcttcgagcagccagatccctaggcgaacgcacagtcaccgagctgatcctgcagcaccaaaatccccagcagttgagctcaaatctgtgggctgcagtgcggacaagaggatgccagttccttggacccgccatgcaggaggaggtgctcaaactggtgctgctggccttggaggagggatcagcgctttcgcgcaaagtgctggtcatgttcgtcgtgcagcgactagagccgaagtttccccaggcctccaagacgagtatcggacatgtggtacagctgctctaccgcgccagctgcttcaaggtgtccaagcgggaggcggactcgtcgttgatgcagctcaaagaggaattccgtacgtatgacgccctacgccgggagcacgatgcccaaatcgttcagatagccaccgaggcgggtctgcgaattgcaccggaacaatggtcttccctattgtatggcgacgtgatgcataaaagccacatgcagagcatcatcgataagctgcagacgccaagctcctttgcgcaatcagtccaggaattggtcatcgccttgcagcggaccagcgatcctgcgaagctatccagtttgcatcatcatctgaagtacctggccaatattgatccctgtgcggaggttgccccgtggtcggttttggctgaggccttggatgcagtgcggcattcggtcgttggactggtgaacttccttcagcaccacggagtgcgcaaggcgcaggacggcatcagtggcggtggcagtggtgggacgaccaatagcaatccgaagtacaagatcagcttatgcagggacttgaatgtgcggcgggtgtgtccccgaggttctagctgtacctttgcccattcccaggaggaggtagaacgctatcgtgcacggaatcgaggaaaacatatgaagacaccgttggcgctgcagggacctccagcggtaggcgtaggagccataaagaaaccactaggcgagcaggagggaccgcctctaggtaacatgccacccatgttacctatgtcgcctatgcattatatgggctctcctaggggatatctggatcccagcttgggactttcgccaggtggtggtctcccgccgtcgcatcacagtcccattaccaggctcatagtgccgagccgctacgattcgcgctttagcgggtttggcggtggcacgcccaggattccttcgcccagagaataccaagccaatccggtagcgccaacgcaacgcaatgccaacccaccgaattttagtgtgaacagtaacctgcacaagggctacatgttgcccgccagcggtggagatgtcttccatctggccaatccgtgggagcaagcatacctggcacagcagcaacatcctccacagcatccccaacagcagcagccaccgtccagcaagccgaatcccagccgaccgttgtcgattttacccgcaacagctgatacctcattttttgaaaagaaaccgccgaatagtgttagcatagatctggacagggtcccggaggtcaatgtggatgcagtgcctctgttccggcgatccaacaataaccacaataacaacaatagtaactcccacaataacaacaacaacaatcatggctcatcactgctgttctggaacaatacgggtaaagattcagccaactttgtacgatcagactccatattggatgacgatgcgtccacattcgatgtgcccactggctcctccatgctgagtatctacggcccgatttgccccaagagcagtacgaccggcaactggaacaactttgatctgggatatggcggcttcaagagtgacagaaacgatagcttcaatgccaataagcagcaacagccgatgtggggcaggaaaccgcaactgatgtcggaagacagtttcgagggcggcatcgatagtggaatgatgctgcagctggagaagaatctggtggacatcgtcgatcccgatgacagtgggatcaaggtggactag

SEQ ID NO: 24915 - protein, 819 aa, DROSOPHILA
MPIQAPSWTDFLNCPICCNEFAASQRCPVSLGCGHTICKLCLTTLYNRQCPFDQTVIVSDIDNLPINHALLQLVKDSELLELAPPPPSVQKLEPEHLKCYQLGQRCIEELALHLKSFLNLNGNGNLLTRPMLRKLVTLVNCQLMEEEGRVRALRAARSLGERTVTELILQHQNPQQLSSNLWAAVRTRGCQFLGPAMQEEVLKLVLLALEEGSALSRKVLVMFVVQRLEPKFPQASKTSIGHVVQLLYRASCFKVSKREADSSLMQLKEEFRTYDALRREHDAQIVQIATEAGLRIAPEQWSSLLYGDVMHKSHMQSIIDKLQTPSSFAQSVQELVIALQRTSDPAKLSSLHHHLKYLANIDPCAEVAPWSVLAEALDAVRHSVVGLVNFLQHHGVRKAQDGISGGGSGGTTNSNPKYKISLCRDLNVRRVCPRGSSCTFAHSQEEVERYRARNRGKHMKTPLALQGPPAVGVGAIKKPLGEQEGPPLGNMPPMLPMSPMHYMGSPRGYLDPSLGLSPGGGLPPSHHSPITRLIVPSRYDSRFSGFGGGTPRIPSPREYQANPVAPTQRNANPPNFSVNSNLHKGYMLPASGGDVFHLANPWEQAYLAQQQHPPQHPQQQQPPSSKPNPSRPLSILPATADTSFFEKKPPNSVSIDLDRVPEVNVDAVPLFRRSNNNHNNNNSNSHNNNNNNHGSSLLFWNNTGKDSANFVRSDSILDDDASTFDVPTGSSMLSIYGPICPKSSTTGNWNNFDLGYGGFKSDRNDSFNANKQQQPMWGRKPQLMSEDSFEGGIDSGMMLQLEKNLVDIVDPDDSGIKVD

SEQ ID NO: 24916 - DNA, 2963 bp, DROSOPHILA
catcaaatgggtggatgaggtggtgctcggtgctccgtatgtgaccacactggatgtgctcgaccagaacaactgtgatttctgtgtgcatggaggtgggtaacaaatttatgcatatatctggatgttactcaatcgagtgtatttgtttgcagatgacattacaatgacagccgaaggagtggacacatatcatttggtcaaatcagccaatcgctacaagtgagtttgaaaagatatatttttaagacatgtggcagtttattaaaaagggaatgcacacacacttaccttatgtacatcttgccttaacctttaataagctgccagttgtcttgtaaagcacgtactgcacatttttccaattactgaccttaaattttcttatgcaatccgcagggaagtgaaacgcacagctggagtctcgaccactgaccttgtgggccgcatgttgctcctgacacgcaaccacttccgtcaaggatccgcggaatatgatatcgagaaagaaggtagctttagcttgttccaacgcttttctggcacattttattttcattttaatgttcctaaatcacagcgagcactgtgaatttgtgcgccaaattcattgtttctaaccattactaactttaattttaagactactttttgtttgcactctttttgtctttcatttcctgctgtcgaacttgtttattgctcttgcatgctgtgcataaatcaaagtcgatcaatcagttacaagtatgaacaatattatacagatatattcagtttatacatgggctacgcacgattagtttatgcattttccccaatagattctttttaatttgccatagttgaacgcaaataacgccttggtttatggttgccctctacaactttactatttctcttctttttatttctatgtacgcactgttaaccactatcaaaaatataatataatgtatgaaacctatgaaaactatgctaaatgttttgtgcgtgtgcgcgcccgcgaaatgaatccaaatgccgaatgcccaatgaccaacctgcaatcaaaatatccaaatccgaatccaaatcgaaatcaaatcctaaacgtaaatttttgctcttaaatacacacttttgctcatttgtctgcgttgctttacaatacaaaacaaacaaaaaaagtgtcaattttaaaacgacaaataaaatcccatccaggttcttcgaacatgggtcaagattcggcagccaaaagtccgtggaccggttgtagtcagttcttgccgactacccaaaagatcatacagttcagtgatggaaagtcaccgaatcccggcgataagattgtaagtttagccctcattatatgtatataatgtataattcataattgtcggtatttgcaggtttatgtggctggcgccttcgatctcttccatgtgggtcacctggactttctggaaaaggctaagaaactgggtgactatctgattgttggcctgcacacagatcccgtggtgaactcctacaagggcagcaactatcccattatgaatctgcacgagcgcgtgctcagtgttttggcctgcaaggtaggattgcaatagattcttttttttaaatattatctcattttaaaacttcttttttcccccagtttgtcaatgaggtagtaatcggagctccctactgtgtcactgaagagctgcttgagcacttcaaaatcgatgttgtctgtcatggacgcacacccattgcgcttgagaatggcaagatcgatccatatgccgttcccaagacgcgagccatctttgagctgatcgattccggcaacgagatgaccacggagcgcatcgtggagcgcatcatctcgcaccgactggaatatgagcgtcgcaatcaggccaaagaaaagaaggaaatcgaagcctttgaggcacttcaacgccaaaaacagacccaaaaggccggctagccggaaccagattccgacctctcacactagacggatgttttttattttctagttgcgttcttttagtttgttttatttagtttgtcttgtttagtatgtcgtcccctgatgatggcgctttaattttttgttgcgtaaaaagcgaagcgacgctgcctgaggattcagcgcaccgctctctcgatttctagtacaattttagaatatctgcacatgcgccttaatgatataaggttatacacataattatatatttctaacacattaacgtagaatatttaaaatctaaattttatgtatgtaagctcaaaatttgtaaattccctttaaagtacgatgtaagtgtgaggaacaacaaaattgtacgaatagcatgttatccaaactgttgccgaattgaaaagccttgtacgacttgtatgtatatatattcagcaacggaagtaggatgcctggatcaggaagtagctgcttttatcaaatgtaatctctgatactttgtcctaatttattaatgcatatagtaagtgcgagttcaagttttatgtttccttgtttaatcttagacttaaatacatggccaaaaatattgcgaattccaaaaaaaaaaaaaaccggaagttttatatacttgcctcgctaatcactttcagttcgacggttagcgattgctgccaaacatctaaatccattagtggccggaggtcattcaagctgatgaggatcacgttgctgtcggtcttgatgaactcactgcaggattggttcgacgacagtggcagcattggacgagcttttatctgtctggtgtagtaacgtggcaggttggcaggttggaccagcaggcgcagagtgatggccacgccgtgcaaaggagtagccacccagatggccaggacttcgtgtttgacacgcttcctttcccacagcaccgagtgcatggtgcggcaggcgaagatcataagggcgctatgctgcgagaagcggcggtactccactg

SEQ ID NO: 24917 - DNA, 838 bp, DROSOPHILA
cgcccgcgaaatgaatccaaatgccgaatgcccaatgaccaacctgcaatcaaaatatccaaatccgaatccaaatcgaaatcaaatcctaaacgtaaatttttgctcttaaatacacacttttgctcatttgtctgcgttgctttacaatacaaaacaaacaaaaaaagtgtcaattttaaaacgacaaataaaatcccatccaggttcttcgaacatgggtcaagattcggcagccaaaagtccgtggaccggttgtagtcagttcttgccgactacccaaaagatcatacagttcagtgatggaaagtcaccgaatcccggcgataagattgtttatgtggctggcgccttcgatctcttccatgtgggtcacctggactttctggaaaaggctaagaaactgggtgactatctgattgttggcctgcacacagatcccgtggtgaactcctacaagggcagcaactatcccattatgaatctgcacgagcgcgtgctcagtgttttggcctgcaagtttgtcaatgaggtagtaatcggagctccctactgtgtcactgaagagctgcttgagcacttcaaaatcgatgttgtctgtcatggacgcacacccattgcgcttgagaatggcaagatcgatccatatgccgttcccaagacgcgagccatctttgagctgatcgattccggcaacgagatgaccacggagcgcatcgtggagcgcatcatctcgcaccgactggaatatgagcgtcgcaatcaggccaaagaaaagaaggaaatcgaagcctttgaggcacttcaacgccaaaaacagacccaaaaggccggctag

SEQ ID NO: 24918 - protein, 206 aa, DROSOPHILA
MGQDSAAKSPWTGCSQFLPTTQKIIQFSDGKSPNPGDKIVYVAGAFDLFHVGHLDFLEKAKKLGDYLIVGLHTDPVVNSYKGSNYPIMNLHERVLSVLACKFVNEVVIGAPYCVTEELLEHFKIDVVCHGRTPIALENGKIDPYAVPKTRAIFELIDSGNEMTTERIVERIISHRLEYERRNQAKEKKEIEAFEALQRQKQTQKAG

SEQ ID NO: 24919 - DNA, 3697 bp, DROSOPHILA
atcgctatgcggagaccaacattaatttgcagcacctagttgtacaaatcaatcgatttagcagtcggcattttcaggagctgaccaatgacaccaagccacagaagatcctgacaggattgcaggttggagcgggctactacactccggacaactccattaatgtgatggctggcgtggtggaaccaccgatataccaacgccacctgccgatttccctgaaattcggcacattgggttttatcgttggtcatgaactcatccacggcttcgatacgaccagctcctatttcgatggcaatggtcacatggagtccttgttgtcggaaatttcgcaacaggcattagaggatcgcgccgagtgctacatggactactatggcaagtaccaggtaccggagatcagcaggcgtgtcaacggaaaaactacactggacgagaatatcgcagacaatagcggattaagacaagcattgacggcctatcgcagtcacaggcagcaactgctggagcatcctgggcaggagaggataagcgacgccatgccgggtctcgatctcacgccggaacagttgttcttcctgggatttgcccagctattttgctcccattacgaggaggagcactactggaaaggtcttagcgatgtgcacaccttcgaccaatttcgtgtcctgggagttttgtccaacagcgaggacttcttccacgcctacaactgctccgtgggcagcggcatgcgtcctggcgccaaaacgtgccgactttggtagatcatagatttataatcatcatcataaattccttgaaccaaataaaagttgatttcaatactttttaccgacaatgtaaaatgttttgacacaacacttcaaatttacgttacacgtaacaagctaacatttgtggtttgagtacaactatcgaagtttcgcaccccagagcaccgttcaaatttagtcacatctccgcagcgcgctcggtaactctgtttctcatgtcaattttgtgcatgacaattttgttcaacagaaactgcctttttttgtaaccaagtcaggctgtcagtcagaagtgttccgacttcgtaaaacataaaccaacaattcacagcaacaacataatgtcggcagcagcagggtgagtccacaaccggccatctcagtgccaatcggcgatagccggaccatctttttgtggcttctttgtgcgtcgcgtgctttgtcgttgcggcggcgtccattttcgaactcccggccgtgaaaaacacataattttcgttcggatgacccttattctcgcgctcatccgcctggccaagcgtttgtgtccacggtgggcgtgtcctgtgcgcatctgcattgcgatatttgtggaactaatcggagggtccagtgtttgaggttatgttttcggctggcggtaatgccgtgcattttcggcatggacttttgcctgggcttatggtttatgcaaatctagctagctgggaagctatttacatagttcgtgcacccgcttccagaaagtccgacgcgagttgccatggcaacggatctcgcacaacgacatgaagctcttatttatgtttatccaacttgatcctccattgcagcttgattccgcctccagtttcctgggcccagcgcaatgacttgatctacgtcatcatcgatgtcgaatgcaaggacatcgaacacaagtatatgcccccatatgtagtatgtccatgctccttgcacatcctaattccatatatttatcccaaaacagagttacggaaaaaaccttcaccttcaagggcgtaaacgtgctggatccgtcgaagaagtacgaggtcacactgaacttcctccacgaggtggatcccgagaaggtgaccagcaagaacattggccgctgcctggaattcacaatacccaagaaggcggccggtccctactggtcctcgctgaccacggacaagaccaagttgcatttcctaaaagccaactttgccaagtggcgcgatgagtccgacgacgaggagggtaagttgacatcctcatccccaagatctcatccagcaaacccactcatacaaacgcactttgcaggtgaccaaaaagacaacagcatgtttggaaatttccttaacagccctggtggcgattggaacaacaagttcgacgatttcaacgtcgatgacgaggaggaggactcggatgacaacatcccaagtctgtcccagaacgacgaggatgacgaggagggcggcgagggtgataaggagaagaagccagctgcctagacggtcgctcagatggtgtctcgcaatttggcgtagtcgtagcgttaggcgtggctcttataccataagtcagcacacgatcacaacactcactcctcacatacacaccagaaaagaaaaagaagaaacactcaatcactcataaaacatccacaaacgcatgcgtacatgaaacactattccaatcgaagaaaaccacatttaatatacctgaatattatgcgtattcagaggagagatgttaacaaaaagcaacacaaggaacaagatgatttggcgccgacaagggaaaccataagttttacgctagaatttaacaaccagaggaaagctacaaccaatttattgcaaaaatcagtttgcagtttattatttttgtttcctgtaaataaaggaaattaacaataaaaaaaatgaaaaacttatattcggctttttattttcaatattttataagtttacaacattctataaatgttctagaaatctctaaactgttaaattcggaatgcgcagtccagcttcttaaagatgtcgcaaagaaggctttatctttgaatagatagcgattttaaaaagaaattataggtaatggttaaaaattgtttatgggtaatcccctagaatttgggtttaaaattaacataggtatttttttctttaaattttgcgcccacttaaatgaattttgttatgttggcaacactgttgctgtgacaacgcgggaaagaagaagcacaattgaaatgcaaagcaaacaaacagttatcactcgaaataaaggacttgctgtcaagcgatagaacggaaaagcaaggtataagattcccctcaaaacgataccatgaaacccgctgcgattccggctagcgagcggcgtctggccttcgtggccgagtggttccatgcagaggctggaatcatacgcacctttctgatcacctactatgtatccgacaaggccgtggaagtggtgaggattggtagcacaagttcttcaaagaaacacatttaaccaaggccatgttttccctcagttcgaccagcgcaacaagcgcacatttctgcgacgcaccaagatcccggagctgacccagcgcgacttctttgtgggctccaagatcaatgtctttggccggcagtttgacattgtggattatgctgacgacactacgcggacaaacctagccaaatatcgcaagaagtatgttccttcatcgacagctatccactcgctaatctgtaattcccatctctttcaggggattcgttttgctcaagaacaatatgtggacgaagcacctgggcaagttcctaaagactctgatcgacaacaagattaacataaaccagggcatgatggttcagttctctcccaaaatggtaactcagtttctgtccggcaag

SEQ ID NO: 24920 - DNA, 1085 bp, DROSOPHILA
tcaattttgtgcatgacaattttgttcaacagaaactgcctttttttgtaaccaagtcaggctgtcagtcagaagtgttccgacttcgtaaaacataaaccaacaattcacagcaacaacataatgtcggcagcagcaggcttgattccgcctccagtttcctgggcccagcgcaatgacttgatctacgtcatcatcgatgtcgaatgcaaggacatcgaacacaaagttacggaaaaaaccttcaccttcaagggcgtaaacgtgctggatccgtcgaagaagtacgaggtcacactgaacttcctccacgaggtggatcccgagaaggtgaccagcaagaacattggccgctgcctggaattcacaatacccaagaaggcggccggtccctactggtcctcgctgaccacggacaagaccaagttgcatttcctaaaagccaactttgccaagtggcgcgatgagtccgacgacgaggagggtgaccaaaaagacaacagcatgtttggaaatttccttaacagccctggtggcgattggaacaacaagttcgacgatttcaacgtcgatgacgaggaggaggactcggatgacaacatcccaagtctgtcccagaacgacgaggatgacgaggagggcggcgagggtgataaggagaagaagccagctgcctagacggtcgctcagatggtgtctcgcaatttggcgtagtcgtagcgttaggcgtggctcttataccataagtcagcacacgatcacaacactcactcctcacatacacaccagaaaagaaaaagaagaaacactcaatcactcataaaacatccacaaacgcatgcgtacatgaaacactattccaatcgaagaaaaccacatttaatatacctgaatattatgcgtattcagaggagagatgttaacaaaaagcaacacaaggaacaagatgatttggcgccgacaagggaaaccataagttttacgctagaatttaacaaccagaggaaagctacaaccaatttattgcaaaaatcagtttgcagtttattatttttgtttcctgtaaataaaggaaattaacaata

SEQ ID NO: 24921 - protein, 184 aa, DROSOPHILA [sequence omitted]

SEQ ID NO: 24922 - DNA, 5704 bp, DROSOPHILA
aggcccatcatattaagtgggtattttaatcttttaattgtatagatttggcatagaatttgtgcaaaactcgaaatattgcttccgtagcaaagttcatcattgcagagttctgattttaaatatgttctcggatgcctcgtacttgctaaactaaattttcgaagatgtcacgtactagactaccttgaacatcgatttgtacacccacaaagtcgcaggttcatgaataattttatgtggcataaagctgcaaagatttacaactgacccacattttacatgaacacctcggagggcctcactgccaaactgcgactcaaacgtaatacgtgccttgcactttgactgaaaacagggattggagactatggaatgggaaaacagcttgtcactttcctcattgttggctgtatttgacagatttgagggaacaatcaggagatggaagtatgcatatggtatggagattggggcactctataaagaatgcatgtattgtcacatttaaaaaaaacgttgaccataaagaatttataaacacagaaaattacaatggttaaaatttcaaaaaagtcttaaagtttatagtgtcataattacacacattatatccacacttacatataaaattaaattgtttatttgtacgacttaaataagattttttaagttagcccttaaaaattaattttttttagtctataaaaatacggaactggtggctctcaaactttagtatattggttcttttgaataagctttttttgtcagagatgagcttttgagttcggcttttggcttcggcagtgacggcctaaagccttcaaaccgaccgattttgttggggcctacatgtgtatgttgttgctgtttgctttggcttcggcagcgacttggaaaaacttttgaacgagcacaaaaatcgggcagcttgaaaactataaataaacgtgcgatttatgcagcgctcatttcaagatttgcaagccacgggccgtcaactcgaaaaaattcgtttgtccattttctgcggataagtttggcaattagctggctgagattgtgtgcatcccagtgtccgtgtgtgcagcaattgcagcaacaattgcagttaaccgagaaaaccgaaaagccaacaaaaaagcgctcgtgaagaaataaaagtgaagccggtttgcaaaaaattacgcaaataaaaaaccaaaaaccaaaaaaaaaaaaaaggaaaaacggagacaagaaaattaccgtctggaccgtattcgtgtgttaaatcaagtcacacgaaaatagtcaaatagaaagagtccagtaatcaattgaaacgagttttcatcggcccattgtgcagaggaaatcgaaaagcaagagtcagccagtccgaaaaatgcaattgccttgcatatcgctcaccattttggccgccttggcactcggaagtggctatgcggcaacgctgccaacctccgcacccagtgttttcagctccgatcccaatccgaatccaaattccagcccggtcgaggagttagcggcgcagactcccagcttttccgacagccatgttgctgtgccctccagttcaatcgattttgcaggtaaggtaacttatgcaagcgtacaaaggaactcgatagtcaaacaaaatgtcactcccttctcacgtcctcaaatatataaacacgtaattaatgcagctcaagtcaacgagttcgttatctaagtctttcgtttgcttaatgcaattcgtcgttgtcaaatgcagtgcctcgtttaaacaaaaaatcatggttcatctcatcatcatgaaaccttgcatatcttatttcttgtgtgaacacaagaaaatgctaaaataatttcgcaaacaggtgttttcaatatttgttagccaaatactgaccagaaaaagctcagttgcaaacgcgttcttaaacctttttgtaatttctaacttcctgttttcaaaaagttcttcatctgcgtctgcgctacgccgacaatatgattttttattttaaattcagtacaggccgtgtccggtgtgccttccatgccaatctgtggcgattactcattgtaaaaagtttaccttcttgaaatttttacctgtattgagcatacactcgacaccacatttatatgtatataggcccgtgaccttcaaaactgggaaaagtactgccatcgtaaaagaagttttaatgggatttgcaaagagcgaagtccaggctatagaaactgaaattgcaatagaaattagcaagtgtatttgcagtaaaatctttttatttatttcgccttttaacgcttttgaaatggcaagtggaatatgtaaaataaagcgacaagcaagtcatcgcctgtgccacttgaacttgacacacttacacatgttttttgtggtaaaagttatcaagctgaggcgcaaatcgttgggtaaatagaaattgtgacgcaagttggtccgagttataaatgcagaataaacacgggataatgcaggctatgaaatattggcaattacattaatttaatcaagcacgaggtgttggctactgtatgtgattgtccatgtgtgtgtgtgtgtgtgttgtttgcgctcttgcgaaaagagttcagcgtcaacaaaagcaaaaacgaggcttaagtccgatccgaaaccggctgccgtcactaccaagactatcatgactaccgccgagctgacataaagcgaaaagctgaaaaactgacctacatcaatgcgtaagcggcgctgctgggcttgtgccaaactgaaagctgtaattgtaacttgtctctaattgcgcaaagaaaaccgccagcagtaggtactaaaaaaaacgcggcgagcacaaatttattgacacttgcctgagcaaacaaaggacttaggaaacgaacttgagtgcgacccaacccttttctgtcacctcctattttcgacatttcgggttcggatttgcttgatgccataacagctcacctttgacattgaacttgtcaggcgaaacagggaaaaaaaggtttaaaacaaaacagtgggaaacatatttcggagcactcaagccaaatgacttaatagggctggctgttcacgtgggtaattccacttttaattgaccaaagtttgtctcattcttcaagttcttaattacatgccttcaattcgtgttcatatcttttagatttgaacttgccttgccaagaaacattaaaataattactttccgcttgtcgttagaaggagaagataaaaacaattagtggcgtgactaaatatcgttgcaagtaaaatttcatttaaacaactcgttgttaaacttccttaacttgattaagataaagcattaaagtgtaagcgtagtttaaaagtcaatttgcattttaggtatttattttgttataatacgctaaatttagaaaacgcgcttgcatattaaaagatccagtgccgaaatcttaaacttaaatttcttatataattggaaataaatgcattactggcattggtaatgagtgtatgatgcatatttctgacttgcaagtgaaaaatatcatgaatgattatatttattgctttgaaaatcttaaaatgcgtttccttaacacagaggtcagtgtcaccatgacataaaccccattcgcatatgacagaagacacgtggcgacagggacacgtgaacttcgtcatgcctggttggctggcatcaaaagcgaaaattttactaaatataatagctgtgatctcctctttggtcagacccttttgctatgcctcgacgaactttacaacctaagctaaccatgacttaaccgacttgtgaactaatctcgcatcactttcgccttccagttgcaccagcgtccgttactctgtccagtggctcgaatgaggtgacaccctgtagcttgaactctccggacttgaatgaatgcatacgcggcttaatccagtcatttgcgcccaaattgaggtatcagggagtaccggagtttaatatggactcgattgatccgtatttctacaagaggggcatctttcggtacaccaacgatggcatccagggcggtcttctgatcaagaacatggagatctatggcatcagccagttgcaagtgaacagtgttgcggccaatttcaccgataacggctttataattaagttgggcgtcgaactgccgcaactgaaggctggtggacacttcaaggcggatgtgaagttcggaggactgcgtctggtgcccaagggcccctttaacatcaccatcggtgagttccggtttgaaaagttagttcagtggagcatgttcctaaaactttcatattcccttcagacaacatcaaggccaccattctgaccgacggccacatcgaacagctgcccagtggtcagcagcgtctcagtttacatcgcctgaatgccaatgtcaatatcggcgatgccaaggtggtggccaatggcatcttctccgatcgcaacctgagtaagcccattattttcttttaatattcattaagctgatagattttataacatcctagatgccatgattctcaatctggtcaacgagaatctgccggagatcacacgcgtcggaattcccgccacccgcgaacaatgggctcccattctaattgcccacatcaacgagttcttcgccaaggtacccatcgagaaattcttggttcaataatgcaccaagcgcgtcctcaaggatcacttagctcctagttagtttaagccttatgtttacgactacaaatttatcttaagcgctgtttccaaataattttctatgcacaaacgatttggcaatcatttggaatgattttaaacataaccaatttgtatttatttatgtcatccattttgaacaaaaaaagaagttatgtgaaaattttaaaataaatgctcttgacaaaagtgtgtcctttttacttagtttagttagtttgttactaactagatttacaaatcatttgcaagttattcttacccggtttatattgccgatccttaaagtatgctccttacaatttttttacttactcttgacaggtaaatttaatgtattttacctgtaaatctatacataaagttacttacttttgacatatgtcaaacaaatatacaatattatatattataacaaatctaacatatatgttaattccctttccttcgaaacacaaatacaaggttccttgacatcgaagatctaagaaataaagtttaaatttatagctagcaggaattgacctagtcgaaaaaatataaatgagctaattaataaaatatgaacggctccaattccaaagaggttcattgaacattgagtgggcgatgttctcttgtcagaacatccaattgtatgaaactgaagatgctgagaaatgcacactcgatcgataccgattccgctggagagcttttcaattacaatattcaacactcccacttgtcgatcaatcaaaggtgcgaatgtgccccacggcttccaattaccaacaattagttggcaaaatattaaaatacaattatacagcaaaggtccaggccgtgacacttaactttccatcgatcaatatatggaacttgggtcgagtgcttttttattgaaatgatctggccggttctcaggaaacaattgacttaatttgtgatgcttctaacacccaaggcgccgcacgaac

SEQ ID NO: 24923 - DNA, 1362 bp, DROSOPHILA
tcaactcgaaaaaattcgtttgtccattttctgcggataagtttggcaattagctggctgagattgtgtgcatcccagtgtccgtgtgtgcagcaattgcagcaacaattgcagttaaccgagaaaaccgaaaagccaacaaaaaagcgctcgtgaagaaataaaagtgaagccggtttgcaaaaaattacgcaaataaaaaaccaaaaaccaaaaaaaaaaaaaaggaaaaacggagacaagaaaattaccgtctggaccgtattcgtgtgttaaatcaagtcacacgaaaatagtcaaatagaaagagtccagtaatcaattgaaacgagttttcatcggcccattgtgcagaggaaatcgaaaagcaagagtcagccagtccgaaaaatgcaattgccttgcatatcgctcaccattttggccgccttggcactcggaagtggctatgcggcaacgctgccaacctccgcacccagtgttttcagctccgatcccaatccgaatccaaattccagcccggtcgaggagttagcggcgcagactcccagcttttccgacagccatgttgctgtgccctccagttcaatcgattttgcagaagacacgtggcgacagggacacgtgaacttcgtcatgcctgttgcaccagcgtccgttactctgtccagtggctcgaatgaggtgacaccctgtagcttgaactctccggacttgaatgaatgcatacgcggcttaatccagtcatttgcgcccaaattgaggtatcagggagtaccggagtttaatatggactcgattgatccgtatttctacaagaggggcatctttcggtacaccaacgatggcatccagggcggtcttctgatcaagaacatggagatctatggcatcagccagttgcaagtgaacagtgttgcggccaatttcaccgataacggctttataattaagttgggcgtcgaactgccgcaactgaaggctggtggacacttcaaggcggatgtgaagttcggaggactgcgtctggtgcccaagggcccctttaacatcaccatcgacaacatcaaggccaccattctgaccgacggccacatcgaacagctgcccagtggtcagcagcgtctcagtttacatcgcctgaatgccaatgtcaatatcggcgatgccaaggtggtggccaatggcatcttctccgatcgcaacctgaatgccatgattctcaatctggtcaacgagaatctgccggagatcacacgcgtcggaattcccgccacccgcgaacaatgggctcccattctaattgcccacatcaacgagttcttcgccaaggtacccatcgagaaattcttggttcaataa

SEQ ID NO: 24924 - protein, 323 aa, DROSOPHILA
MQLPCISLTILAALALGSGYAATLPTSAPSVFSSDPNPNPNSSPVEELAAQTPSFSDSHVAVPSSSIDFAEDTWRQGHVNFVMPVAPASVTLSSGSNEVTPCSLNSPDLNECIRGLIQSFAPKLRYQGVPEFNMDSIDPYFYKRGIFRYTNDGIQGGLLIKNMEIYGISQLQVNSVAANFTDNGFIIKLGVELPQLKAGGHFKADVKFGGLRLVPKGPFNITIDNIKATILTDGHIEQLPSGQQRLSLHRLNANVNIGDAKVVANGIFSDRNLNAMILNLVNENLPEITRVGIPATREQWAPILIAHINEFFAKVPIEKFLVQ

SEQ ID NO: 24925 - DNA, 5447 bp, DROSOPHILA
tgttagcaaagtggaaggccgacgaaaatggatcgtgtgtgtcccacactgtgctcaatgggaaaactagtcataagagtggggtgataaataagttgttgaactagcgttgggatctaggaaacatatatcagagattatgcatatttattcgaggggttggcagttaagtacgtgttaatgattttgacaatacatagttcacaaattctctgtatttttatacaagtatttatttagaaagcctcattgttgttgtacactattaaggcagaagcatagaatatgtgtttttgtttaatgtcaataccaccaaaaatatgcatattgaagcgcctgagttatgcgatgcacatattcacatactcggtacttttacaaactcctagatgtagtcagccatacatattgcaacgttgcaagcaactttcacacagacatatcttaaagcaaccactctactttatccaatcctataatgagcacttacctcagctcaattagaaacctatcgcagctcaatgtactttatgcctgtccctgtcggagttccgtattgtagtctacgaggttcactacgatataagcttcttggcaatgtgtgtattattatatgtgtataacgtcttcttagatagtgaattttacttgcttataagggggaaattcgtgtgcaactgtctttttcggcggcatagatattagtgtacataaatagactaaatgttataggtatgtttaaagattgctaaaattgttcatgtttggccaatgtgtgctagtaacttaaattagatttttaaatattttcaaggattaagaataacaatgcattttaataaaatatttatgattgtacttatttatgttaagaattgtacgttatttttattgaaataaattattaacactttaaaatttaaaatgcatctcatgaactaagaaaactaactgataagattaccaatctccttttatttccatttccttgaccttcaatctacacgtgagtacatttaccggtcgtatccgcataagcatccaacttttcatccaaatccgcatccccctgtgactgagcattctcctccatctctgtccttataatcccgtcttcaaaactatctcgaattaactgctttagatcgtctttaatggctcgcttaaagaatccgcgctacaaaataagttaatgaaaccaattaaagttttagttgaatcttgaatccgaattgatacgaaccttataaagggcatatgttgcggccgaaaacaccaaaatgccaacgatgacggacacaatgattttccagatagcaatttcagcatgtttgcatataacgttcgattcgatctttttctctatcgtaaaagaacttaaggtgggatcgcctatcttgtgcacttttaggtcggtctgaatgacgaagtactcccagatatcgtctgcgtccttcaggtttacggtaaagcttacagtcatgttcattagctcttccggtttaagctgtagtccgttttcgagtcgtatttccaccggaacgcataacgtcacgttggtatcctggcagtttagaactagggtattattaaccggcagatcctcgttcaacagcgatatgcttggattctgctccacaattccactgagatttcccacattttcatgttgtggggtcgcggaaaagagcagagtactctgatcatgatctatcgcgaagttgttggccagtgcgttattttgatcgatgaagttgataggcattatcttatgagcgtacttggactgtatctttgggctggatgtaacgatatgtttaacattggtagaatcaggcgttttataggccacgggaatatagagggacacagtcaaattttctaaagtactgggaccgtggctcttgatctcgtaatagttgacaacctctgctgtgtaaggagactctttaaggacaacatgatcgtttgtctgaacactgtaaagttattgaggattttagcgatattgaagacagttttaatagtaaacgtaatcatacccgctgacatagatatcagctttttccctcagactgagcacgttggttagcttgttgttctctggatttgactcgtctcgagcacttaatacttctgcttggatttctagcgaccgaccgcggagttgcctcacatcgaagctgatggtcaaggagtcggtgtcacctttggccatacgttgtccatggttaaggtcgcagaccatgacggcttcgtttactttacagtttcctggcacctgggcaagactcaggccggcagagttcgtcacgctgaatttagggtggtaggcgaactctccattattggtgatgttgtaggtgagacgcaggacagcggtagtacccaagaccaacgtagagctaggacgaaatgtataattttggttaaaatattccaagaccataacgcaggaaatcttcgcacctcgcgttgatgcagcttatcttcaaatcggcgacacaaacatcggtggcacaacccgtgttgaaagtaatgtactctgtaacaaactttggttccgccggatccaccaccgcgcaatcctcgcagaaatctattgaagacaactcactgttaagtaattttactcacaactgaattcttagagcgtacctccagaatttggaatctttttcgacagctcatactgcatctccagggctatgggtgtaaatttagctcttttgtccatttcaatttggaattccgagcagatctcttcgtgaaatgccttcgccttaaagctcatctgactgccgtgctcttcgtcaaaaacagccagcttgatctttgactttgtgtcgatgtcgatccgaataaccagctcttgttccattagtgcttttgccttcgaatctgatttgctgctcagcctatagcagacggtgatgttcaccctttcctcctctggattgacgttttgaagttttggtttaattattgcatgaatcttaacgacgggataggcgcgatacagatacaccgcctccgcatttggagctccaatggcaaagtcgttgaatccgttgccatctatgtcggatccacgtgacagcccgtggccgaacatgtaagatccgtacttggatggttgctgggaaggagcatccaggcactgactcggcggatctcgtagtccattttcgctgcctaggtagataaacaccgatccattaccagcaaagggagctccaactgcaacatctgtataggaaaatgattattagattcacatttttatacaatatatctacatgttttatagcccaccattgtaaccgtctttattaatatcgcctattcgtgataaagtagttccaaaacgtcccccacttcccgctggcgaccgaataatcctctcctcaaaggtgaactgcaaaaataaaaacacattagtcagatgatagctaagagtacgtcacatcagaatgtgagctcattacgcattactcacagagcctttgttgatgaatacatatatggctccatcatcgtaagaattacgcagagcatataggggtgctgatatgataacatccgtctttccgtccccattgagatcctccgcgagaacggagtagccgaagtattctccaaaatgattgcctcggaattcatggtacttatagatgctgtcctcatagatatcaaagatgtaggcctcgccaaattggttattgcctcgaggagcggtggccacataaagcactgtgcttaggttggaactatcaaagtagccggagctcacggcgtacccaaagtatgagaattcctcctgtccaaaattttttggctctgggttacactcgttacattttctattagtgttcatcccacgcctttgtcttccactcgatgttttaatgcttggcacttcctgttttaagtgcactgatcccttccactgatcaattcccggtgcacccatcaaaagcttcgagttatcatccgacacatgtgcactcagtcccagttcacccatcgagtagtatgggattaaattcgtgtctgctagtttaagcacttgtttcttttctattctaagaggccacttttccatcacctctgtggaatcgatattcttaggtgtgtcacttaaccagtagcacatcccattattatagtcgttttcattattaatactgtagaaacgcggagcgcacacaaggaacttatccgaatccctggtaccaccgtccatcgctccacccaaccaccgaaaatccttgtttttcgccgtaagcagaccatcatttggcattcctttgtagtttccctttgtatctatattataaggcgaacagttgttaccggattcaaagtagcatctgaagatcactccaggctcggagatgtttcgctgagcttccaaactggaattggcacgaggagctgccaccataatactgtgaatttatgaaaacgaagacatttattttttaaatttgttttctgccagataactaaatatatgtaattactcagaaatcttaaatatcgctaagttatgaataataaaagattcttaattaatcatcaaatgaattcgaaaggaatttaatttatcggaacaaatatcgaaatactattaattatattgataattcaagaggaagcacagaaatcttcttcaaattaattcgagtaaaatttttattaatgtaatcaacaattttgatcaacttcgttcaaaatacatatcatgaattaatcttgagatatatttattataatgaccagtttttgatttttaacttaccttttctcccggatgactaaagaaaatccaaaataggagctgcgtctatttccttcaagttccggaaagttaagtactgaattgggatacggcgaaatattataggcattgatttcggattgaagggccaacaacacaataacaagcaaacaaaacatgttaaataacattaagaaatgtaattcaataaacgcacatatagaaaaatataaatattaatttttttacgagactatatataaagtcctgcaaccgaactcgttgagctttcgaatttaaatgaaaccaagtggcatgaaatgactaccaacgtaataaaacagacgcatatgttgactaatttttcggacataccaaaatgtatctaaaaaatatgtaggaaaatttataaaaacttaaattaaatcaaatgacacattcaaaaataatctctgaaacttgttttttaacttttattatatttcattgttttaatactctaatataatacaggaatacttgttataccagctgttaagtccttaaatatcctagtttcgtttttacaatttatacattaataaagtctttcacgtcgccctgtaaagctacctttacaaatttattacacttatcgtttattaacaaggggaccgttaaaatc

SEQ ID NO: 24926 - DNA, 3048 bp, DROSOPHILA
atggtggcagctcctcgtgccaattccagtttggaagctcagcgaaacatctccgagcctggagtgatcttcagatgctactttgaatccggtaacaactgttcgccttataatatagatacaaagggaaactacaaaggaatgccaaatgatggtctgcttacggcgaaaaacaaggattttcggtggttgggtggagcgatggacggtggtaccagggattcggataagttccttgtgtgcgctccgcgtttctacagtattaataatgaaaacgactataataatgggatgtgctactggttaagtgacacacctaagaatatcgattccacagaggtgatggaaaagtggcctcttagaatagaaaagaaacaagtgcttaaactagcagacacgaatttaatcccatactactcgatgggtgaactgggactgagtgcacatgtgtcggatgataactcgaagcttttgatgggtgcaccgggaattgatcagtggaagggatcagtgcacttaaaacaggaagtgccaagcattaaaacatcgagtggaagacaaaggcgtgggatgaacactaatagaaaatgtaacgagtgtaacccagagccaaaaaattttggacaggaggaattctcatactttgggtacgccgtgagctccggctactttgatagttccaacctaagcacagtgctttatgtggccaccgctcctcgaggcaataaccaatttggcgaggcctacatctttgatatctatgaggacagcatctataagtaccatgaattccgaggcaatcattttggagaatacttcggctactccgttctcgcggaggatctcaatggggacggaaagacggatgttatcatatcagcacccctatatgctctgcgtaattcttacgatgatggagccatatatgtattcatcaacaaaggctctttcacctttgaggagaggattattcggtcgccagcgggaagtgggggacgttttggaactactttatcacgaataggcgatattaataaagacggttacaatgatgttgcagttggagctccctttgctggtaatggatcggtgtttatctacctaggcagcgaaaatggactacgagatccgccgagtcagtgcctggatgctccttcccagcaaccatccaagtacggatcttacatgttcggccacgggctgtcacgtggatccgacatagatggcaacggattcaacgactttgccattggagctccaaatgcggaggcggtgtatctgtatcgcgcctatcccgtcgttaagattcatgcaataattaaaccaaaacttcaaaacgtcaatccagaggaggaaagggtgaacatcaccgtctgctataggctgagcagcaaatcagattcgaaggcaaaagcactaatggaacaagagctggttattcggatcgacatcgacacaaagtcaaagatcaagctggctgtttttgacgaagagcacggcagtcagatgagctttaaggcgaaggcatttcacgaagagatctgctcggaattccaaattgaaatggacaaaagagctaaatttacacccatagccctggagatgcagtatgagctgtcgaaaaagattccaaattctggagatttctgcgaggattgcgcggtggtggatccggcggaaccaaagtttgttacagagtacattactttcaacacgggttgtgccaccgatgtttgtgtcgccgatttgaagataagctgcatcaacgcgagctctacgttggtcttgggtactaccgctgtcctgcgtctcacctacaacatcaccaataatggagagttcgcctaccaccctaaattcagcgtgacgaactctgccggcctgagtcttgcccaggtgccaggaaactgtaaagtaaacgaagccgtcatggtctgcgaccttaaccatggacaacgtatggccaaaggtgacaccgactccttgaccatcagcttcgatgtgaggcaactccgcggtcggtcgctagaaatccaagcagaagtattaagtgctcgagacgagtcaaatccagagaacaacaagctaaccaacgtgctcagtctgagggaaaaagctgatatctatgtcagcggtgttcagacaaacgatcatgttgtccttaaagagtctccttacacagcagaggttgtcaactattacgagatcaagagccacggtcccagtactttagaaaatttgactgtgtccctctatattcccgtggcctataaaacgcctgattctaccaatgttaaacatatcgttacatccagcccaaagatacagtccaagtacgctcataagataatgcctatcaacttcatcgatcaaaataacgcactggccaacaacttcgcgatagatcatgatcagagtactctgctcttttccgcgaccccacaacatgaaaatgtgggaaatctcagtggaattgtggagcagaatccaagcatatcgctgttgaacgaggatctgccggttaataataccctagttctaaactgccaggataccaacgtgacgttatgcgttccggtggaaatacgactcgaaaacggactacagcttaaaccggaagagctaatgaacatgactgtaagctttaccgtaaacctgaaggacgcagacgatatctgggagtacttcgtcattcagaccgacctaaaagtgcacaagataggcgatcccaccttaagttcttttacgatagagaaaaagatcgaatcgaacgttatatgcaaacatgctgaaattgctatctggaaaatcattgtgtccgtcatcgttggcattttggtgttttcggccgcaacatatgccctttataagcgcggattctttaagcgagccattaaagacgatctaaagcagttaattcgagatagttttgaagacgggattataaggacagagatggaggagaatgctcagtcacagggggatgcggatttggatgaaaagttggatgcttatgcggatacgaccggtaaatgtactcacgtgtag

SEQ ID NO: 24927 - protein, 1015 aa, DROSOPHILA
MVAAPRANSSLEAQRNISEPGVIFRCYFESGNNCSPYNIDTKGNYKGMPNDGLLTAKNKDFRWLGGAMDGGTRDSDKFLVCAPRFYSINNENDYNNGMCYWLSDTPKNIDSTEVMEKWPLRIEKKQVLKLADTNLIPYYSMGELGLSAHVSDDNSKLLMGAPGIDQWKGSVHLKQEVPSIKTSSGRQRRGMNTNRKCNECNPEPKNFGQEEFSYFGYAVSSGYFDSSNLSTVLYVATAPRGNNQFGEAYIFDIYEDSIYKYHEFRGNHFGEYFGYSVLAEDLNGDGKTDVIISAPLYALRNSYDDGAIYVFINKGSFTFEERIIRSPAGSGGRFGTTLSRIGDINKDGYNDVAVGAPFAGNGSVFIYLGSENGLRDPPSQCLDAPSQQPSKYGSYMFGHGLSRGSDIDGNGFNDFAIGAPNAEAVYLYRAYPVVKIHAIIKPKLQNVNPEEERVNITVCYRLSSKSDSKAKALMEQELVIRIDIDTKSKIKLAVFDEEHGSQMSFKAKAFHEEICSEFQIEMDKRAKFTPIALEMQYELSKKIPNSGDFCEDCAVVDPAEPKFVTEYITFNTGCATDVCVADLKISCINASSTLVLGTTAVLRLTYNITNNGEFAYHPKFSVTNSAGLSLAQVPGNCKVNEAVMVCDLNHGQRMAKGDTDSLTISFDVRQLRGRSLEIQAEVLSARDESNPENNKLTNVLSLREKADIYVSGVQTNDHVVLKESPYTAEVVNYYEIKSHGPSTLENLTVSLYIPVAYKTPDSTNVKHIVTSSPKIQSKYAHKIMPINFIDQNNALANNFAIDHDQSTLLFSATPQHENVGNLSGIVEQNPSISLLNEDLPVNNTLVLNCQDTNVTLCVPVEIRLENGLQLKPEELMNMTVSFTVNLKDADDIWEYFVIQTDLKVHKIGDPTLSSFTIEKKIESNVICKHAEIAIWKIIVSVIVGILVFSAATYALYKRGFFKRAIKDDLKQLIRDSFEDGIIRTEMEENAQSQGDADLDEKLDAYADTTGKCTHV

SEQ ID NO: 24928 - DNA, 5157 bp, DROSOPHILA
gactagacaagtgcaagtcctcggccgaggaagcgtggggattatgaagcccacggccgccaccgcagccataaatccacaataatggcacacagccaaagggacaactggatgagtcgacctttatgcaccttattgaatatttatagagctcggaagtgacaaaaaaaatgtccaaaccaaatggcgtgagtcattttgcaaatgtggaaatgattgaaatcagttttttgttcagtgaaactattttcagcgtctagggaatgcctggatacacaaaatgtctatatacatagtatatatatatgtatatatatggtggaagtgcactcaacttgccagctgattgttgcgatttttcaagtgtgccaaaaacgatacatgaagacacaagacacaagtgggcctggatctggccaccagggggatggtcgttggcagttgggggcctgataagcttggcagccaggcccgaaaaaaaaagctcaggcagccaatgacccgggagcgggatggccaagagcagagccatgtatcaaatgcttactcatgctgaatgctgcaaacttggccgagtcgcacagccacacagaagtagactccccctgatacatgtgtaatcttcggtttgttcgtctggagcacagatcaagcttttctttcgactattaagcatatttcagcgctgagtgtggagtgctaatggctgtccttaaacgacttttgttccccggtccgagtttcaattacttgtcgtcccatgtcgttgcgataatccccatgagcttgcctggctggactgactgaattggactatgcaattgccatttgctgaatttgagcaaaaaataaatagtttccatgactggccagttttgtggaagcttgggataatcgtgacttgaatgttttatatcgcatccgacgattgagtttaaatactacttgtttataagtcatttgtcagaaatataattatattgtctgctaagtgttgtagctactttggaatattactcacccttctactctccgccggcatgctggatgtccttaagcgttgtcgctccgtcatcggcttgccggactgggtggccaggacgacggaggaggccagttcggcgatggcggtgccggatgtgctggcccccgaggactcgcctacgcctcgttcccgcttcatgggcaaatgggtgggcagatgctgttgctcctgctgcagttgcaactgcaacagttgctgctgctgcttttgctgattgctgggaatcatggagaccggagatggggagtcggtggagtcgccattgccatccggtccactagtcacctcggcgacagcagccaaagtggtgctggaaccaccgagaaaccccaggcccaccgtcaaatttaagttgtgtgaagatccgccaggtaaaccgccaccgccaccgccaatgccatcggatcccacaattcccggctttccggcttcaccggtagcgggtacctgggaatttagcgatcccactgtgccatactgtggtgacacagctccagatatggcctgctgaaaggtcaggactccggctagtgacatgcgatccctggaagcagcaagaaatacaaatgttaattgcaaataattgctcttgttccccattgggtactgagttatttgagtagcttaactatagatttaagttcgaaaatgataattgccctcggtgtatacctgcatacgcagtatgtgattcaatggtcatggcttggcctaaggttaattgcgtttcagctcataattaggcaacttagcagcgagcttgatgaaaactgattgaaaattgccccagactcgctggcttttagcgtaattagcccaattagggcgcacagcgaatattcagcgagaaaaattaaactcccattaaattcagaaaggtcatacacgatggtacttggatcaaacagcagtagacgtaccccaaaagctgatgcctcattcagcaatagcaaatacctcttaaattgcaaaaaaaaaaaggcgactgactttaagattttcatggaaacttctggctttgctggcgggaagcgatagatgtggcaaactgtgaactcattaaaaaattcctcttttcgggaatggaatgttgctaaagtgcacttgtttttatttttttttaagttaaatgcaattgtgtctgaagctctcacaagccatttgctagtgaattgtgaatggaataaagcgtgaagcatttgaaaagccatttggcattaaaaccagcacaatttccattttgaacataaaaaaaaaaccattgggccaaggtcgcgctgggaagccaaagacaatggccaacaactgttggcccacagggtggcgacgagaggtcacagttgaaggctctaggcggtcggggtcacctaattagggtggccattatcctctacccacctgccggcccgcccgcctggcattgttgcaaactttttaattatgatttttacttgtttatgactggacgccttcgaagaggacttctgcccccagctgcagctactttatcatcagcttaatcttccacggaactaaagttaaaaagttgtcgaaagtcatcacaaattggtcttcgaacaactttagccgaatactgattcgcaatcatgaaataattaacataacgaacttcgataccaaacatgaacattgaacttaaaccgataattgtcaattcctatacctggcactgctgctgtgcgaaatgcgctgaaaatcattggagtcgattggagctccaccgatgctattccgggtgtacgtgtaatccgagtgcaaaagatttccggctatagatgaggcgcgacgtctgttcaaaatcggcgacttctgggcacgcagactctgctatgaatggtcatggtatggtgaaaaataaagagacaagttgtatggggttagaggtgtcgctgaaaaataactttgtgttatagaaatgtaaatatttattgcagcacacacatttaattatttaactaattaaagctttaaagtgtctgtttggcttcaagcatgaatatgagaccgcaatccaataacgattgacatcaatatgagacatttacgcaaacaaactttgtggcaataaataataataataaatcgaacaacaacaattgtacgtgaataataatatttcagcgatacttacacgactgccagttggattttgagccgcattgacgaaatcgttgaaggtggtgagtggcggtacaatctgaggagcaggttcctcatccaactcccactccgtatcgtaatcaagctcggtgtcatcagcgtactgctgatgctgctgctgctggtgctgctgctgctgatactgctgctgctgctgatgttgctgctgatgttgcagctgatgctgctgctgatgctgcagctgctgctgctgatgcgactggtgcggctgatgctgctcgaactgcagctcctgatgcggatcgtagtgcagctgctgctgcatctgctgttgttccatggcctggttatagccgtatgcagatgccgaggtgctcggcccctggttgtaatagccactctgctgttgcacccgctgcaaggccgtctcacgcgtgtggtacgcccccttgccactatgggtgggcggtgtgggcagcaggcggtgcaccacgtgcaccccgggtgtcggtagctgaacctgcagcacgggctgctggttgctaacctgtgtatgggcgtgtgcctgatgagcaaccatcacttggtgctgctggtggacacctccgcctggatgttgctggtgggttacctgttgatggggctgatgggtcaccacttgatgctgctggttgcccagttgttgatgcgtcgcctgttgatattgctgctgcgtaactccttgatgttgctgtacatttacctgttgatgttgcgcctgcagcattgccttctgctgctgctgctgctgcggctgcttgaggatcggcttgaggacattgtaggccagctggtgcggagccggcgagggcacgggattgtgggtgctgctgcttatgctgtcgctctcgtcgcagctggcatctgagcacccggaccggaaccacgggcagcaatcaggatagagtaaatagaacggcggaagtttcattacaataaaagcgaagccattttgttaataaaatactccagtacaatagttactgctaccatttcggtattccttaaaattcagatccagcctaaagttgaattgatctaacaagattccaaaggcaattacagattcatgcaaaattgacacaaaatagtttgggaaattgctgggaaaatggcagaatctcagcagttgagcgtaacaagtcgtctgttaatttcaaaattgtccctccatcgtccagttgactgaaacaaaccgcaacaatgtggcccaaactaatgtggccagttccactgggccttacatccttacatcctacatcctctacgcttttcatccttatctatgttatatgggaaaaatgtgggcaggggacacctgggccacctgtgccacctgttcctatatcgcctttgcattgtgtgtgtctgtcttccccaggaattatgtttcccaagttgaagtcaaatatgaaaatgttttgccagaacccaaaaagcaaacttttttcgagacatttcccaacgactgttctgtttgcaagcgtgtgagtgtgtttgctttctgtttacatgtttatagccaagcttaagttttctttgctgtttccttttgttgctgggcgaaaaaagaaaaaaaaaaaattaataaactttggctctttgtgcgtcagtgggcgccataaaaattgtcggttagacccggagcatcgcttaaaatatggccacatatgacaggctaacagactcgacctcaaaaatactcagtgtaatattcattcgatttaaggaagtcctgccgctcaaaagtcacgactaacaatggtgtgggccttggcatttcacagaatattttatgaatattcaaaagccaaagagaacaattttgatcaaggaccaaatgaaactcaaataatcaacagttcaaattaatagtttataagaaatgtccaaaacatgtggtttaacaattggatgcgtttcaaagtgaa

SEQ ID NO: 24929 - DNA, 1713 bp, DROSOPHILA
atgaaacttccgccgttctatttactctatcctgattgctgcccgtggttccggtccgggtgctcagatgccagctgcgacgagagcgacagcataagcagcagcacccacaatcccgtgccctcgccggctccgcaccagctggcctacaatgtcctcaagccgatcctcaagcagccgcagcagcagcagcagcagaaggcaatgctgcaggcgcaacatcaacaggtaaatgtacagcaacatcaaggagttacgcagcagcaatatcaacaggcgacgcatcaacaactgggcaaccagcagcatcaagtggtgacccatcagccccatcaacaggtaacccaccagcaacatccaggcggaggtgtccaccagcagcaccaagtgatggttgctcatcaggcacacgcccatacacaggttagcaaccagcagcccgtgctgcaggttcagctaccgacacccggggtgcacgtggtgcaccgcctgctgcccacaccgcccacccatagtggcaagggggcgtaccacacgcgtgagacggccttgcagcgggtgcaacagcagagtggctattacaaccaggggccgagcacctcggcatctgcatacggctataaccaggccatggaacaacagcagatgcagcagcagctgcactacgatccgcatcaggagctgcagttcgagcagcatcagccgcaccagtcgcatcagcagcagcagctgcagcatcagcagcagcatcagctgcaacatcagcagcaacatcagcagcagcagcagtatcagcagcagcagcaccagcagcagcagcatcagcagtacgctgatgacaccgagcttgattacgatacggagtgggagttggatgaggaacctgctcctcagattgtaccgccactcaccaccttcaacgatttcgtcaatgcggctcaaaatccaactggcagtcgtcagagtctgcgtgcccagaagtcgccgattttgaacagacgtcgcgcctcatctatagccggaaatcttttgcactcggattacacgtacacccggaatagcatcggtggagctccaatcgactccaatgattttcagcgcatttcgcacagcagcagtgccagggatcgcatgtcactagccggagtcctgacctttcagcaggccatatctggagctgtgtcaccacagtatggcacagtgggatcgctaaattcccaggtacccgctaccggtgaagccggaaagccgggaattgtgggatccgatggcattggcggtggcggtggcggtttacctggcggatcttcacacaacttaaatttgacggtgggcctggggtttctcggtggttccagcaccactttggctgctgtcgccgaggtgactagtggaccggatggcaatggcgactccaccgactccccatctccggtctccatgattcccagcaatcagcaaaagcagcagcagcaactgttgcagttgcaactgcagcaggagcaacagcatctgcccacccatttgcccatgaagcgggaacgaggcgtaggcgagtcctcgggggccagcacatccggcaccgccatcgccgaactggcctcctccgtcgtcctggccacccagtccggcaagccgatgacggagcgacaacgcttaaggacatccagcatgccggcggagagtagaagggtgagtaatattccaaagtag

SEQ ID NO: 24930 - protein, 570 aa, DROSOPHILA
MKLPPFYLLYPDCCPWFRSGCSDASCDESDSISSSTHNPVPSPAPHQLAYNVLKPILKQPQQQQQQKAMLQAQHQQVNVQQHQGVTQQQYQQATHQQLGNQQHQVVTHQPHQQVTHQQHPGGGVHQQHQVMVAHQAHAHTQVSNQQPVLQVQLPTPGVHVVHRLLPTPPTHSGKGAYHTRETALQRVQQQSGYYNQGPSTSASAYGYNQAMEQQQMQQQLHYDPHQELQFEQHQPHQSHQQQQLQHQQQHQLQHQQQHQQQQQYQQQQHQQQQHQQYADDTELDYDTEWELDEEPAPQIVPPLTTFNDFVNAAQNPTGSRQSLRAQKSPILNRRRASSIAGNLLHSDYTYTRNSIGGAPIDSNDFQRISHSSSARDRMSLAGVLTFQQAISGAVSPQYGTVGSLNSQVPATGEAGKPGIVGSDGIGGGGGGLPGGSSHNLNLTVGLGFLGGSSTTLAAVAEVTSGPDGNGDSTDSPSPVSMIPSNQQKQQQQLLQLQLQQEQQHLPTHLPMKRERGVGESSGASTSGTAIAELASSVVLATQSGKPMTERQRLRTSSMPAESRRVSNIPK

SEQ ID NO: 24931 - DNA, 3252 bp, DROSOPHILA
tttgtttgaaacttgtcagaaaccacgcgattaatcataactagaaaccacaaatacgacataacaaaatagagtgcaattccttgccctgtatttctacatacatattatgtatgtcgtatgtatattgcaattgcggtttttcctgtttccacgagtatgtatgtatgtgccactcaaacaaagcagaagtctgtttatgttttttttttttttcattttagctgcatttttcattttgtttttaagcggatacgattcgatttgtatttgcatataacttgcttaatccttttttttcgattttggattttcgattttgtaaaatttgctgatcaatattttttgtaagaaaattattgtccgcatttgcagcgccacctaccggttgggttcgtggtaaaagggtatgtcttttgctttttattttgaatgttatgctattagcctgttcaaaactttctagatgcttaatatcgcttacatatgtttccaaagtttgtctacaatatattttcagtccgcaagtcgcacgggcacggataactagaccacacttttaaatgccatttcaagtgattataagtttctagaaatttgttggcccagaacttcatattgcttgccatcgcccgacgagtcgcagttgccatcaaaatctgtgcataaactatagcactgaatctgcaaacgtccgttggccaatcaaacagaaattgtccctgtagtttttatggaatatgcaactggaaacttcctcataagttgacccctcctgtactcctgcacttccgtgttcgactccacttcggtttgcgctgctgtttcgttgtgcttgttttgatctctggatctactggtctggatggttccggttccggtttcggttgcgtttccgttttcgcttccatatctatgctcctacttcgcctccatctatactccatttatgtacattcagtctatgcttcctacttcctatgctgccgccgccaaacgtttagatcacgaagagatcactgcagctggatgagttgcgccgcttgaggctgatggccttcttgaagcgcagcaccgacgagatgaataccttggtgcgggcggttagtttcttgaccaccttgcggttgcaggcattccggtgtcctccgttcactatgtcctcaccgtcctcctcgtcatcgctgtcggccagtccacttctctccccgaaccgctcctccgtcgctcctgccagtcgtccctccagctgcagatcatccatggcccggagttgatagcgccgctgcagttcggcggctgcatccgcggctgcagacgtggtaacgccgccgtcgaacgagcgacgcttgcggaatggacgacgatgacgtatggaggccgccagcatattgaatttgctcagctgcgacgacttgaccacatcctcatcctcgtccacctcgctttcgcccatcttcaatatgctttccaggtttaagggcttgcggttgggattctcgatccgcgaccggctggccttcgatgtgctaggcactccgtccggatcatcgttggcctcgccgttctgcagcccctccggcaatccgccatcgaagatctcctcgtcgccctggcaaacgctcatttggcggaccatccgacgcgtctgcaggtgcattccacggtgcttctggatggtactctgcagattcaggcgctgcagttccaattccgttagcaatcgcaaacgctgcggattgagtttcacctgggccacaatgccgaccagcagctcgtccacattgtgatccagtcccgaggacgtctcgataaacttgcacgctatttccttggccaccttgcgacccactgaaattggagaattggtggtgtgtgaccaactggattagttcttagccctcatttaaatagtatagaatatgttcttgcaatgtcgttttacaaatgaaaaaaatggctgtgctttaattcgaacaatcaacatacaagaattgaatagattgcttactctgacgggtgacaactcggtgtcgctgcagatccgttttgttggccaccaggatggctccgcgggacaagagcatctcgttctccttgagatactgcaggacacgctcggctgctgcgaaagtgtttcgatctatcacagagtagaccaccacgaagaggtcgatgttgtaggtggcgcagaaggcctccgtctgcaggcgagaatcaattttgtggtggaaaaataatagatgagccatatggcgcagaaaagtaggctacaaaaatcgttcaaatgaaatttcaagctgcctgacgacgagctgggtggatggagcccaaaaggggtggaaaagttcacgttgttacagctgagacgcctgaccttgctcggacctaaagacctaaagcttctctaagtccagacttatgaaatcgcacatgggtaaccgaaaattgcaaatggttttgtgttgaatatttgcaaattgcagttgcaattcgctttgtaatttgcaatacttcgatgtcaatgtgcttattcctatgccatcacattgtttctcctttaaagtgacggccgacaaagtttaaatgaatgatttggcaaatgtgtcagtggcagatgggtgtaagtcaacagcttgatccacttaaccagactgggaaaatcggaaaaatcggaaaacggaaaaattcccttcgcctagttttcaggcgaatcggtactcaccgacatctcgcatgcgggatgatcaataatctccaaatccgtctcaatgttatcgaccagcaccgacaccgtcttctgtccgtagtcatcatctaaaaaagtgtatatatataaaatgaaaatgatgaattttcgctatgcttaatgggcatacaaaaactaattggaaattatattacaatataagaaagcaaccaacgtgaagtgcaagtggttaagcgtctatttcgaggagtgcatttacattgaccaaaagcaaaaaatgaaaggaagccctgagctctgaatgtttttacggaaatcaaaataacaagtactcgaatgcagttctagggtcttaaatcgatcaaattgcaccaagtgtgggcaagggggtggcgacaaccattgcaatgggcgtttgaggggcgtggcgcccataaaaccgtaatcaaagtgattttatttgcccagcaagttaatgtcgcaattgacgctcccctttctctgtccacattgacttgttttttgtttttgttttttagccc

SEQ ID NO: 24932 - DNA, 1092 bp, DROSOPHILA
atggctcatctattatttttccaccacaaaattgattctcgcctgcagacggaggccttctgcgccacctacaacatcgacctcttcgtggtggtctactctgtgatagatcgaaacactttcgcagcagccgagcgtgtcctgcagtatctcaaggagaacgagatgctcttgtcccgcggagccatcctggtggccaacaaaacggatctgcagcgacaccgagttgtcacccgtcagatgggtcgcaaggtggccaaggaaatagcgtgcaagtttatcgagacgtcctcgggactggatcacaatgtggacgagctgctggtcggcattgtggcccaggtgaaactcaatccgcagcgtttgcgattgctaacggaattggaactgcagcgcctgaatctgcagagtaccatccagaagcaccgtggaatgcacctgcagacgcgtcggatggtccgccaaatgagcgtttgccagggcgacgaggagatcttcgatggcggattgccggaggggctgcagaacggcgaggccaacgatgatccggacggagtgcctagcacatcgaaggccagccggtcgcggatcgagaatcccaaccgcaagcccttaaacctggaaagcatattgaagatgggcgaaagcgaggtggacgaggatgaggatgtggtcaagtcgtcgcagctgagcaaattcaatatgctggcggcctccatacgtcatcgtcgtccattccgcaagcgtcgctcgttcgacggcggcgttaccacgtctgcagccgcggatgcagccgccgaactgcagcggcgctatcaactccgggccatggatgatctgcagctggagggacgactggcaggagcgacggaggagcggttcggggagagaagtggactggccgacagcgatgacgaggaggacggtgaggacatagtgaacggaggacaccggaatgcctgcaaccgcaaggtggtcaagaaactaaccgcccgcaccaaggtattcatctcgtcggtgctgcgcttcaagaaggccatcagcctcaagcggcgcaactcatccagctgcagtgatctcttcgtgatctaa

SEQ ID NO: 24933 - protein, 363 aa, DROSOPHILA
MAHLLFFHHKIDSRLQTEAFCATYNIDLFVVVYSVIDRNTFAAAERVLQYLKENEMLLSRGAILVANKTDLQRHRVVTRQMGRKVAKEIACKFIETSSGLDHNVDELLVGIVAQVKLNPQRLRLLTELELQRLNLQSTIQKHRGMHLQTRRMVRQMSVCQGDEEIFDGGLPEGLQNGEANDDPDGVPSTSKASRSRIENPNRKPLNLESILKMGESEVDEDEDVVKSSQLSKFNMLAASIRHRRPFRKRRSFDGGVTTSAAADAAAELQRRYQLRAMDDLQLEGRLAGATEERFGERSGLADSDDEEDGEDIVNGGHRNACNRKVVKKLTARTKVFISSVLRFKKAISLKRRNSSSCSDLFVI

SEQ ID NO: 24934 - DNA, 2546 bp, DROSOPHILA
atagttatcatgacatccgagttggtgcgagatctagtttgaattttaatgcgttttatatgcaaatcagcagcttgataagtgcaaactgaaggcatcaagaaacacaggtaataaaatttaaattcatggcttaaaagatataaaaaatctccagaattctcaataaacacgcgccatctcctagccgacaaattgcaaacgctttgcattgcgactttgatttaagcatagattcacataccgatttcgatctcgaacctgtgtgggctggctttgatcttcttcgattgtttaatttcttaattaacactcgagattcgtgaagcaaaaacgttttgcttcgcattctgatcttaaaatcgccggaggcattgcgcatttgaaatcaaaagtgttgcctttcattcaactaggcgatataatgagccgctcttcattatgatgttctcaagtgatgtgaacgctctacaaattgaagcattaactttgatttttttttatcatatttatttgtttgggtgtttgctgatcgcgcacgtttcatacttgagattcttatggcaatgccttcatttcgtcgtatttcttttttgtttaattgttcaaacgtgagttaacagtttcgataatgagcatttgaaatattctgtgaggatgaggaaattcttacaaattggttcagacagacatcacaagtagttaagtaaataaataaatgatgttctgtggaaacgtgatgagatgctaagaagcttccgcaacttatgaaaacgtatcttccaattaatttaattaaattaaaaataagtagctgcgtcttattaaggtcacattatccagtttctttcgaaattatttcaacaatgtaaacagaataattaaattggaatgcagacagatgcttcaaggagctggttatgcaaataaaggagtctgtttttataatgattattttaagtaatatatttttcattattccatctgcatatatgtagatgcccctgtgattttgacattgccgcacatgctgggcgcctcgaatgagtaccgcaaaatgataagaggcttaaaaccagatgccaaaaagcatcagacttttgtggatgtgcagtcggtaagtagtatatatatatatatagtcgatctagaaaaatcgtacagctataattattccattagctgactggcacgcctttgcaaggcggcaaaagggtacagttcaatatgttcctcaagagcataaatcgaatcggcatcacggaaaatttgcccacagttttgatgcccgccatttgggtggaggaggttagttaatcccaaatataatttcaattacaatttataatatgataaatttgatttacagggcattcaactcaatggtgaaatggtggcctttttcaaaaagaaactgatcaacacattgaaaaccctcaacatcgttcactgggcgaccttgtgtgggggcattggggttgcggttgcgtgcctgatatactatatctatcaaagggggcgtgtcgtggagccgcccgtgaagtaagatattaatcataaatcggtatttgttattgagagttatgtaaaaatgtatttgttatactactattatgagtgtgtggatgtaacacaagaagtttttgtctacgaatttgtatataatttattttttaaatgtgattctattgtattgtgatttagcgtttactaaaaaaaaaaaaaaaacaagaaaaactactacaaatgaatgaaaatattgttttatttaaaatgtgggatattacggtttaagttgttaagctgattcctagaaatcagtttacactttagcattaattggtatgtgttcaacatgatttatttttcttagaaggagaatatatggcacatgacttgtggctttaattagggactcctcatgaatatctcagcaccactatgtctggttttcgaagaaaattaatttcaacaaaatgtttaaacattccatttaatttttttcggacttctaaaacaatgctaaccacaagattcactttgcatagccgagccttgatcaaaccgcctcccttctccatggccatgactcaagttcaagaccagttaatgagggaacccgggtattaatcaatcagccaactgtttttgggcccaccaatttgcacaaaaaaagcggcaattaaaacacagtttatattgcatcaaattggctatcaaagaaacagcaaaaacttaagcaacggagccaaaactaaaaacgaactacgaaactacgacttggtcaatcgaaagatgcaaacaaatatatttcactaggcggataaaccaagacgatccaaggtgtttgcattacaaagcgattgagacactatctatcgggtggggtccacatctcaggaattgattgacagccgcaaatagtgcctgtcgatctcttgattgagacttacgacgcgattataaacgcgtgaaaaacgctcgcgactcgccactcggccgtcccataaatacgggtatttcgaattaatgaggagctaatggcc

SEQ ID NO: 24935 - DNA, 444 bp, DROSOPHILA
gcccctgtgattttgacattgccgcacatgctgggcgcctcgaatgagtaccgcaaaatgataagaggcttaaaaccagatgccaaaaagcatcagacttttgtggatgtgcagtcggtaagtagtatatatatatatatactgactggcacgcctttgcaaggcggcaaaagggtacagttcaatatgttcctcaagagcataaatcgaatcggcatcacggaaaatttgcccacagttttgatgcccgccatttgggtggaggagggcattcaactcaatggtgaaatggtggcctttttcaaaaagaaactgatcaacacattgaaaaccctcaacatcgttcactgggcgaccttgtgtgggggcattggggttgcggttgcgtgcctgatatactatatctatcaaagggggcgtgtcgtggagccgcccgtgaagtaa

SEQ ID NO: 24936 - protein, 138 aa, DROSOPHILA
MLGASNEYRKMIRGLKPDAKKHQTFVDVQSVSSIYIYILTGTPLQGGKRVQFNMFLKSINRIGITENLPTVLMPAIWVEEGIQLNGEMVAFFKKKLINTLKTLNIVHWATLCGGIGVAVACLIYYIYQRGRVVEPPVK

SEQ ID NO: 24937 - DNA, 4762 bp, DROSOPHILA
tcagacgtggaacgctgcttggagattctcattgagacaaatcggttgccagaggcagcgttctttgcccgcacctacctgcccagccagatgtcaaggatcgtagagctttggcgggagaagcttggaaaggtcaacgaaaaggcgggacagtcgctggccgatccggcacagtatacaaatctcttccctggcctgggcgatgcgctgcgggtggagcagcatttgcaggaggagcgagctcgtaaggcgccggcacgcctcgctgcgaatctaccactgaatagcgaacgtcatcctctgcaagaactatttgccgccgagcagggtgccgccggccagcatttggaggagaaggtgaagccagcttacgttcccgctcaagctgttgtttctagcagccaggtggccgagcctacatccgctgcggatgacgacgacgacctggacttggaaatagatggaattacgttggatgataacattgatacgacagatgtgaacctcgatgacgattttctaagcgacgattaggacggaagatcacagccagatctagaataccatttaaactatcgtttactgctacgggagtcccacatttcgtgcatttcgagccacagaattccgcgcatgcattcacatttgatttgattgaatgttgtttaaatatatatctattaataatatgtacaacagtaatggagcaaacactgcaataaatacttatacaacaatttcaaatatggcgctcacttcaactatttcgattacattctgatatcttatcgataaaacttttaaacaaacttacgatcatgccaggagaaattaaaaattatttttgttcttttttttttttgagttaaattagtattcatggtctattttattatatatttgtacaaaaaaatgttctgtacctgttacatacatttatttcaacatatttactctacgagtagggggtgtaataagtaggcaatccaaaaaaagtctggcaaccacaaatatcagtaaaatacatacaattcgtgtgtgcgtctggattttgctgtattttttatttaagaatgaattattaactaaccattaataaattattattaaataaaaaacagttaaaaccgcgattcaaacgtgagtactccccgaatttcggcgagagtgtcaactggacttttcgcccgctattcgtcggtgatgtatcgatttttcaaacaacaattaccccgaaattttaaacagatacacaccgaatcctcccgaaaaccgtgcaaaacaagaacaccatggaccaggagaatttccacggctccagcttgccgcagcagctacagaacctccacatccagccgcagcaggcgtcccccaatcctgtccagacgggatttgctccacggcggcactataataaccttgtcggcctgggcaatggaaatgccgtcagtggtagtccggtgaagggtgctccgctggggcagcgccatgtgaagctcaagaaggagaagatatccgcccaggttgcgcagctgtctcagccaggtcagctgcagctgtcagatgttggtgatcctgccttggcgggcggatcgggcttacaaggtggagtcggccttatgggcgtaatattgcccagcgacgaggccttaaagttcgtcagcgaaacggacgccaatggactggccatgaagacgcccgtcagcattctgcaagagctgctaagccgacgaggaattactcccggctatgaacttgtccagatcgagggcgccatacatgagccgaccttccggtttcgcgtgtcctttaaagacaaggatacgcccttcacggccatgggggcaggacgatcgaagaaggaggccaagcatgcggcggcccgtgcgctcatcgacaagctgatcggcgcgcagctgccggaatcgcctagcagctccgctggtccgtcggtgactgggctcacggtcgccggaagcggaggagacggcaatgccaatgccacaggcggaggagagtgagtttttattctattgatgtctaagatatgattctaagatatccaatttattgtattatgtccttgcagtgccagcgacaagaccgttggtaatccgattggctggttgcaggaaatgtgcatgcaacggcgatggccaccgccgtcgtacgaaacggaaacggaagtgggtcttccccacgagcggctctttacgatcgcctgctcgatactcaactaccgcgagatgggcaagggcaaaagcaagaagatagccaagcgcttggccgcccaccgcatgtggatgcgtctgcaggagactcccatcgattcgggcaaaatcagcgacagcatctgcggcgagttggagggcgaagtgagtatcattcaagacatcgatcgttacgagcaagtctctaaagattttgagttcatcaagatctaacccacaagcaattttctaatatttttagtgcaattattttgaatgcagtcccatgctttagtttataaaattttaaaaattgattttatcaaatatatgtcataaatgttatatattatttaatacgtttgtcctctatcccttctcaaatgtaatgtagaacgtttagagtaatcctcagttgtaaatatccctataatcttttaaattatgtatctagctagagttttagtactatagcatcccttttatagtgtgctatctgatattttttattgtccttgtttttataactaatgtttttgacataattatacatataattaacataatgcttacaccttatttatatttctggttttatttatggtttatattggcttatttcatttttcatttttcatattgttccttggcatggtgattgttttaaagaacgaatctgtaaagcaccttttccacacaaaagtgatatgtttcaactcaccattggcgtgtgtgatttcaaatgtgtgcgaaatgcaatggagaaaagaaaccaaaaactttgcgctcttatttacagccccgcagtagtgaaaattattatggtgaattgaaagatatctctgtgccgacactgaccacgcagcacagtaacaaagtatcccagttccataagaccctaaaaaatgcaacgggcaaaaaactgcttaagttacaggtaaatttcaatccaataacgctttttattcaaaaacgatcacaaacatatttccaacattcaaaacctgctttcgaaagtacatatttgccttaacccctcacaatccttataataatagtgttcttgcttgaaagttcaaagtttaatttgactctgctaattcgactccatttgtatttttttcagaagacttgcttgaagaacaacaagattgattacatcaagctgctgggcgaaatcgccacggagaaccagttcgaggtgacctatgtggacatagaggagaagaccttctctggccagttccagtgcctggttcaactgtccacgctgcccgttggcgtttgccacggcagcggaccaacagctgccgatgcccagcggcatgccgcccagaatgccctcgagtacttgaagatcatgaccaagaagtagggggtgcagccaactgaatagcaaaatctgaacgcacaccacgaccacgatcacgagtatttgatgagagcgattaccgagtggatacgggataactaatgcaccagtctaattgcttttctttccactttttggctcaatgcagtggcgatgttacatatatatatatatatattttgtttcttttccaccgattcctttgattaggcagttgtatttgttaactgcatatgtaaatgttcatatatgtactacacttaccgatgaatgtatgtacgcttgcaaatacagacaagcgtgtaatcgatattggaatcttctagtcgctttcaaattctgaaaaacgtaaaacggcagataaaactaggtttaaggtagactacgtgctagtttgcgaaggaaaaaggcttatgaatataatcggtatttggtaatcgctacttttgcagttttcttttccttgggctgaaaaactttgtaaactccgaattaaagggcattgatgaattgaaattaatcaatccaactttagaaatattctgtgaaaacatcttttatgatatggaattatttaactacaaattagttaggaaataaattgacaaatataatactgaagttatagtagccgtggctttatttaaataggtaattttgtgcttaatctaaagtagtattctaagtaatcataaaggattgcatctatttcttctttctgtcctgcgtacacttgggacagaaccacttgccctttggctttgtggtgaggccaacacaagcgaagtgaaaccactcgatgggacactaaaatggtagagtgaaagatctagaactgaccacagagtacatcaaaatcgaatactcacgtcgggattgtcgcagccaatcatctctccataggacacctggtggcataggcaatatgtgggctcattgggatcgacgggcatgtccataacgtcgctgggatgagtggcggccgtgtggcacgattccttctcagagtcatcaacctcgacggttttctaaatgggtatgttagcaaaatgagtaagaatggggtttcgacgatagtggaggcgtgcatgtacataagtgaaaatgcaaacgatatggaaaacagtggataatgcaggatttctatggggataatctataaaagtaaagagtattctat

SEQ ID NO: 24938 - DNA, 1621 bp, DROSOPHILA
gcaaccacaaatatcagtaaaatacatacaattcgtgtgtgcgtctggattttgctgtattttttatttaagaatgaattattaactaaccattaataaattattattaaataaaaaacagttaaaaccgcgattcaaacatacacaccgaatcctcccgaaaaccgtgcaaaacaagaacaccatggaccaggagaatttccacggctccagcttgccgcagcagctacagaacctccacatccagccgcagcaggcgtcccccaatcctgtccagacgggatttgctccacggcggcactataataaccttgtcggcctgggcaatggaaatgccgtcagtggtagtccggtgaagggtgctccgctggggcagcgccatgtgaagctcaagaaggagaagatatccgcccaggttgcgcagctgtctcagccaggtcagctgcagctgtcagatgttggtgatcctgccttggcgggcggatcgggcttacaaggtggagtcggccttatgggcgtaatattgcccagcgacgaggccttaaagttcgtcagcgaaacggacgccaatggactggccatgaagacgcccgtcagcattctgcaagagctgctaagccgacgaggaattactcccggctatgaacttgtccagatcgagggcgccatacatgagccgaccttccggtttcgcgtgtcctttaaagacaaggatacgcccttcacggccatgggggcaggacgatcgaagaaggaggccaagcatgcggcggcccgtgcgctcatcgacaagctgatcggcgcgcagctgccggaatcgcctagcagctccgctggtccgtcggtgactgggctcacggtcgccggaagcggaggagacggcaatgccaatgccacaggcggaggagatgccagcgacaagaccgttggtaatccgattggctggttgcaggaaatgtgcatgcaacggcgatggccaccgccgtcgtacgaaacggaaacggaagtgggtcttccccacgagcggctctttacgatcgcctgctcgatactcaactaccgcgagatgggcaagggcaaaagcaagaagatagccaagcgcttggccgcccaccgcatgtggatgcgtctgcaggagactcccatcgattcgggcaaaatcagcgacagcatctgcggcgagttggagggcgaaaagacttgcttgaagaacaacaagattgattacatcaagctgctgggcgaaatcgccacggagaaccagttcgaggtgacctatgtggacatagaggagaagaccttctctggccagttccagtgcctggttcaactgtccacgctgcccgttggcgtttgccacggcagcggaccaacagctgccgatgcccagcggcatgccgcccagaatgccctcgagtacttgaagatcatgaccaagaagtagggggtgcagccaactgaatagcaaaatctgaacgcacaccacgaccacgatcacgagtatttgatgagagcgattaccgagtggatacgggataactaatgcaccagtctaattgcttttctttccactttttggctcaatgcagtggcgatgttacatatatatatatatatattt

SEQ ID NO: 24939 - protein, 419 aa, DROSOPHILA; identical to SEQ ID NO: 15030

SEQ ID NO: 24940 - DNA, 3337 bp, DROSOPHILA
gagaagctgataaacatccgtatccaatacatacttccagcagacccggcttatttctctccagattgtaatgccattccagcatactggtcgccgtcgtgaaaaagtccagctgtgcttgcggaagagtcatcgtgctgaaaactgtgatgaggcgggctaactcgggtgcaatgctaacttaaaatgccgtcagaccactgttttgggatgaaactacaaactaatctgaagatttggtcgactgatgctcaatgtacccacgctcccgccttctgctaagtgttaccagatatcctcacattctcggtattgttttggtatatttcgattgaatattaatggatttcacaatttcaggcgccttagcggggtattatgaaatcgtctgtcacaagaaacatttgcaaacgtgcatgaaattaatattttaataataatttcttttactgctaatatatattatatgataaggacgcgtatattaatagacaataatggttttagtaggcatattcagtgggcttaaatactttgaaaaaacgttgataattttatataaacagtaactgtgctaatacaagtataataaaaaaagcacttcccatgccggaaacttttgagaatataaaaatattagaatgtgaagagtataactcagttgagcgcaacaggtgtgttattctctaaaatcggtaaaacctcaaactactgaatgaattcagcatttcgaagctttgccaatggattttataattgtgattaaaatccactttccgctttcccaaatagacttgatttaagccttcttttcaaaaaaaaaaaaaaagactactgtaactcaacacagaaactctagcgcttaacagcacaatgcgtaacgttaacagcaccccaacggcacatggcgctcaaaatttagcgcattttgtgcgcctcacacagccacattaaatttcccttcttttcttttccccgtttccggtgagtagtgtgttccgcgttatatttttattgaaattttaacccaaaatatctctaaaaccaccccttgcagcgaggagtccatccagaatttgtgtcatacaaacgagggactaacggagcgtaagttttgtgtgaaaaagcgccccaaaacatcgaatcgagtgaaacggcaattggcgtgtggcactgaagagccgccgtttttccatttccgctgggatggatgatccataaacaaattggaaaacaataggcagcgcacgttttgttagcccgatgtgaactctgcgattcgatgtttggaatgctctgtgacaagcacttgtagccttgataaactaataattaatgtttttgccgacagtgtcatcaagatgcgtaccattaattccaaccagtgcgtgaagatccctaaggatatcaaggcctcggtgaaggcccgtgtggtgaccatcaccggcacccgcggcaccctgaagcgcagcttcaagcacttggctctggacatgtacatgcccgacaagcgcaccctgaaggtggagaagtggttcggaaccaagaaggagttggccgccgtccgcaccgtctgcagtcacatcgagaacatgatcaagggtgcgtacagctagggtaaacacaacaggaacactttcacagccaggcctttcatttgccaatcacacgagaatttaataataatatctgggaagacgatttactaaactccattcatagatatcaattttctttacaaattacctaaaaatgctatatagtagttagtaaatattttcagtgtgtgctggcaaattagattcggcattaggttcctaaagacatttgcattcaaagtaccacacaattaattgcaatttctctctcgccaggagtcacgtttggattccagtacaagatgcgtgctgtgtacgcccatttccccatcaactgtgtcacctccgagaacaacacggtcattgagatccgtaacttcttgggtgagaagtacatccgtcgtgtggagatggctcctggcgtcaccgtggtcaactccactgcccagaaggacgaacttatcgtggagggaaacgatattgagtctgtctccggatctgccgccctcatccagcagtccacgaccgtcaagaacaaggatatccgtaagttccttgacggtctgtacgtgtccgagaagacgaccgttgtgaagctagagtcttagacttttggaatgtgtttcaacctaaaatgttaataaaaaaaaaccaacggccgaaactttcaataagaaatttagtgtctttaaacttttgtaatataatgtattcagattttatcacaatgctccactaaaaaagtgatgattggttgaaaattcgttggtaagattgtgttatttatcttatttatttatttgcaaggtttcataagttcatgataacttgagattgaaagcactacaaaaggacctttaggaagagatcccgcttaaggcagaggtagtcctctgctggttccctctggcacacatatggaaactgaaccttgcactctatatcgtgatacccaaaggctccattgtaattggcgaatccaacacaatcctcttcgggggaagcgttgttcggttccaggggtacccagtttaggtacggcacagtttcgccgttcctggcgagaagaaaggtgcgccggttacccaagcaattgatgccagcccaaacggagtgatgccagctttgggtgaaggatagccccatactctttaggaacgtggttgtgaggagtttgtcctcttgattgtcgagcaccattagttcggcaccaagttttcgacagcttcgatcggcaacatgccagttggcctgaaataatatttttgcgtttaaataaaatccttgtacaacgtattgtacgcacctcctgcaaagatacgtggtagcacttgtttccgactcgactaaacggcaacggacacgtctgtgcattggcacattcgagaatcagagctataagaaggaaaccgaaagaccctttgatgcacatgctcatgttttagggccaactgatatgtttatatgaaagctagctacttttaaacgctcggcagagaactatattttattgcaagcagtcgggagataatatttattaacgttatcttaagcaaattagggcaatcagtgcgaaaatggcaagcatgtacaacgactgcgaatttatcattatcatttattacaaaaatattcaaagcctgttaatttactatgccatctggacgatggcacatacgccccttttacatttaaattgcacaaaggaatataaaaaaagaacttataattttaatatg

SEQ ID NO: 24941 - DNA, 744 bp, DROSOPHILA
gcgttatatttttattgaaattttaacccaaaatatctctaaaaccaccccttgcagcgaggagtccatccagaatttgtgtcatacaaacgagggactaacggagctgtcatcaagatgcgtaccattaattccaaccagtgcgtgaagatccctaaggatatcaaggcctcggtgaaggcccgtgtggtgaccatcaccggcacccgcggcaccctgaagcgcagcttcaagcacttggctctggacatgtacatgcccgacaagcgcaccctgaaggtggagaagtggttcggaaccaagaaggagttggccgccgtccgcaccgtctgcagtcacatcgagaacatgatcaagggagtcacgtttggattccagtacaagatgcgtgctgtgtacgcccatttccccatcaactgtgtcacctccgagaacaacacggtcattgagatccgtaacttcttgggtgagaagtacatccgtcgtgtggagatggctcctggcgtcaccgtggtcaactccactgcccagaaggacgaacttatcgtggagggaaacgatattgagtctgtacgtgtccgagaagacgaccgttgtgaagctagagtcttagacttttggaatgtgtttcaacctaaaatgttaataaaaaaaaaccaacggccgaaactttcaataagaaatttagtgtctttaaacttttgtaatataatgtattcagattttatcacaatgctccactaa

SEQ ID NO: 24942 - protein, 208 aa, DROSOPHILA
MRTINSNQCVKIPKDIKASVKARVVTITGTRGTLKRSFKHLALDMYMPDKRTLKVEKWFGTKKELAAVRTVCSHIENMIKGVTFGFQYKMRAVYAHFPINCVTSENNTVIEIRNFLGEKYIRRVEMAPGVTVVNSTAQKDELIVEGNDIESVRVREDDRCEARVLDFWNVFQPKMLIKKNQRPKLSIRNLVSLNFCNIMYSDFITMLH

SEQ ID NO: 24943 - DNA, 2364 bp, DROSOPHILA
taaagcgtgttgttctcaacacttagcatcagttgtcaacggctaatacgcgggagtcaagctcagaattcaaccacaaaaaccaacaacatgaaattcctatcactcgccttcgttttgggtctgctggctctggccaacggtgagtaatgccaactatttacaaactaaataagttatttaattatgattttaattatatttccaacacagccactcccctgaatcctggcaatgtcatcatcaatggcgattgccgcgtctgcaatgtgagggcctaagggcagcggagaatgaaggatgccagttgaagttcacacagccacacatatttttaagtcgaaaatgtaatagaaattcctagaatcaagtgcccatattaaatatattccaaacaaaacaacatattatttgtaatggggaaatattattgatttctatagataacaactgaaaggcagttgaggttcaggcaaaccacttaaatgtattccaattgcaaaatgtattacaaagttctaggaaaacaaactatgaaacaatcacttgtcattaaaagacgcttaaagtcagcttaatatttgttatttgttagtttagagatctggaatgagaaacaaattattgaaaatgatcttaggcgatggagaataccgtatttaattcaaataaatgttttaaagactaatacaaattttatattatcatattatgatttgattaattacattattatccaaatagatcagccttgctactgtatggtttagcaataaaatcgatacagcttaccgattttttgtttaataaataacaataattaaacaactaattaataggcactcctttccagacatttctttaaaataactatgtaaaatcccgcaaaataattataaacaattatatatataatatagcaaatactatatgtactatggcatataaaaagcagagcactcgcactttggcagtcagatttattcgaaatccccaaggaaaaacatgaaagctcttcaagtcgccggaactttgatgctgcttttctgcctgctggcagctgttaatggtaattatttaatgaaataataaaatatatatatgatatttttagctaatcatttccttattgcagctacgccgggacaagtgtatatcaatgggaaatgcattgactgcaataagcctgataatgatccgggaattataattcctccagaccataaatcagctggatccatgtcttacacactcacatctggagccatcttctttggaattatatatcatatattcagttaaattactatgtaatcaataagttaataaaataatatcttttatttctcaaaaaaaaaccttaagcttgtgacaaattgcgaacttaaatacaacccttatcacgtatagatttagtcacatattaaaactgctatttaacaaatcccaactttatgggtatttaaattgcatttagattatagcaattgcatattagattaaaatctgtaaatttaatttaattcccagctttgtttaaaccgctaggaagctttaaataatttagctttaatttttatatttattcatattgattttggaattagatttcctatttgagacaaatctacaataatctattattatttatattcgattgattgatcgctatcgctttattttgttttgccattgttctgaatgtacatcgccttatcaacatttttttttgtagggcatttccagactgggcacaacttttgtgtgattacaacagctgagatacgtactatccgggaaaaacctgatatttaaatttcatcataaaggtgcctataaaagaaaaccaatgaagtgaatttttatcagtttcatttcaaccgttgccaacaatatgaagtggatgtccttggtctttctatgcggtctgctcgccatggcagtgggtgagtatctataagattcatacatccttaaccagtatcctaattatttttctactattactatagcttctccgttaaatccgggtaatgtcattatcaatggagattgccgtcattgtaatgttcgcggaggctaaattggagttataaaactttgatgtttagtaactacaataaaacttatgaaaaatacagattgtgcataaagtgatggtcttttttattttattagtacgcaaactataatagttcgaacttcatttctaactgcaaaagttaataattataataataaacaacattttggtgtttcagtgactttagtttatttcatattctgatttccacattctaatcgccgcgtatattgcaaactttgcagtcgccgtttataatcacattgccaggactcagggga

SEQ ID NO: 24944 - DNA, 298 bp, DROSOPHILA
aaaacatgaaagctcttcaagtcgccggaactttgatgctgcttttctgcctgctggcagctgttaatgctacgccgggacaagtgtatatcaatgggaaatgcattgactgcaataagcctgataatgatccgggaattataattcctccagaccataaatcagctggatccatgtcttacacactcacatctggagccatcttctttggaattatatatcatatattcagttaaattactatgtaatcaataagttaataaaataatatcttttatttctcaaaaaaaaaccttaa

SEQ ID NO: 24945 - protein, 76 aa, DROSOPHILA
MKALQVAGTLMLLFCLLAAVNATPGQVYINGKCIDCNKPDNDPGIIIPPDHKSAGSMSYTLTSGAIFFGIIYHIFS

SEQ ID NO: 24946 - DNA, 7917 bp, DROSOPHILA
agtcgcgcgtacgaatgaaatgacgaccggaaaatgataaatgcaaacgacagcgtgtgtatatgggtgcggcgttgccaccttgatgttttcccagtcaagtcgatttggtattattttggtaaatatttgtattgtatttgcttgctctacctggagattgttagctatacatttgccaaggattaaattgggattttctgtacgataccaccccaaataagcctatataaggagctaaatgggcgcgtgacttgtctgcttgcagtatggcagctttgatttatacaatgtacacacacctatgaagagaaaatgaaaagaataccaaaaattttatacaaatattttaaagcccagtttacacaatggacaagttacttggtttataaattcattttagttgtattaaaggtttaaatatttaaataaatattaagtatttcataaacatttataattttataaatataaaaaatacaatgttcattatttactatgtgttgggaacgaaaacaacatttacatacaaagaattgtttaaaatcgaattttcatattaacttcttataggctgaaacatcaacaatattttaaatcatttaattggtttatattaaatatttttattttttgcaaaaatttatacaattttcatattcggatttcccaacaggttataatataacgttattatggtttttatttatttgctatataaaatgtttcctttaaagaaaggtgtttcatgagcttactcaaaaaatcggaaatggctaaaatgaaaataagttttataaaactatttaaaagaaacttagcgcccctaaaatgagcttaattgagctcaaatatgaaaatatcaaattcatcaaaatattctatggaacatactagattaaccaccccaaaaaaagaagtgtgtgcacacccttggaaaagccgccatcattcacacaccaacacacgcgaaaccaagaataaaactgtgcagaggcaaaaaagaggaaaagaggaacgaacgtcggttctcttctcgattcaacacacttgtccaatttcattgcgtttgcgattattttctactcaaaagccacaacatatgcatcgtaacttaattcaacaacaactgtgatcgccaaacatcagaaagcaacaaaaaatacacgtcaagaattgccaagttagttattctcaaaaaaaaagacaaaaagaattgcaacaaactagactagtgtgtgtgtgtgagcgagtgagtgcattggtgtgtgtggctgtgtgttttgtgtgcagcttgcaattttatactgcatttcatacgtttcgactatcgttttgtaaattaaaaaaaccgcataatttcagcgctccactaagaaatccaactctccccgccccccgcaggaagataacaaagaaaagtgctacaaaaagtgccgatttttcggcaaacttcaacccaaaagcaatacacactgtgcattacaaaaaggaaaaataaaaacgaggaaaaatatcgcttaaaaaaggtgagccggcgacggcctcgtgtgcgcggtctagaaaaactagcattttccattttcaaaggggtggcgcatactaggaaaaaatcaacataaaaaatgctaaatgggcgtatattttattattgcggcagggctctatctcttaaatttttttttttaccattttagcggctttttttattatcgcttgtgcataacctaaaaatgtacgaaaaattttgtttttgtacatttttgtttaaatgctgctcttcaactatagctttctttgttcttcctacacacgcggttcgcaagcagaaatagagtgggaaagagagaacccgaaagagcggcgcgttcataaccgaatatgtgtgcgtgtgggtttgccgcaactcattgtgcattttttgttttatcggcaaatgtttatggctaaaatggggcaaaggacacctgcaaacattgatatttacttacaccttttaacgctatttcaagtgtttttgcaaggcagcaatttgatattttggccaagctggagttcattgtatgcggcgccacaaccttgagacccgaacataacctcaatttaattcatgctcctcgcttggcggcttcttttttttctttgccaaattgtatgaggtcatttactcgcgcacacacacacacgtgcaaagttcagtcagccaggatcgcaggcataaaagctggagcacgtgcagggttaaatgtcctgcgacggcaagcaaattggaatttttcctgacagctgcactacaccaaatttccccttttcgcatgtgcaaatgtgtgtgggccccaaaagtgggtcaaactgcagcgcgctgcgtctgttttatatgcactgcggtaaaatgagctccctgttttgggtgtacaaacctccccccctccccgccgtccttgtgaccaagcgaaactctagatccttattggagagcacagcaggggtcaacactttggtagtcagtcacatttctctagaaatttatgtaaaagaagcacagattgatttaatggacagtctgaaaatccaattaaatttgtttcttatatttgcgtgttttaccgttatcaagccttaattctccaaattaaatttacacgtgatgaaattaactgataacacaactagtgattcattatggtttctatacttttaccggcacaggtatgaataagccatctttgaacaccttttggagattgtaagaaacagggtagcagcttcctttaatttcaaattatcagattgaaaaatctacacagtcgtctaggacttttgccaacttttctttttttttattaaaaaaaccagacagattttcatagtgcgcgtatattttttgcactatttcgcagacgttcccacactctcaatcgacacagatcagccaccgtgtcgatagatccgagcagcagctagaaagaagggaagcagaaattggaagcggagacaaagaatccgagtcgaagagtccgtagttcagagaggaagaatcaaacgccagctatggtcatggatgcgacccaatcgcagcagccttcgccgcaatctgtgggacgcgagtttgtccgccagtactacacgctgttgaacaaggcgcccaaccacttgcatcgcttctataaccacaactcgtcgtacatccatggagagtccaagctggtggtcggtcagcgggagatccacaaccgaatccagcagctgaacttcaacgattgccacgcgaagatcagccaggttgatgcccaggccactttgggcaacggtgtggtggttcaggtcaccggggagctatccaatgatggccagccgatgcggcgttttacccagacgttcgttctggccgctcagtcgccgaagaagtactacgtgcacaacgacatcttccgctatcaggatctctacatcgaggacgagcaggatggcgagtcgcgatcggagaacgatgaggagcacgatgtgcaggtcgtcggtggcactgtggatcaagctgtgcaggtggccggcgatgtagttgcccagcagccgcagcaacagcaggctcctccgcagccacaggctcaggtcgtggtgccccagcaggtagctcctgtagcggccggtggtgctgccccacagcagatcttctacccattgccagcgggtgctgccgccggacgtcctgtggctgttttgccaccagctccgcaagccgctgctgttccactgcccgcgcagttcaccgttccgccgccacagcccatccagaacggtgtggtgtcgcacgaggagctgcagcagcagcaggtgctggtcccacccagcgtgtctcccctggtacagcagcagcagccgaccggcacgcctgtgttgcccattgttccagtgccaagcgcgggcttccaacagtcgccactggtggcaccacagctcatccagcagcagcagcagcagcaaccggcacagctgcccccgcagcagcagcagcagcagcaacctatccagcagcagcagcctttgcaacagcagcaacaaccgctggctgagcccgaggaagtggaggtggcgccaaggcagcagaagcctcccacgcccgtcgaggatttcaagaccattcacgagcagcagcagcaggagaagtacgaggccgccaagcagcagcagaatgagcccaagacgtacgcgaatctcttcaagtccacgtcctcctcgcccagcggctttgtgaacgccgcactgcagcagcagcaacagctccagcagcaacagcagcagcagcagtccatcagcagcaacacctataactcttcctcggcaacctcgggtggcggtaatggcagtcaggttagctactccaccaccgcttcgtcgtacaacaacagcaacggcaactcgcgactggacaacggtggcccgctgccgcagcgaaacaactcgatccgcaacaacaagggtggtaagttcatcgttccacccttaaattaaaaggggtcattcccctctattcggcttcagggtaaaaagactaaaagatgtagtgcaaacttttggatctcatgtagaaatgaaaacagtggtttctaagaattacttttttagtccccttataatttattatgattggcttacgttcagatttttagaaaggtaatgattcattttgttggtttactttcttatcaacttaaggttggcttatatgataagcaaaattgggtaccgctttttagaaactcttcctaataacttgctgtttatactttacagactttgagcagcgtcgctcgagcaacacgcagcagttcggtgataatcagcagctgtttttgggcaatataccgcaccacgccagcgaggatgatctgcgcgagatcttctcacgcttcggaaatgtcctggagctgcgcattttgtccaaggctggcaacaaggtgccaccaggcatgcgcagtccgctgaactacggattcattacctacgacgatcctgaggcggtgcaaaagtgcctggcgaactgcgtaagttaagcagaaagtagatttaattattggaattgctaaggtatctcttttatctccttacttttactgtgatcagaaaggttatctaaacatattctttccatttcatagcccctatacttcccggagaactcacccgatggccagaagttgaatgtggaggagaagaagccgcgtgtccgcaacgacatggtgccgcgccagcagatcggtggcaacaacctgaacaacaacatgggccgtttgggcggcaacaatggtccgcagtcgcgtccgatgggcaacaacaatggcagcggcggtggcatgatgcgcaacaatgccggtggcaacaatctgcgccagggcggcggcggaggaaacggtgctcctcgcctgggaggcggcggtggattcggacagcgccaggataaccgcaccggtggcggcaacaaccagtctaacggaccgctgcgcggtgccggaaatggacagagtggtggtggcaactacggacgtcgctaagggaattgtccagcagcacgacatcagcaaaagcatcaacaaatgagcaacggcagcagtagcgactataacatcaagaacagcagcaacaacccaacgttaaaaacatcgacttcttccacaatgcaatcaatcaattacattcaagaacatctcatgcaattaaacacacgcaaatcacacactcatacactaagataaagtagttggagcaacataaaacgtcaactgtcctttaaatgttcctgagcgcaactctcggggcgtcgaactacaaacaaaaaagaaggaaagaaagataggatgtaaagagttgcgtcaacggtcctgagtcccttcttagtttaattgcgttaggctcgctttttccagccagttcgtgccaaaatataccgaaattctgtgcaaatcttcgttgtgaatccaaaaactaaaagaatgtaagcttcagctcggcaactgctactctctaccacccaccacccactcacggaatcaacttcaccttgaaacacgtgtattaaatttaagtctcaaccaagcacacccacaaaacactcatcgcaaaacacacgatcgcacacaaaagccaacacaagatacatacactcacccattttagcataaatgtaaactttagtttcagcttttgtttggcattaaccttcaactaaaatctatcttaagtacgcaagatgcaagaaattggtttgatacgaaggaaaggagcaatgcaacacatttttgtttgttttttcattgaataacaccattacttaagctaaaaacaaaaaaataattaaaagggaaaacttacacacttagctaaaaagatataaagagaagtaaaagagaaaaaaaaaaacagaaaaaaaaatgaaaaacctttgtaaaatgcaataaaaaagagcaaaagaaagacttgaaaaaattaatttaaaaactaaaaaaaaaaatggaatgtaaacacgagaaaaatgtaaggcgcggttaaaaacaagcaaaaataagatcacgataagcaaagcaagcacacaagaacacaaacctctttaaaaaaacattgaaaatgaaaggaaaatcaattgagcaccaagccgcaaggaggaaaagcgaggaaaacacaaacacacatcgacgtcgacgtttagcgccccagaaagaaagtccgccgcattttagagcctgtaaaccttttgctacttaaatctaatttgcagactagctagtctatataggtatcgtatcggttcgaaacggttcggttcgcttcgaatcggtttggatcggaagagtgtggagatgagagcgtgtgatgagggcaaatgcggtgccggcgccgcaggtgggtgcgtgttcgatgcaatcgatggtcaggaataaacggacggacggacggtcagtgttttcgcttttcttttattcgttctgtgtaataagttcaaggtcgtaaaccaaactaagtcaagcaacttaaacgatttggtgtttccaacgcagttgtgaactaaaatttagtacatattttttaaataaaatcaagaaaagcccaaaaaaagaatgaaacgaaatgagtagagaagatgtgaagcatataaacacacaagaacctattataataaatagttgggggacgagacacaagctactaacatttttctcaaggtaaaacaagcaaaacatgtaacaacaaatatatacaaaatatatataaacaaaacaaaaactcatataatttaatgttaacttttagacttaccagaaatctaaatatacataaatatatatatatatatatttatataactgctgctgcaaaataaaaataaggcagaaaagcgattaggaaactgaaaacattaaattcgtgtgagcatcatttgagttttgtcgcaggcgtccaaatatatataattgcccaagttattcttgttttgttaaagcttaaggacttttaattcgttgggaacatatcatttgtttttgttgttcgacgcctgccctagagaatcaattgctaaatcaattacaatcgcaatttccacaactatttctatataacaccacgcatttctagcactgtgaacagggtctaaagcaattttagtgcattttttgtaaaacgaaagtgttagtgttcaaaccttagctcaacgatcagtgctgaaagtgctccgtggccagcaacaacatcatagaaataataaacaaacaaaaaaaaaaataagaaacatgaaaacagcatcaaacaatacaatacaaatcagaggtactaactaaatcgatgtaagagtaaacgaaaaacaaacaattagagttcatgctcatttctaagtaaaccgatgaaatcacaatactgcagtttgta

SEQ ID NO: 24947 - DNA, 3775 bp, DROSOPHILA
aaaagaggaaaagaggaacgaacgtcggttctcttctcgattcaacacacttgtccaatttcattgcgtttgcgattattttctactcaaaagccacaacatatgcatcgtaacttaattcaacaacaactgtgatcgccaaacatcagaaagcaacaaaaaatacacgtcaagaattgccaaacgttcccacactctcaatcgacacagatcagccaccgtgtcgatagatccgagcagcagctagaaagaagggaagcagaaattggaagcggagacaaagaatccgagtcgaagagtccgtagttcagagaggaagaatcaaacgccagctatggtcatggatgcgacccaatcgcagcagccttcgccgcaatctgtgggacgcgagtttgtccgccagtactacacgctgttgaacaaggcgcccaaccacttgcatcgcttctataaccacaactcgtcgtacatccatggagagtccaagctggtggtcggtcagcgggagatccacaaccgaatccagcagctgaacttcaacgattgccacgcgaagatcagccaggttgatgcccaggccactttgggcaacggtgtggtggttcaggtcaccggggagctatccaatgatggccagccgatgcggcgttttacccagacgttcgttctggccgctcagtcgccgaagaagtactacgtgcacaacgacatcttccgctatcaggatctctacatcgaggacgagcaggatggcgagtcgcgatcggagaacgatgaggagcacgatgtgcaggtcgtcggtggcactgtggatcaagctgtgcaggtggccggcgatgtagttgcccagcagccgcagcaacagcaggctcctccgcagccacaggctcaggtcgtggtgccccagcaggtagctcctgtagcggccggtggtgctgccccacagcagatcttctacccattgccagcgggtgctgccgccggacgtcctgtggctgttttgccaccagctccgcaagccgctgctgttccactgcccgcgcagttcaccgttccgccgccacagcccatccagaacggtgtggtgtcgcacgaggagctgcagcagcagcaggtgctggtcccacccagcgtgtctcccctggtacagcagcagcagccgaccggcacgcctgtgttgcccattgttccagtgccaagcgcgggcttccaacagtcgccactggtggcaccacagctcatccagcagcagcagcagcagcaaccggcacagctgcccccgcagcagcagcagcagcagcaacctatccagcagcagcagcctttgcaacagcagcaacaaccgctggctgagcccgaggaagtggaggtggcgccaaggcagcagaagcctcccacgcccgtcgaggatttcaagaccattcacgagcagcagcagcaggagaagtacgaggccgccaagcagcagcagaatgagcccaagacgtacgcgaatctcttcaagtccacgtcctcctcgcccagcggctttgtgaacgccgcactgcagcagcagcaacagctccagcagcaacagcagcagcagcagtccatcagcagcaacacctataactcttcctcggcaacctcgggtggcggtaatggcagtcaggttagctactccaccaccgcttcgtcgtacaacaacagcaacggcaactcgcgactggacaacggtggcccgctgccgcagcgaaacaactcgatccgcaacaacaagggtgactttgagcagcgtcgctcgagcaacacgcagcagttcggtgataatcagcagctgtttttgggcaatataccgcaccacgccagcgaggatgatctgcgcgagatcttctcacgcttcggaaatgtcctggagctgcgcattttgtccaaggctggcaacaaggtgccaccaggcatgcgcagtccgctgaactacggattcattacctacgacgatcctgaggcggtgcaaaagtgcctggcgaactgccccctatacttcccggagaactcacccgatggccagaagttgaatgtggaggagaagaagccgcgtgtccgcaacgacatggtgccgcgccagcagatcggtggcaacaacctgaacaacaacatgggccgtttgggcggcaacaatggtccgcagtcgcgtccgatgggcaacaacaatggcagcggcggtggcatgatgcgcaacaatgccggtggcaacaatctgcgccagggcggcggcggaggaaacggtgctcctcgcctgggaggcggcggtggattcggacagcgccaggataaccgcaccggtggcggcaacaaccagtctaacggaccgctgcgcggtgccggaaatggacagagtggtggtggcaactacggacgtcgctaagggaattgtccagcagcacgacatcagcaaaagcatcaacaaatgagcaacggcagcagtagcgactataacatcaagaacagcagcaacaacccaacgttaaaaacatcgacttcttccacaatgcaatcaatcaattacattcaagaacatctcatgcaattaaacacacgcaaatcacacactcatacactaagataaagtagttggagcaacataaaacgtcaactgtcctttaaatgttcctgagcgcaactctcggggcgtcgaactacaaacaaaaaagaaggaaagaaagataggatgtaaagagttgcgtcaacggtcctgagtcccttcttagtttaattgcgttaggctcgctttttccagccagttcgtgccaaaatataccgaaattctgtgcaaatcttcgttgtgaatccaaaaactaaaagaatgtaagcttcagctcggcaactgctactctctaccacccaccacccactcacggaatcaacttcaccttgaaacacgtgtattaaatttaagtctcaaccaagcacacccacaaaacactcatcgcaaaacacacgatcgcacacaaaagccaacacaagatacatacactcacccattttagcataaatgtaaactttagtttcagcttttgtttggcattaaccttcaactaaaatctatcttaagtacgcaagatgcaagaaattggtttgatacgaaggaaaggagcaatgcaacacatttttgtttgttttttcattgaataacaccattacttaagctaaaaacaaaaaaataattaaaagggaaaacttacacacttagctaaaaagatataaagagaagtaaaagagaaaaaaaaaaacagaaaaaaaaatgaaaaacctttgtaaaatgcaataaaaaagagcaaaagaaagacttgaaaaaattaatttaaaaactaaaaaaaaaaatggaatgtaaacacgagaaaaatgtaaggcgcggttaaaaacaagcaaaaataagatcacgataagcaaagcaagcacacaagaacacaaacctctttaaaaaaacattgaaaatgaaaggaaaatcaattgagcaccaagccgcaaggaggaaaagcgaggaaaacacaaacacacatcgacgtcgacgtttagcgccccagaaagaaagtccgccgcattttagagcctgtaaaccttttgctacttaaatctaatttgcagactagctagtctatataggtatcgtatcggttcgaaacggttcggttcgcttcgaatcggtttggatcggaagagtgtggagatgagagcgtgtgatgagggcaaatgcggtgccggcgccgcaggtgggtgcgtgttcgatgcaatc

SEQ ID NO: 24948 - protein, 690 aa, DROSOPHILA
MVMDATQSQQPSPQSVGREFVRQYYTLLNKAPNHLHRFYNHNSSYIHGESKLVVGQREIHNRIQQLNFNDCHAKISQVDAQATLGNGVVVQVTGELSNDGQPMRRFTQTFVLAAQSPKKYYVHNDIFRYQDLYIEDEQDGESRSENDEEHDVQVVGGTVDQAVQVAGDVVAQQPQQQQAPPQPQAQVVVPQQVAPVAAGGAAPQQIFYPLPAGAAAGRPVAVLPPAPQAAAVPLPAQFTVPPPQPIQNGVVSHEELQQQQVLVPPSVSPLVQQQQPTGTPVLPIVPVPSAGFQQSPLVAPQLIQQQQQQQPAQLPPQQQQQQQPIQQQQPLQQQQQPLAEPEEVEVAPRQQKPPTPVEDFKTIHEQQQQEKYEAAKQQQNEPKTYANLFKSTSSSPSGFVNAALQQQQQLQQQQQQQQSISSNTYNSSSATSGGGNGSQVSYSTTASSYNNSNGNSRLDNGGPLPQRNNSIRNNKGDFEQRRSSNTQQFGDNQQLFLGNIPHHASEDDLREIFSRFGNVLELRILSKAGNKVPPGMRSPLNYGFITYDDPEAVQKCLANCPLYFPENSPDGQKLNVEEKKPRVRNDMVPRQQIGGNNLNNNMGRLGGNNGPQSRPMGNNNGSGGGMMRNNAGGNNLRQGGGGGNGAPRLGGGGGFGQRQDNRTGGGNNQSNGPLRGAGNGQSGGGNYGRR
